United States Patent Application Publication US 2018/0126003 A1 - sequence listing, part 121

SEQ ID NO: 212046 - DNA, 1668 bp, Artificial Sequence
  derived and/or modified sequence
atggagaaggcccggcccctgtgggccaacagcctgcagttcgtgtttgcttgtatctcctacgctgtgggcctcgggaatgtatggagattcccatacctttgtcagatgtatgggggcggatcattcttggtcccttatataattatgctcatcgtggaaggtatgccgttgctgtatctggaattggctgtgggacagcgcatgagacaggggtcaatcggggcttggcgcaccataagcccatatttgtcaggtgtgggcgtggctagtgtcgtcgtcagcttttttctatcaatgtactataacgttattaacgcctgggcgttctggtacctcttccattctttccaggatccgctaccttggtctgtctgtcccctgaatggcaaccatacaggatacgacgaagaatgtgagaaagcctcctctactcagtacttctggtaccgcaaaaccttgaatatctccccttctctccaagagaacggaggcgtgcagtgggagccggccttatgcttgctgctagcgtggctcgttgtctacctttgcatcctcagggggaccgagtcaaccggcaagatcgagcagctcgccaatcccaaagcctggatcaatgctgccacccaaattttcttctcactgggccttgggttcggtagcctcatcgcgtttgcctcttacaatgagccctccaataattgccagaagcatgctatcattgtgagccttattaactcctttaccagcattttcgcgagtatcgtgacattctccatttatggctttaaagccacttttaattacgaaaattgcctaaaaaaagtgtccctgttgctgacaaatacctttgatctggaagacggctttcttaccgcaagcaacctagaacaggtgaaaggctacctggcatctgcctatcccagcaagtactccgagatgtttccccagatcaagaactgcagtctagagagcgagttggatacagccgtacaggggacaggcctggcctttatcgtgtacaccgaagccatcaagaacatggaggtttctcaattgtggtccgtgctctatttttttatgcttttaatgctaggcattggctcaatgttgggcaacacagcagccatacttacccccctgacagactcaaaaattatttcgagccatctcccaaaagaagccattagcggtctggtctgtttggttaattgcgccatcggtatggttttcacaatggaggccgggaactactggtttgatattttcaatgactatgcagccaccctgagtctcctcctgatcgtgctcgtcgagaccattgccgtctgctatgtgtatggactgcggaggttcgagagcgatctgaaggcaatgacagggagggcggtaagttggtattggaaagttatgtgggcaggggtgtcccctctgctaattgtgtcactgtttgttttctacctgagcgactatattctcacaggaactttaaaatatcaggcgtgggacgctagtcagggacagcttgtgaccaaggactaccctgcgtacgcattggctgtcattgggctgttggtggcctcatctaccatgtgcatccccctcgcagccttggggacattcgtccagcgacgcctgaaacgcggtgatgccgacccggtggcatag

SEQ ID NO: 212047 - DNA, 1668 bp, Artificial Sequence
  derived and/or modified sequence
atggagaaagccagacctctgtgggcaaactccctccagtttgtgtttgcttgtatctcctacgccgtcggtctgggaaatgtgtggaggttcccctacctctgtcagatgtacgggggtggaagcttccttgtgccttacattattatgctgattgtagaggggatgcccctgctatacctagaactggccgtggggcagcggatgcggcaaggcagtataggggcttggagaaccatttcaccttacttgtctggcgtcggagtcgcatcggttgttgtgagtttcttcctcagcatgtattataatgttataaatgcctgggcgttttggtaccttttccacagctttcaggaccccctgccatggtccgtgtgccccctgaacggcaatcacacaggatatgacgaagagtgcgagaaggcctcctcaacccagtacttctggtatagaaagacactcaatatttccccgtccctgcaggagaatgggggagtccagtgggagcccgctctgtgtctgctgctcgcttggctcgttgtgtacttatgcatccttcggggaacagagtcaaccggtaagatagaacaattggctaatcccaaggcttggattaacgccgctacccagatcttcttctcactcgggctgggatttgggtccctaattgcgttcgcgagctataacgaaccgtccaataattgccagaagcacgcgattatcgtgtctttaattaattcatttacctcgatatttgcttctatcgtgaccttctcgatatatgggtttaaggccactttcaattacgaaaactgccttaagaaagtctcccttttactcactaatacgttcgacttggaggacggctttttaaccgccagtaacctggagcaagtcaaagggtatttggcctccgcttaccccagtaaatacagtgagatgttcccgcaaattaagaattgttccctggaatcggagctggatactgctgtacaggggacgggactggcctttatcgtctacaccgaagcaattaaaaatatggaggtctcacagctgtggagtgtcctttactttttcatgctgctgatgctcggtatcgggtccatgttgggaaacactgcagctatactaacaccgctcaccgattcaaagatcatatcatcacaccttccaaaagaagccatttcaggcctggtctgcctagttaattgcgctatcggcatggtctttacaatggaggctgggaattattggtttgatatttttaatgactatgcagcaaccttgtccctgctgctgattgtactggttgaaaccattgcggtgtgctatgtgtacggcctgcgcaggttcgaatctgacctcaaggccatgaccggcagagcagttagttggtattggaaagtcatgtgggccggagtctctcccctcctcatcgtgagccttttcgtgttttacctctccgattacatcctcacaggcaccctgaaataccaggcatgggacgcatctcagggtcaactggtgacaaaggattatcctgcctacgcactcgcagtgataggcctgctagtggcctcgagcacaatgtgcatcccactcgccgctctcggaacctttgtccaacggaggctgaagaggggcgatgcagacccggtggcttag

SEQ ID NO: 212048 - DNA, 5247 bp, Artificial Sequence
  derived and/or modified sequence
actgccgtgccggacccccgagccggagccgagcgcgccgaggccggggccatggagaaagcgcggccgctgtgggccaactcgctacagttcgtgttcgcctgcatctcgtacgccgtgggcctgggcaacgtgtggcgattcccgtacctgtgccagatgtacggcggaggtagtttcctggtcccctacatcatcatgcttatcgtggagggaatgccgctcttgtacctggaactggctgtggggcagcgcatgcggcagggcagcatcggcgcctggaggaccatcagcccgtacctcagtggtgtcggggtcgccagcgtggtggtctctttcttcctctccatgtactacaacgtcatcaacgcctgggccttctggtacctcttccactccttccaggatcccctgccgtggtctgtctgcccactgaatggtaaccacacgggctacgatgaggagtgtgagaaggcgtcctccacacagtacttctggtacaggaaaaccctcaatatctcgccgtccctccaggagaacgggggtgtgcagtgggagccggcgctgtgcctcctcctggcctggctggtggtgtacctgtgcatcctgcgtggcaccgagtccactggcaagatagagcagctggccaaccccaaggcctggatcaatgcagccacccagatcttcttctcacttggcctgggcttcggcagcctgatcgccttcgccagctacaatgagccatccaacaactgccagaagcacgccatcatcgtgtccctcatcaacagcttcacctccatatttgccagcattgtcaccttctccatctatggcttcaaggccaccttcaattatgaaaactgcttgaagaaggtgagtctgctgctgaccaacacttttgaccttgaagatggctttttgacagccagcaacctggagcaggtgaagggctacctcgcatctgcctacccaagcaaatacagcgagatgttcccgcaaatcaaaaactgcagcttggaatcggagctagacacggccgtccagggcactggcctggcattcatcgtctacacagaggccattaaaaacatggaggtgtcccagctgtggtcggtgctctacttcttcatgctgctgatgctgggcattgggagcatgctggggaacacagcggccatcctcacccctctgacagacagcaagatcatctccagccacctgcccaaggaggccatctcaggtctggtgtgccttgtcaactgtgccattggcatggtgttcacgatggaggctgggaactactggtttgacatattcaacgactacgcggccacactgtccctgctgctcatcgtgctggtggagacgattgccgtgtgctacgtgtacgggctgaggagatttgaaagtgaccttaaggccatgaccggccgagctgtgagctggtactggaaggtgatgtgggctggcgtaagcccactgctgattgtcagcctctttgtcttctacctgagcgactacatcctcacggggaccctgaagtatcaagcctgggacgcctcccagggccagctcgtgaccaaagattacccggcctatgcactggctgtcatcgggctgcttgtggcctcctccaccatgtgcatccccctggcggccctggggacttttgttcagcgtcgcctcaagaggggagacgcagaccccgtggcctgagatgtgggcttcccagccgctcacggttttacagatactatttacaggcggaaactcctcggctgctttttcaaatgcttaagccaggagtgctcagcccatcaacttcctgagtgtctaaagaagatgaggaaggtgtgcaggaagaaaactcccttgggagaacgcacaccctcccgtggtggctgttcctccctgtcacctgcctcctcatcatggaagggggtgggctatgaaagccggtctcaaagataactgcatccttcattccaggaaagccctagaattagggcacattgcaaactgaaatatgactataattcttatgggaccaaatttaagcaatttttgtttttggctgaagagacaccaaaatattagaggacaaatatttttagatccatttaaggagttttgaagtgcctaagatgacctatttgtcagtggtgcaaaattaattctcttcttttttgagttgtagtgaatatgcaatttctgtgttccccttccaccctttaaatcttaggatgacaagttataaagaaagaagatctttgtctgggacccccaaagggatcctttctctaaggtctctgacggtgggtccaggaccagacctctctacaaaaaattgccccaactacagtttgcaaccccaaaccacattagaagtctgtgcagacatccctccgtggtgtgtgtcttggtgcattggaaaaggagtcaggagccactgtgaggtgagaatgaaagtggatctcagctgggcacggtggctcacgcctgtaatcctagcaccttgggggtcaaggtgggtggatcacttgaggtcaggagtttgaggccagcctggccaacatggcgaaaccccatttctactaaaaatacaaaaaaattagctgggagtggtggcataggcctgtaattccagctactctggctgctgaggcacaagaatcatttgaacctaggaggtggcggttgctgtgagccaagatcatgccactccactccagtctgggcgacagagcaagactctgactcaaaaaaaaaaaaaaaaaaaagtggctctgactttcccataggcttaatattacatttggacatcgtggccaactctatcaagaccacaaataccacttacaattaattttaaattattcatctgtacatagttttctaaaatgtatataattcaaacagagcatcttgtaactgaagacacaccatatctatgatatcgcattagtccatgtggggaaaagaaagatcagattgttactgtgtctgtgtagaaaaggaagacataagaaactccattttgatctgtactaagaaaaattgtttctgctttgagatgttgttagcctataactttagccccaactctgtgctcacagaaacatgcgctgtaatgaatcaaagtttaatggatttagggctgtgcaggatgtgccttgttaacaatatgtttgcaggctgtatgcttggtagaagtcatcgccattctccattctcgattaaccagggacacaatgcacagcagaaagctgcagggacctctgcccaagaaagcctgggtattgtccaaggtttcccccccactgagacagcctgagatatggcctcatgggaagggaaagacctgactgtcccccagcccgacacctgtaaagggtcggtgctgaggaggaatagtgaaggagggaggcctctttgcagttgagataagaggaaggcttctgtctcctgcttgtccctggtaatggaatgtctcggtgtaaaaagctgaccattcccattcgttctattctgagataggagaaaaccgccctgtggctggaggtgagatatgctggcagcaatactgctctgttactccttgctacactgagatgtttgggtaaagagaaacataaatctagcctacgtgcacatctgggcacagtacctttccttgaacttattcgtgatacagattcctttgctcacatgtttccctgctgaccttcttcccacctgttgccctgctacactcccctcgctaagacagtaaaaataatgatcaataaatactgagggaactcagaggccagcgccggtgcgggtcctccacatgctgagcgccggtcctgggcccactgttctttctctatactttgtctctgtgtcttatttcttttctcaaaaaaatttttctttttttaactgcaataaagtaggtcgttacccctaaagtgagcgagtcccttcctgctctaacgtccagtgcttccttgagatcatggaattctggagagtttctgtggatatatttgcacagatatctttgaagacacaaacactcacctgggacgttggccggagatgtctttttatttttgtgctgtaaaattctcttacagcaaaaataggctttagaaaggtcttctactgtcttcagcaaccatctcatcttccagcttcacctgattgtccagttatcatacatttgactttcaaatgtatgaaccagcatgtaccccatggatttaatcttatctaccccgtggattcaatcttcttatcagaaggttcttttatgtcaaaaaacctgctgtcaaggcttgaagagccggcacactcaatggcaaacacagcaccgagtctgctctgaatcctggaggatctggccctcctctcaatccccactcacagtcaccgtcttacaactcagggccacctgggatcagtcatcagtcagggtgcgtaagccttgaataccaggtagcctcaggagtgaaaagataaatgtcctagatcattaccttattcagtgtccccaccttgcagcgcattccaaccacctgggagcatttaaaactccagatgcccacaccacaccctggggccacccatcagaccttctggaagcaagacctgggcctccatggccccaaaaactccctaggtgatccgatgtgcagccaaatctgagaggccccatttaaaaaagaaagaacatgggtggtacattgaggagtatttacattttataaaatgacttaaaaatttgaaggcatttttgagcatttccaattatatggaagagttacttctacggaatagtttttgctcatggaactcaaacagatgaagcaccactgttacagaataatgtgctccagatgaaaatgtctcgtttctgtgaatttcatgaagagcagaacatttctcaagaatcctcttgagccagtaatcaatcctgtctcaaaaaatgttctttgccatttcctagatactgcacaaaagtggccatgtcgacatttgtccacccaccctccaataagctggagcgacaaagggacattccatccctgtacccttagtggtagccatgacacgatggccagatcatggactccggaaagctttctgtttttactggaaacatagcaaaccttgatttagctccaagaaattgagtagggaaatatttgttttttagcaattgtcatagtaaataaaactctaagcaagtgtatctac

SEQ ID NO: 212049 - protein, 651 aa, Artificial Sequence
  derived and/or modified sequence
MGDLSSLTPGGSMGLQVNRGSQSSLEGAPATAPEPHSLGILHASYSVSHRVRPWWDITSCRQQWTRQILKDVSLYVESGQIMCILGSSGSGKTTLLDAMSGRLGRAGTFLGEVYVNGRALRREQFQDCFSYVLQSDTLLSSLTVRETLHYTALLAIRRGNPGSFQKKVEAVMAELSLSHVADRLIGNYSLGGISTGERRRVSIAAQLLQDPKVMLFDEPTTGLDCMTANQIVVLLVELARRNRIVVLTIHQPRSELFQLFDKIAILSFGELIFCGTPAEMLDFFNDCGYPCPEHSNPFDFYMDLTSVDTQSKEREIETSKRVQMIESAYKKSAICHKTLKNIERMKHLKTLPMVPFKTKDSPGVFSKLGVLLRRVTRNLVRNKLAVITRLLQNLIMGLFLLFFVLRVRSNVLKGAIQDRVGLLYQFVGATPYTGMLNAVNLFPVLRAVSDQESQDGLYQKWQMMLAYALHVLPFSVVATMIFSSVCYWTLGLHPEVARFGYFSAALLAPHLIGEFLTLVLLGIVQNPNIVNSVVALLSIAGVLVGSGFLRNIQEMPIPFKIISYFTFQKYCSEILVVNEFYGLNFTCGSSNVSVTTNPMCAFTQGIQFIEKTCPGATSRFTMNFLILYSFIPALVILGIVVFKIRDHLISR

SEQ ID NO: 212050 - DNA, 1956 bp, Artificial Sequence
  derived and/or modified sequence
atgggggatctgtcctccctgacccccggagggagtatgggactgcaggtgaatcgcgggtcccagtcgtctctggaaggagcgcccgctacagctcccgaaccccactcgcttggcatccttcacgcctcctactctgtgtcccaccgtgtgcgcccatggtgggatattactagttgcagacagcagtggacacgacagatcctcaaggatgtgagcctttacgtggagtccgggcaaatcatgtgcatcctcggctccagcgggtcagggaagactactctcctcgacgctatgagcgggaggctcgggcgcgccggaacttttcttggcgaagtttacgtaaatggccgagcactgagacgcgagcagttccaggattgtttctcttatgtcttacaatccgatacactgttgtcatctctcacagtacgtgaaacactacattacaccgccttgctggcaattcggcggggcaatccaggatcttttcagaagaaagtagaggctgttatggcggaactctccctgagtcatgtggcagataggctgataggcaattactccctcggcggaatttctacaggcgagaggcgcagagtttcaatcgccgcccagctacttcaggacccaaaagtgatgctgttcgatgagcctaccacagggctcgactgcatgaccgcgaatcagatcgtagtgcttctcgtggagcttgcacgacgcaatcgtatcgtcgtgctgaccattcatcaaccgaggtcagaactgtttcagttgttcgataaaatcgccatactgtcctttggcgagctaatattctgcggtaccccagctgaaatgctggactttttcaatgattgtgggtacccttgcccggagcactccaatccatttgacttttacatggacctcacatctgtggatacacagtccaaggagcgagaaatcgagacaagcaagagggtgcagatgatcgaaagcgcatataaaaaaagcgcaatctgccataagacccttaagaatattgagaggatgaagcacctgaagacactacccatggtgccttttaagaccaaggacagccctggtgtgttctccaagctgggcgtcttacttaggcgcgtgactcggaacttggtgaggaacaagctggccgttatcacacgcctgctccagaatttaatcatgggcctatttcttcttttcttcgtgctgagggtaagatccaatgtgctgaagggagcaattcaagaccgcgtggggctcctttaccagtttgtcggcgccacaccatacacaggcatgctcaatgccgtcaaccttttcccagtgctacgggctgttagcgaccaggaaagtcaggatggcctttatcagaagtggcagatgatgctggcctatgctctgcacgtacttcccttctccgttgtggctacaatgatattcagcagtgtatgctactggaccctgggtctgcaccctgaagtggccaggtttggttacttcagcgccgcattgctggcccctcacttaataggcgagttcttgacgctcgtgctgctggggattgttcaaaatccaaacatcgtcaattctgtggtcgctctgcttagcattgcaggagtgctggtgggtagcggttttctgaggaatattcaagagatgcctattcccttcaagatcatctcctattttacgttccagaaatactgtagcgagatcctggtagtaaacgagttttacgggctgaacttcacctgcggcagctcgaacgtaagcgtcaccaccaatccgatgtgcgcattcactcagggtatacagttcatagagaaaacatgcccaggcgcgaccagcaggtttacgatgaatttcctcattctctattcttttattcccgccctcgttatactggggatagtagtgtttaagatcagagaccatctgatctcaaggtag

SEQ ID NO: 212051 - DNA, 1956 bp, Artificial Sequence
  derived and/or modified sequence
atgggagacctgagcagcctgaccccaggcggctccatgggcctgcaggtgaacagaggcagccagagcagcctggagggcgccccagccacagcccctgagccccacagcctgggcatcctgcacgccagctacagcgtgagccaccgggtgcggccctggtgggacatcaccagctgccggcagcagtggacccggcagatcctgaaggatgtgtccctgtatgtggagagcggccagatcatgtgcatcctgggcagcagcggcagcggcaagaccaccctgctggatgccatgagcggccgcctgggccgggccggcaccttcctgggggaggtgtatgtgaatggccgggccctgcggcgggagcagttccaggactgcttctcctatgtgctgcagagcgacaccctgctgagcagcctgactgtgcgggagaccctgcactacacagccctgctggccatcagaagaggcaaccctggcagcttccagaagaaggtggaggccgtgatggccgagctgagcctgagccacgtggccgaccggctgattggcaactacagcctgggcggcatcagcactggagagaggagaagagtgtccattgctgcccagctgctgcaggaccccaaggtgatgctgtttgatgagcccaccaccggcctggactgcatgacagccaaccagatcgtggtgctgctggtggagctggcccggaggaaccgcatcgtggtgctgaccatccaccagcccaggtctgagctgttccagctgtttgacaagatcgccatcctgagctttggagagctgatcttctgtggcaccccagctgagatgctggacttcttcaatgactgtggctacccctgcccagagcacagcaacccctttgacttctacatggacctgacctctgtggacacccagagcaaggagcgggagattgagaccagcaagagggtgcagatgattgaaagtgcctacaagaagagcgccatctgccacaagaccctgaagaacatcgagaggatgaagcacctgaagaccctgcccatggtgcccttcaagaccaaggacagccctggggtcttcagcaagctgggcgtgctgctgcggcgggtgaccaggaacctggtgaggaacaagctggccgtcatcacccggctgctgcagaacctgatcatgggcctcttcctgctcttctttgtgctgcgggtgcgcagcaatgtgctgaagggggccatccaggacagagtgggcctgctgtaccagtttgtgggcgccaccccctacacaggcatgctgaatgctgtgaacctcttccctgtgctgcgggctgtgtctgaccaggagagccaggacggcctgtaccagaagtggcagatgatgctggcctatgccctgcacgtgctgcccttctctgtggtggccaccatgatcttcagctctgtgtgctactggaccctgggcctgcaccctgaggtggccaggtttggctacttctctgctgccctgctggccccccacctgattggagagttcctgaccctggtgctgctgggcatcgtgcagaaccccaacatcgtgaacagcgtggtggccctgctgagcattgctggggtgctggtgggcagcggcttcctgaggaacatccaggagatgcccatccccttcaagatcatctcctacttcaccttccagaagtactgcagcgagatcctggtggtgaatgagttctacggcctgaacttcacctgtggcagcagcaatgtgtctgtgaccaccaaccccatgtgtgccttcacccagggcatccagttcatcgagaagacctgccctggggccaccagccgcttcaccatgaacttcctgatcctgtacagcttcatcccagccctggtgatcctgggcatcgtggtgttcaagatccgggaccacctgatcagcaggtag

SEQ ID NO: 212052 - DNA, 1956 bp, Artificial Sequence
  derived and/or modified sequence
atgggcgacctgagcagcctgacccccggcggcagcatgggcctgcaagtaaatcgtggttcccagtctagtctggagggcgctcctgccacggcgcccgagcctcatagtcttggaattttgcacgctagctattctgtgtctcaccgcgtgcggccttggtgggatataacttcatgccgtcagcaatggacccgccaaatcctgaaagacgtatctctgtatgttgaatctgggcagatcatgtgcatcttggggagcagcggaagcggcaagacaacgctgttagatgccatgagtgggcggcttggccgcgccggaacattccttggggaagtttatgttaatgggcgcgcgctccgtcgtgagcaatttcaagattgctttagttacgtgctgcagagcgatacattgctgtcctcactgacggtgcgggagaccctgcattataccgcattactggctatccgcagaggaaatcctgggagctttcaaaagaaggtggaggcagtgatggcggaactcagtctgagtcacgtcgccgaccgcctgattggtaattattctcttggcggtatcagtaccggagaaaggcgccgagttagcattgctgcccagctcctgcaggatccgaaggtcatgttgtttgatgaacccacaactggattggactgtatgacagccaaccagatcgtggttctgctggtggaattagcccgcagaaataggatcgtcgtgttgaccatccatcaacctagatccgagctgtttcagctgtttgacaaaattgcgatactgtcattcggggagttgatcttttgtggcactccagcagagatgcttgactttttcaacgactgtggctacccgtgccccgagcacagcaacccgtttgatttctacatggatctcacctccgttgatacacaaagcaaagagagagagatcgaaacgagcaagcgtgtgcagatgatcgaaagcgcgtacaagaaaagcgctatctgtcataaaaccctgaaaaacattgagcgtatgaaacatcttaagaccctgcccatggtgccctttaaaactaaggactcaccgggtgtgtttagcaagctcggagtcctgttacggagagtgacgcgtaacctggtgaggaataaactggctgtcatcacaagactgctacaaaatcttatcatgggactgttcctgctcttttttgtgctccgcgtgcggagcaatgtgctaaaaggggctatacaggaccgggtgggcttactttatcagtttgtgggcgcaacaccgtataccggcatgctgaacgccgtaaatctgtttccagtgctgagagcagtgtctgaccaagaaagccaggacggactctatcagaaatggcagatgatgctcgcctacgcccttcacgtgttgcccttcagcgtggtggcaactatgattttctcttccgtgtgttattggacactggggttgcaccctgaagtcgcaagatttggatatttctccgctgctttactggctccgcatctgatcggcgaatttctgacactcgttctgttaggtattgttcagaaccctaatattgttaactccgtggtcgcactgctcagcattgccggggtgctcgtcgggtccggatttcttcgcaatatacaggaaatgcccattcccttcaagattatctcctacttcaccttccagaaatattgcagcgagatactcgtggtaaatgagttctatggcctgaatttcacttgtgggtcttccaatgtaagcgtcaccaccaaccccatgtgcgccttcacccagggcattcagttcatcgaaaaaacatgtccaggcgcaacatcccgtttcactatgaattttctcattttgtattccttcatccctgcgctggttatcttgggcatcgtggtattcaagattagggatcatttaatttctcggtag

SEQ ID NO: 212053 - DNA, 1956 bp, Artificial Sequence
  derived and/or modified sequence
atgggcgatctgagttccttgaccccaggaggcagtatgggtctgcaagtcaatcgagggagccaaagttccttggagggggcacctgccaccgcccctgagccacattcactgggaattctgcacgcctcatacagtgtctcacacagagtccgcccttggtgggacatcacctcatgtcggcaacagtggactcggcagattcttaaggacgtcagcctgtatgtcgagagtggtcagattatgtgcattctggggagctccggaagcggaaagaccacactacttgacgctatgtcaggcagactcggcagagccggaacatttcttggggaagtctatgtcaatggaagagccctcaggcgcgagcagttccaggattgtttcagttacgtgctgcagtcggacaccctgctgtctagcctgaccgtgagagagaccctgcattataccgccctgttggccatccggagaggaaacccaggcagttttcagaaaaaagttgaggctgtaatggccgagctcagcctctctcacgtagcagataggctcatcggcaattactcactgggcggtatctcaactggggagaggcgtcgcgtgtcaatcgccgctcagctgctgcaagacccaaaggtcatgctgttcgacgagccgactaccggattggactgcatgactgccaaccagatcgtggttctactggttgagctagcgagaaggaatagaatagtggtgctaactatccaccagccaagatctgaactcttccagctgtttgacaaaatcgccatcttgtctttcggagagctgatcttttgcggtacacctgccgagatgctagatttctttaacgactgtggttatccatgtcccgagcattcaaatccattcgatttctacatggatctcacctctgtggacactcagagcaaggagcgcgagattgaaacaagcaagagggtgcagatgatcgagagcgcctataagaagtcagcgatctgccacaaaacactgaaaaatattgaacgcatgaaacatttgaagaccctgcccatggtgccgttcaaaacaaaagattcacccggagtgtttagcaaactgggagtgcttcttcggagggtcactcgcaacctggtgagaaataagttagctgttatcaccaggcttctgcaaaaccttataatgggcctctttctgctgttcttcgtgttacgagtacgctctaacgtactgaagggcgctatccaagatagagtgggcctgctttaccagttcgttggagcgactccctataccggtatgctcaacgcagtgaacctgtttcccgtgcttcgcgctgttagtgatcaggaatcacaggatgggctgtaccaaaagtggcaaatgatgctcgcctacgcattacatgttctgccgttttccgtggtggccaccatgatcttttctagcgtgtgctattggacactcggtctacatccagaggttgctagattcggatacttttccgcggcattactggcccctcacctgattggagagttcctcacccttgtgctcctgggcattgtccaaaaccctaatatcgttaatagtgtcgtggcactgctgagcattgcaggagttttggtgggctcggggttcctgcgcaacatccaggagatgcccatcccatttaaaattatttcttattttacgtttcagaaatactgttccgaaattctggtcgtgaacgaattctatggtctgaacttcacttgtggctcctccaatgtctcagtgactaccaatcctatgtgtgcctttactcagggtatccagtttatcgaaaagacttgccctggcgcaactagccgattcactatgaatttccttatcctgtacagctttattcctgccctggttattcttggaatcgtggttttcaagattagggatcatttgatttcgcgctag

SEQ ID NO: 212054 - DNA, 2740 bp, Artificial Sequence
  derived and/or modified sequence
aagtcccagtcctgctgtcccaagggactccggggtcaggtggagcaggcagggcagtctgccacgggctccccaactgaagccactctggggagggtccggccaccagaaaatttgcccagctttgctgcctgttggccatgggtgacctctcatctttgacccccggagggtccatgggtctccaagtaaacagaggctcccagagctccctggagggggctcctgccaccgccccggagcctcacagcctgggcatcctccatgcctcctacagcgtcagccaccgcgtgaggccctggtgggacatcacatcttgccggcagcagtggaccaggcagatcctcaaagatgtctccttgtacgtggagagcgggcagatcatgtgcatcctaggaagctcaggctccgggaaaaccacgctgctggacgccatgtccgggaggctggggcgcgcggggaccttcctgggggaggtgtatgtgaacggccgggcgctgcgccgggagcagttccaggactgcttctcctacgtcctgcagagcgacaccctgctgagcagcctcaccgtgcgcgagacgctgcactacaccgcgctgctggccatccgccgcggcaatcccggctccttccagaagaaggtggaggccgtcatggcagagctgagtctgagccatgtggcagaccgactgattggcaactacagcttggggggcatttccacgggtgagcggcgccgggtctccatcgcagcccagctgctccaggatcctaaggtcatgctgtttgatgagccaaccacaggcctggactgcatgactgctaatcagattgtcgtcctcctggtggaactggctcgcaggaaccgaattgtggttctcaccattcaccagccccgttctgagctttttcagctctttgacaaaattgccatcctgagcttcggagagctgattttctgtggcacgccagcggaaatgcttgatttcttcaatgactgcggttacccttgtcctgaacattcaaacccttttgacttctatatggacctgacgtcagtggatacccaaagcaaggaacgggaaatagaaacctccaagagagtccagatgatagaatctgcctacaagaaatcagcaatttgtcataaaactttgaagaatattgaaagaatgaaacacctgaaaacgttaccaatggttcctttcaaaaccaaagattctcctggagttttctctaaactgggtgttctcctgaggagagtgacaagaaacttggtgagaaataagctggcagtgattacgcgtctccttcagaatctgatcatgggtttgttcctccttttcttcgttctgcgggtccgaagcaatgtgctaaagggtgctatccaggaccgcgtaggtctcctttaccagtttgtgggcgccaccccgtacacaggcatgctgaacgctgtgaatctgtttcccgtgctgcgagctgtcagcgaccaggagagtcaggacggcctctaccagaagtggcagatgatgctggcctatgcactgcacgtcctccccttcagcgttgttgccaccatgattttcagcagtgtgtgctactggacgctgggcttacatcctgaggttgcccgatttggatatttttctgctgctctcttggccccccacttaattggtgaatttctaactcttgtgctacttggtatcgtccaaaatccaaatatagtcaacagtgtagtggctctgctgtccattgcgggggtgcttgttggatctggattcctcagaaacatacaagaaatgcccattccttttaaaatcatcagttattttacattccaaaaatattgcagtgagattcttgtagtcaatgagttctacggactgaatttcacttgtggcagctcaaatgtttctgtgacaactaatccaatgtgtgccttcactcaaggaattcaattcattgagaaaacctgcccaggtgcaacatctagattcacaatgaactttctgattttgtattcatttattccagctcttgtcatcctaggaatagttgttttcaaaataagggatcatctcattagcaggtagtgaaagccatggctgggaaaatggaagtgaagctgccgactgtgcatgactgctctgaacgtctgaaatgagagtgccatgtatttctttcttgacaggacatctcaagtcttttaaccattaagactccatttgtgcctcttggatccaagcaggccttgaatgcaatggaagtggtttatagtcccttgctcttacaacttgcagggacatgtggttatttggaaattgtgactgagcggacccaagaatgtaaataatattcataaacctatgggagactcgtgtgactattttttttccttgttctaggcacagaaaaaaataggtcagcttaaaaatatgtttacattggataaaggattaggcaaaaataaaatgtttcaaggattcctgaccataagtgacagagaaagagagttgtgggtttagatgaagcaaggttatcatgcagaattgggtaagaatgcttctgttcctggaagacccagagttaaatgcagatgtccacacgaggggtcggagttacctgatcacatcgagagagtgctgggcagatggatggtgagcaccactgctacagagcacccagtgattttactgaggattaaaataaaaaaccgtaggaatgggctcaacagtga

SEQ ID NO: 212055 - DNA, 1956 bp, Artificial Sequence
  derived and/or modified sequence
atgggcgacctgagcagcctgacccccggcggcagcatgggcctgcaggtgaacagaggcagccagagcagcctggagggcgcccccgccaccgcccccgagccccacagcctgggcatcctgcacgccagctacagcgtgagccacagagtgagaccctggtgggacatcaccagctgcagacagcagtggaccagacagatcctgaaggacgtgagcctgtacgtggagagcggccagatcatgtgcatcctgggcagcagcggcagcggcaagaccaccctgctggacgccatgagcggcagactgggcagagccggcaccttcctgggcgaggtgtacgtgaacggcagagccctgagaagagagcagttccaggactgcttcagctacgtgctgcagagcgacaccctgctgagcagcctgaccgtgagagagaccctgcactacaccgccctgctggccatcagaagaggcaaccccggcagcttccagaagaaggtggaggccgtgatggccgagctgagcctgagccacgtggccgacagactgatcggcaactacagcctgggcggcatcagcaccggcgagagaagaagagtgagcatcgccgcccagctgctgcaggaccccaaggtgatgctgttcgacgagcccaccaccggcctggactgcatgaccgccaaccagatcgtggtgctgctggtggagctggccagaagaaacagaatcgtggtgctgaccatccaccagcccagaagcgagctgttccagctgttcgacaagatcgccatcctgagcttcggcgagctgatcttctgcggcacccccgccgagatgctggacttcttcaacgactgcggctacccctgccccgagcacagcaaccccttcgacttctacatggacctgaccagcgtggacacccagagcaaggagagagagatcgagaccagcaagagagtgcagatgatcgagagcgcctacaagaagagcgccatctgccacaagaccctgaagaacatcgagagaatgaagcacctgaagaccctgcccatggtgcccttcaagaccaaggacagccccggcgtgttcagcaagctgggcgtgctgctgagaagagtgaccagaaacctggtgagaaacaagctggccgtgatcaccagactgctgcagaacctgatcatgggcctgttcctgctgttcttcgtgctgagagtgagaagcaacgtgctgaagggcgccatccaggacagagtgggcctgctgtaccagttcgtgggcgccaccccctacaccggcatgctgaacgccgtgaacctgttccccgtgctgagagccgtgagcgaccaggagagccaggacggcctgtaccagaagtggcagatgatgctggcctacgccctgcacgtgctgcccttcagcgtggtggccaccatgatcttcagcagcgtgtgctactggaccctgggcctgcaccccgaggtggccagattcggctacttcagcgccgccctgctggccccccacctgatcggcgagttcctgaccctggtgctgctgggcatcgtgcagaaccccaacatcgtgaacagcgtggtggccctgctgagcatcgccggcgtgctggtgggcagcggcttcctgagaaacatccaggagatgcccatccccttcaagatcatcagctacttcaccttccagaagtactgcagcgagatcctggtggtgaacgagttctacggcctgaacttcacctgcggcagcagcaacgtgagcgtgaccaccaaccccatgtgcgccttcacccagggcatccagttcatcgagaagacctgccccggcgccaccagcagattcaccatgaacttcctgatcctgtacagcttcatccccgccctggtgatcctgggcatcgtggtgttcaagatcagagaccacctgatcagcagatag

SEQ ID NO: 212056 - protein, 673 aa, Artificial Sequence
  derived and/or modified sequence
MAGKAAEERGLPKGATPQDTSGLQDRLFSSESDNSLYFTYSGQPNTLEVRDLNYQVDLASQVPWFEQLAQFKMPWTSPSCQNSCELGIQNLSFKVRSGQMLAIIGSSGCGRASLLDVITGRGHGGKIKSGQIWINGQPSSPQLVRKCVAHVRQHNQLLPNLTVRETLAFIAQMRLPRTFSQAQRDKRVEDVIAELRLRQCADTRVGNMYVRGLSGGERRRVSIGVQLLWNPGILILDEPTSGLDSFTAHNLVKTLSRLAKGNRLVLISLHQPRSDIFRLFDLVLLMTSGTPIYLGAAQHMVQYFTAIGYPCPRYSNPADFYVDLTSIDRRSREQELATREKAQSLAALFLEKVRDLDDFLWKAETKDLDEDTCVESSVTPLDTNCLPSPTKMPGAVQQFTTLIRRQISNDFRDLPTLLIHGAEACLMSMTIGFLYFGHGSIQLSFMDTAALLFMIGALIPFNVILDVISKCYSERAMLYYELEDGLYTTGPYFFAKILGELPEHCAYIIIYGMPTYWLANLRPGLQPFLLHFLLVWLVVFCCRIMALAAAALLPTFHMASFFSNALYNSFYLAGGFMINLSSLWTVPAWISKVSFLRWCFEGLMKIQFSRRTYKMPLGNLTIAVSGDKILSVMELDSYPLYAIYLIVIGLSGGFMVLYYVSLRFIKQKPSQDW

SEQ ID NO: 212057 - DNA, 2022 bp, Artificial Sequence
  derived and/or modified sequence
atggctggaaaggctgccgaggagaggggccttccaaagggcgctacgccccaagacacaagtggcctacaggaccgcctcttctctagtgaatccgacaattcactatattttacttattcaggacagccaaatacgctcgaagtaagagatctcaattatcaggtcgatctggcttcacaggtgccttggttcgaacaactggctcagttcaagatgccatggaccagcccctcgtgccagaactcctgtgaactgggaatccaaaacctgagctttaaagtgcggtctgggcaaatgctggcaattattggcagctctggctgcgggagagcctcactcctggatgttattactggccggggacatgggggaaagatcaaaagtggtcagatctggatcaacggtcagccttcatcccctcaactcgtcagaaagtgtgtggcacacgtccggcagcataaccagctgctgcccaatctgaccgtgagggagacactggcctttatagcacagatgcgcctgcccagaacgttcagccaggcccagagagacaagagagtagaagatgtcatcgccgaactccggctcaggcagtgtgcggatactagggtgggcaatatgtatgtcagaggactgagcggtggcgaacgaagacgggtgtcaatcggcgtgcagctgctctggaacccagggattctcattctcgatgagccaacaagcggactcgattcttttacggcccataacttggtcaaaaccctcagccgcctcgccaagggaaataggctggtcctgatctctctgcatcagccacgctctgacatctttcgattgtttgacttagtgctgttaatgacctccggaacccctatctacctgggtgccgcacagcacatggtccaatattttactgcgattggatacccctgtcctagatactctaaccccgcagacttttacgtcgatttgaccagcatagaccggagatcaagagaacaggaactcgccacacgcgagaaggcccagtctctggccgctctctttctcgaaaaagtgcgagaccttgacgatttcctttggaaagcggaaacaaaagatttggacgaagacacctgcgtggaatcatccgtgacccccttggacacgaactgcctcccctctcctacgaagatgcccggtgcggtgcagcagtttactacactcattaggcgccaaatctctaacgatttcagggacctgccaaccctgctgatacacggtgcggaggcttgtctgatgtcaatgaccattggtttcctgtactttggacatggctctatccagctgtcattcatggataccgctgctttgctattcatgatcggcgctttgatcccatttaacgtaatcttggacgtaatttcgaagtgctatagtgaaagagcaatgctgtattacgagttggaggatggactttacaccacaggaccctactttttcgcaaagattctgggcgaactcccagaacactgtgcctacattatcatttacggcatgccaacatattggttggccaacttgcggcctgggctgcagcctttcctgctgcacttcctgttggtctggctggtggttttctgctgtaggatcatggccttggcggcagctgctctgttgcccacatttcacatggcctcattctttagtaacgccttgtacaattccttttacctggcaggcgggttcatgatcaacctgtcttcactgtggaccgtcccagcatggatttctaaagtgtcctttctacgatggtgtttcgaagggctcatgaaaatccagttttccagacgcacctacaaaatgcctctgggtaacctgaccatcgccgtcagcggcgataaaatcctctctgtgatggagctggactcttatcccctgtatgccatttaccttattgtgattggtctctcaggaggcttcatggtgttgtactacgttagccttcgcttcataaagcaaaagccgtcacaggactggtag

SEQ ID NO: 212058 - DNA, 2022 bp, Artificial Sequence
  derived and/or modified sequence
atggccggcaaggctgctgaggagcggggcctgcccaagggggccaccccccaggacaccagcggcctgcaggacaggctcttcagcagcgagagtgacaacagcctgtacttcacctacagcggccagcccaacaccctggaggtgcgggacctgaactaccaggtggacctggccagccaggtgccctggtttgagcagctggcccagttcaagatgccctggaccagccccagctgccagaacagctgtgagctgggcatccagaacctgtccttcaaggtgcgcagcggccagatgctggccatcatcggcagcagcggctgcggccgggccagcctgctggatgtgatcaccggccggggccatggaggcaagatcaagagcggccagatctggatcaatggccagcccagcagcccccagctggtgaggaaatgtgtggcccacgtgcggcagcacaaccagctgctgcccaacctgactgtgcgggagaccctggccttcatcgcccagatgaggctgcccaggaccttcagccaggcccagagggacaagagggtggaggatgtgattgctgagctgcggctgcggcagtgtgccgacaccagggtgggcaacatgtatgtgcggggcctgagcggcggggagaggagaagagtgtccattggagtgcagctgctgtggaaccctggcatcctgatcctggatgagcccaccagcggcctggacagcttcaccgcccacaacctggtgaagaccctgagccggctggccaagggcaaccggctggtgctgatcagcctgcaccagcccaggagtgacatcttccggctgtttgacctggtgctgctgatgaccagcggcacccccatctacctgggcgccgcccagcacatggtgcagtacttcaccgccatcggctacccctgcccccgctacagcaacccagctgacttctacgtggacctgaccagcattgacagaagaagccgggagcaggagctggccacccgggagaaggcccagagcctggccgccctcttcctggagaaggtgcgggacctggatgacttcctgtggaaggccgagaccaaggacctggatgaggacacctgtgtggagagctctgtgacccccctggacaccaactgcctgcccagccccaccaagatgcctggagctgtgcagcagttcaccaccctcatccggcggcagatcagcaatgacttccgggacctgcccaccctgctgatccacggggctgaggcctgcctgatgtccatgaccatcggcttcctgtacttcggccacggcagcatccagctgtccttcatggacacagctgccctgctcttcatgattggagccctgatccccttcaacgtcatcctggatgtgatcagcaagtgctacagcgagcgggccatgctgtactatgagctggaggatggcctgtacaccaccggcccctacttctttgccaagatcctgggggagctgcctgagcactgtgcctacatcatcatctacggcatgcccacctactggctggccaacctgcggcccggcctgcagcccttcctgctgcacttcctgctggtgtggctggtggtgttctgctgccgcatcatggccctggccgccgccgccctgctgcccaccttccacatggccagcttcttcagcaatgccctgtacaacagcttctacctggccggcggcttcatgatcaacctgagcagcctgtggacagtgcctgcctggatcagcaaggtgtccttcctgcgctggtgctttgagggcctgatgaagatccagttcagcaggaggacctacaagatgcccctgggcaacctgaccatcgctgtgtctggggacaagatcctgtctgtgatggagctggacagctaccccctgtatgccatctacctgattgtcatcggcctgagcggcggcttcatggtgctgtactacgtgtccctgcgcttcatcaagcagaagcccagccaggactggtag

SEQ ID NO: 212059 - DNA, 2022 bp, Artificial Sequence
  derived and/or modified sequence
atggccggcaaggccgccgaggagcggggcctgcccaagggcgccacaccgcaggacacatccggcctccaggacagactgttcagcagcgaatctgacaatagcttgtattttacctattccggccagccaaataccctggaagtccgggacctgaactaccaggttgatctagcatctcaggtcccttggtttgagcagctcgcacagtttaagatgccctggacttccccctcctgccagaactcttgcgagctgggcatacaaaatcttagctttaaagtccggagcgggcaaatgctcgccatcatcggcagttccgggtgtggcagagcaagtctgctcgacgtgattacaggccgtggccatgggggaaagattaagagcggtcagatctggatcaacgggcaaccgagctcccctcagttagtcagaaagtgcgttgcccatgtacgacagcacaatcaactactgcccaatctgacagtccgcgaaaccttggctttcattgctcagatgagactaccgcgcacctttagccaggcgcagagagacaagagagtggaggacgtgatcgctgaactacggctgagacagtgcgcagataccagggtcggcaatatgtatgtgcgcggtctctcaggcggagagcgccggcgtgttagtattggagtgcaactgttatggaaccctggcattctcatactggatgaaccaacttctggactagacagctttacagcccataatctggtaaagacactgtctcggctcgccaaaggcaaccgcttagttcttatcagcctacatcaaccaagatcagacattttcaggttgtttgatctggttctgctcatgacttccggcacacccatttacctgggggccgcccaacatatggtccaatactttaccgcgattggatacccttgtccccgttactctaatcccgccgacttctacgtcgacctgacatcgatcgaccgcagaagccgtgagcaggagctagctacacgcgagaaggcccagtcactagctgctcttttcctggaaaaggtcagagatttagacgatttcttgtggaaggctgaaacaaaggatctggacgaagatacgtgcgtcgagagttccgtgacacctcttgacaccaactgtctgcctagccctaccaagatgcccggtgccgtgcagcagttcactaccctcatccgccgccagatttcaaacgacttcagggacctgccaaccttgctaatccatggagcggaggcctgcctgatgtctatgacgattggttttctgtatttcggacatgggagtatacaactgagcttcatggacacagcggccctgctctttatgataggggcgttaattccgttcaatgttattctggacgtcataagcaaatgctacagcgagagggcaatgctctactacgaattagaggatggcctgtacaccaccggcccttattttttcgcgaagattctgggagagctgcccgaacattgcgcctatatcatcatctatggtatgcccacttactggcttgcaaacttgcgcccaggactgcagcccttcttactccattttctactggtctggctggtggtgttttgctgccggattatggccttggccgccgctgcgctgcttcctacttttcacatggcttccttcttttcaaatgctctctacaatagtttttacctcgctggcggtttcatgatcaacctgagcagtctctggacagttccggcttggatatctaaagtctcctttttgcgatggtgctttgaggggctcatgaaaatacagttttctcggaggacttacaaaatgccgctgggcaaccttactatcgcggtatctggggataagatcctgagcgttatggagttagacagctatcctctgtacgccatatatctcatagtcattgggctgagcggagggttcatggtgctatactacgtcagtctacgtttcattaagcagaaacctagccaggattggtag

SEQ ID NO: 212060 - DNA, 2022 bp, Artificial Sequence
  derived and/or modified sequence
atggctgggaaggccgctgaagaacggggattacccaagggagccacgcctcaggacaccagtggactccaggatcgtttattctcttccgaatccgacaactccctgtactttacctatagtggtcagccaaatacgctggaggttcgcgacttaaattaccaggtggacttggcttctcaagtgccatggttcgaacagttggcacagttcaaaatgccttggacctcccccagctgccagaattcctgtgaattgggaatccaaaatttgagctttaaggtgcgctccggacagatgttggctattattggctctagtgggtgtgggagggcctctctgctggacgtgataactggacgtggacatggtggaaaaatcaagagtggacagatctggatcaacggccaacccagttccccacagcttgttcgcaaatgcgtggcccacgtacggcaacacaaccaacttcttccaaacttaacggttcgagagacactggcctttatcgcccaaatgcgattgcctagaaccttcagtcaggcacagcgtgacaagcgcgtcgaggatgtgatcgctgagcttcggctgagacagtgcgcagatacaagagtcggaaacatgtatgtaagaggcctgtccggaggggagcggcgaagagtttccattggggtacagcttctgtggaatccgggtatactgatcttggatgagcccacctccggcctcgattcattcacagcccacaatctcgtcaagaccctatcccgcttagcaaaagggaatcgcctggtattgatcagcctccaccagcctaggagcgatatttttcgcctgtttgatttggtcttgttgatgacatcaggtactccgatttacttgggggcagctcagcacatggtccagtacttcaccgcgattggatacccttgtcctcgttattcaaacccagctgacttttatgtggatcttacaagcatcgaccgccgatcgcgcgaacaggagctggccacccgggagaaagcccaatctctcgccgcactcttcttggaaaaggttcgggaccttgatgacttcctctggaaagccgagacaaaagatctggatgaagatacgtgcgttgagtcctcggtgacccccttggatacaaactgtctccccagccctacaaagatgcccggagccgtgcagcaatttaccactcttatccgcagacagattagcaatgattttcgtgatctcccgacattattaatccacggtgcagaggcttgccttatgtcaatgaccattggcttcctctatttcggccatggctccattcaattgtctttcatggatacagcggcactcctgtttatgatcggggcactgatcccctttaatgtgattctcgacgtaatcagcaaatgttacagcgaaagggccatgttatattacgagctggaggacgggctgtacacgacaggaccgtatttcttcgccaaaatcctcggggaattacccgagcactgcgcctatattatcatctacggcatgccaacctactggctcgcaaacttgaggccagggttgcagccctttcttctccactttctactggtgtggttagtcgtattctgctgtagaattatggcactggcagcagcggctctgcttcccaccttccacatggcatccttctttagcaacgcattgtataactccttctacctggcaggaggattcatgatcaacttgagctcactctggactgtgcccgcatggatcagcaaagtgtcattccttcggtggtgctttgagggcctgatgaagattcagtttagcagacggacctacaaaatgccgttgggaaacctgacaatcgcagtctctggtgacaagatcctgtccgtcatggaattagacagctatccactgtacgcaatctacctcatcgtcatcgggttgtcggggggattcatggtcctgtactatgtgtcactgcgatttatcaagcagaagcctagccaggattggtag

SEQ ID NO: 212061 - DNA, 2665 bp, Artificial Sequence
  derived and/or modified sequence
ctccaggaaacagagtgaagacactggccctggcaggcagcagctgggtctaagagagctgcagcccagggtcacagacctgtgggccccatggccgggaaggcggcagaggagagagggctgccgaaaggggccactccccaggatacctcgggcctccaggatagattgttctcctctgaaagtgacaacagcctgtacttcacctacagtggccagcccaacaccctggaggtcagagacctcaactaccaggtggacctggcctctcaggtcccttggtttgagcagctggctcagttcaagatgccctggacatctcccagctgccagaattcttgtgagctgggcatccagaacctaagcttcaaagtgagaagtgggcagatgctggccatcatagggagctcaggttgtgggagagcctccttgctagatgtgatcactggccgaggtcacggcggcaagatcaagtcaggccagatctggatcaatgggcagcccagctcgcctcagctggtgaggaagtgtgtggcccacgtgcgccagcacaaccagctgctccccaacttgactgtgcgagagaccttggccttcattgcccagatgcggctgcccagaaccttctcccaggcccagcgtgacaaaagggtggaggacgtgatcgcggagctgcggcttaggcagtgcgctgacacccgcgtgggcaacatgtacgtgcgggggttgtcggggggtgagcgcaggagagtcagcattggggtgcagctcctgtggaacccaggaatccttattctcgacgaacccacctctgggctcgacagcttcacagcccacaacctggtgaagaccttgtccaggctggccaaaggcaaccggctggtgctcatctccctccaccagcctcgctctgacatcttcaggctgtttgatctggtcctcctgatgacgtctggcacccccatctacttaggggcggcccagcacatggtccagtatttcacagccatcggctacccctgtcctcgctacagcaatcctgctgacttctatgtggacctgaccagcattgacaggcgcagcagagagcaggaattggccaccagggagaaggctcagtcactcgcagccctgtttctagaaaaagtgcgtgacttagatgactttctatggaaagcagagacgaaggatcttgacgaggacacctgtgtggaaagcagcgtgaccccactagacaccaactgcctcccgagtcctacgaagatgcctggggcggtgcagcagtttacgacgctgatccgtcgtcagatttccaacgacttccgagacctgcccaccctcctcatccatggggcggaggcctgtctgatgtcaatgaccatcggcttcctctattttggccatgggagcatccagctctccttcatggatacagccgccctcttgttcatgatcggtgctctcatccctttcaacgtcattctggatgtcatctccaaatgttactcagagagggcaatgctttactatgaactggaagacgggctgtacaccactggtccatatttctttgccaagatcctcggggagcttccggagcactgtgcctacatcatcatctacgggatgcccacctactggctggccaacctgaggccaggcctccagcccttcctgctgcacttcctgctggtgtggctggtggtcttctgttgcaggattatggccctggccgccgcggccctgctccccaccttccacatggcctccttcttcagcaatgccctctacaactccttctacctcgccgggggcttcatgataaacttgagcagcctgtggacagtgcccgcgtggatttccaaagtgtccttcctgcggtggtgttttgaagggctgatgaagattcagttcagcagaagaacttataaaatgcctctcgggaacctcaccatcgcggtctcaggagataaaatcctcagtgtcatggagctggactcgtaccctctctacgccatctacctcatcgtcattggcctcagcggtggcttcatggtcctgtactacgtgtccttaaggttcatcaaacagaaaccaagtcaagactggtgattcacgccagacgtctgcccgctggtgggggacctgagcagacccttcaactgcactccctcctcaggagccccttcctggggacagtgaggacaatgaccctacagatgctcagctacatccggcccagggtgctgcagtggcacagaccagccacaggatggcagtagaataaagacagtcgaaagggatttctgctcactggcaggagactgcgatgactgggagaaaacctgcactcggtggcacctacaacgttgctaatttatttccttttgatatgcatttatataggcaactcgatataggatgggagcaaactaggaatgaattgggtagctagactgtgcaggaattgttggaacctggagggaacaataacagtagctagcagatttggcttcatcttccaggggccccacactccgtggtgagccaccatcaatacagaaagtgacctaagatgtaccagcaagatgccatcccttctttttgtgtggggtcatgggctccaaaagccaacgtgaacaattaaaaatgtattgagcatcta

SEQ ID NO: 212062 - DNA, 2022 bp, Artificial Sequence
  derived and/or modified sequence
atggccggcaaggccgccgaggagagaggcctgcccaagggcgccaccccccaggacaccagcggcctgcaggacagactgttcagcagcgagagcgacaacagcctgtacttcacctacagcggccagcccaacaccctggaggtgagagacctgaactaccaggtggacctggccagccaggtgccctggttcgagcagctggcccagttcaagatgccctggaccagccccagctgccagaacagctgcgagctgggcatccagaacctgagcttcaaggtgagaagcggccagatgctggccatcatcggcagcagcggctgcggcagagccagcctgctggacgtgatcaccggcagaggccacggcggcaagatcaagagcggccagatctggatcaacggccagcccagcagcccccagctggtgagaaagtgcgtggcccacgtgagacagcacaaccagctgctgcccaacctgaccgtgagagagaccctggccttcatcgcccagatgagactgcccagaaccttcagccaggcccagagagacaagagagtggaggacgtgatcgccgagctgagactgagacagtgcgccgacaccagagtgggcaacatgtacgtgagaggcctgagcggcggcgagagaagaagagtgagcatcggcgtgcagctgctgtggaaccccggcatcctgatcctggacgagcccaccagcggcctggacagcttcaccgcccacaacctggtgaagaccctgagcagactggccaagggcaacagactggtgctgatcagcctgcaccagcccagaagcgacatcttcagactgttcgacctggtgctgctgatgaccagcggcacccccatctacctgggcgccgcccagcacatggtgcagtacttcaccgccatcggctacccctgccccagatacagcaaccccgccgacttctacgtggacctgaccagcatcgacagaagaagcagagagcaggagctggccaccagagagaaggcccagagcctggccgccctgttcctggagaaggtgagagacctggacgacttcctgtggaaggccgagaccaaggacctggacgaggacacctgcgtggagagcagcgtgacccccctggacaccaactgcctgcccagccccaccaagatgcccggcgccgtgcagcagttcaccaccctgatcagaagacagatcagcaacgacttcagagacctgcccaccctgctgatccacggcgccgaggcctgcctgatgagcatgaccatcggcttcctgtacttcggccacggcagcatccagctgagcttcatggacaccgccgccctgctgttcatgatcggcgccctgatccccttcaacgtgatcctggacgtgatcagcaagtgctacagcgagagagccatgctgtactacgagctggaggacggcctgtacaccaccggcccctacttcttcgccaagatcctgggcgagctgcccgagcactgcgcctacatcatcatctacggcatgcccacctactggctggccaacctgagacccggcctgcagcccttcctgctgcacttcctgctggtgtggctggtggtgttctgctgcagaatcatggccctggccgccgccgccctgctgcccaccttccacatggccagcttcttcagcaacgccctgtacaacagcttctacctggccggcggcttcatgatcaacctgagcagcctgtggaccgtgcccgcctggatcagcaaggtgagcttcctgagatggtgcttcgagggcctgatgaagatccagttcagcagaagaacctacaagatgcccctgggcaacctgaccatcgccgtgagcggcgacaagatcctgagcgtgatggagctggacagctaccccctgtacgccatctacctgatcgtgatcggcctgagcggcggcttcatggtgctgtactacgtgagcctgagattcatcaagcagaagcccagccaggactggtag

SEQ ID NO: 212063 - protein, 111 aa, Artificial Sequence
  derived and/or modified sequence
MAPAAATGGSTLPSGFSVFTTLPDLLFIFEFIFGGLVWILVASSLVPWPLVQGWVMFVSVFCFVATTTLIILYIIGAHGGETSWVTLVFSYIATLLYVVHAVFSLIRWKSS

SEQ ID NO: 212064 - DNA, 336 bp, Artificial Sequence
  derived and/or modified sequence
atggcgcccgccgccgcaacgggaggctccacattgccaagcggatttagtgtgttcaccactctccccgacctcctgttcattttcgagtttatattcggcgggttggtgtggattctggtggcctcctctctggtgccatggcctttagtccaaggatgggttatgttcgtgagcgtgttttgctttgtagctacgacaaccttgatcattctgtatatcattggggcacacggtggggaaacatcctgggttaccctcgtgtttagctacattgcaactttgctgtacgtagtccatgccgtattctccctcataaggtggaaatccagttag

SEQ ID NO: 212065 - DNA, 336 bp, Artificial Sequence
  derived and/or modified sequence
atggccccagctgctgccactggaggcagcaccctgcccagcggcttctctgtgttcaccaccctgcctgacctgctcttcatctttgagttcatctttggaggcctggtgtggatcctggtggccagcagcctggtgccctggcccctggtgcagggctgggtgatgtttgtgtctgtgttctgctttgtggccaccaccaccctcatcatcctgtacatcattggagcccacggcggggagacctcctgggtgaccctggtgttctcctacatcgccaccctgctgtatgtggtgcatgctgtgttcagcctcatccgctggaagagcagctag

SEQ ID NO: 212066 - DNA, 873 bp, Artificial Sequence
  derived and/or modified sequence
atggcccccgcagcggcgacggggggcagcaccctgcccagtggcttctcggtcttcaccaccttgcccgacttgctcttcatctttgagtttatcttcgggggcctggtgtggatcctggtggcctcctccctggtgccctggcccctggtccagggctgggtgatgttcgtgtctgtgttctgcttcgtggccaccaccaccttgatcatcctgtacataattggagcccacggtggagagacttcctgggtcaccttggtgttctcctacatagccactctgctctacgtggtccatgcggtgttctctttaatcagatggaagtcttcataaagccgcagtagaacttgagctgaaaacccagatggtgttaactggccgccccactttccggcataactttttagaaaacagaaatgcccttgatggtggaaaaaagaaaacaaccacccccccactgcccaaaaaaaaaagccctgccctgttgctcgtgggtgctgtgtttactctcccgtgtgccttcgcgtccgggttgggagcttgctgtgtctaacctccaactgctgtgctgtctgctagggtcacctcctgtttgtgaaaggggaccttcttgttcgggggtgggaagtggcgaccgtgacctgagaaggaaagaaagatcctctgctgacccctggagcagctctcgagaactacctgttggtattgtccacaagctctcccgagcgccccatcttgtgccatgttttaagtcttcatggatgttctgcatgtcatggggactaaaactcacccaacagatctttccagaggtccatggtggaagacgataaccctgtgaaatactttataaaatgtcttaatgttcaa

SEQ ID NO: 212067 - DNA, 336 bp, Artificial Sequence
  derived and/or modified sequence
atggcccccgccgccgccaccggcggcagcaccctgcccagcggcttttcagtctttacaacgctaccagatctcttgtttatttttgagttcatattcggcggcttggtgtggattcttgtggccagctccctagttccttggcctctggtgcaggggtgggtgatgttcgtgtcagtgttttgctttgtggccacaacaactttaatcatcctctatataattggagcacacggcggtgagactagctgggtgaccctggtgttcagctatattgcaactctgctgtatgtagtgcacgcagtcttttcattaatccgctggaaatccagctag

SEQ ID NO: 212068 - DNA, 336 bp, Artificial Sequence
  derived and/or modified sequence
atggcccctgctgccgctaccggcggtagcacccttcccagcggcttcagtgtgttcaccactttacctgatctcctgttcatatttgagtttatttttggcggactggtctggatcctagtcgcaagctcactggttccatggcccttagtccaaggttgggtgatgttcgtcagcgttttttgtttcgttgccacgacaacacttatcattttatacataattggcgcacacgggggagagaccagttgggtaacactggtgttttcttacatcgctacactattgtatgtggtacatgcggttttttccttgatcaggtggaagtcctcttag

SEQ ID NO: 212069 - DNA, 336 bp, Artificial Sequence
  derived and/or modified sequence
atggcccccgccgccgccaccggcggcagcaccctgcccagcggcttcagcgtgttcaccaccctgcccgacctgctgttcatcttcgagttcatcttcggcggcctggtgtggatcctggtggccagcagcctggtgccctggcccctggtgcagggctgggtgatgttcgtgagcgtgttctgcttcgtggccaccaccaccctgatcatcctgtacatcatcggcgcccacggcggcgagaccagctgggtgaccctggtgttcagctacatcgccaccctgctgtacgtggtgcacgccgtgttcagcctgatcagatggaagagcagctag

SEQ ID NO: 212070 - protein, 97 aa, Artificial Sequence
  derived and/or modified sequence
MAPAAATGGSTLPSGFSVFTTLPDLLFIFEFDAAYHCTAALFYLSASVLEALATITMQDGFTYRHYHENIAAVVFSYIATLLYVVHAVFSLIRWKSS

SEQ ID NO: 212071 - DNA, 294 bp, Artificial Sequence
  derived and/or modified sequence
atggcaccagccgctgctaccggcggttccacgctaccgtctggtttttcagttttcaccaccctgcccgacctcctattcatatttgagttcgatgcagcctatcactgtaccgccgctctgttctatctgagtgctagcgtgctcgaggctttggcaaccatcacgatgcaagatggcttcacttaccgtcattaccatgaaaacatcgctgccgtcgttttttcctacattgcaacactcctctatgtagtgcacgctgtatttagcttgatccgctggaaatccagttag

SEQ ID NO: 212072 - DNA, 294 bp, Artificial Sequence
  derived and/or modified sequence
atggccccagctgctgccactggaggcagcaccctgcccagcggcttctctgtgttcaccaccctgcctgacctgctcttcatctttgaatttgatgctgcctaccactgcacagctgccctcttctacctgagcgcctctgtgctggaggccctggccaccatcaccatgcaggacggcttcacctaccgccactaccacgagaacattgctgctgtggtgttctcctacatcgccaccctgctgtatgtggtgcatgctgtgttcagcctcatccgctggaagagcagctag

SEQ ID NO: 212073 - DNA, 831 bp, Artificial Sequence
  derived and/or modified sequence
atggcccccgcagcggcgacggggggcagcaccctgcccagtggcttctcggtcttcaccaccttgcccgacttgctcttcatctttgagtttgacgcagcctaccactgcaccgctgccctcttttacctcagcgcctcagtcctggaggccctggccaccatcacgatgcaagacggcttcacctacaggcactaccatgaaaacattgctgccgtggtgttctcctacatagccactctgctctacgtggtccatgcggtgttctctttaatcagatggaagtcttcataaagccgcagtagaacttgagctgaaaacccagatggtgttaactggccgccccactttccggcataactttttagaaaacagaaatgcccttgatggtggaaaaaagaaaacaaccacccccccactgcccaaaaaaaaaagccctgccctgttgctcgtgggtgctgtgtttactctcccgtgtgccttcgcgtccgggttgggagcttgctgtgtctaacctccaactgctgtgctgtctgctagggtcacctcctgtttgtgaaaggggaccttcttgttcgggggtgggaagtggcgaccgtgacctgagaaggaaagaaagatcctctgctgacccctggagcagctctcgagaactacctgttggtattgtccacaagctctcccgagcgccccatcttgtgccatgttttaagtcttcatggatgttctgcatgtcatggggactaaaactcacccaacagatctttccagaggtccatggtggaagacgataaccctgtgaaatactttataaaatgtcttaatgttcaa

SEQ ID NO: 212074 - DNA, 294 bp, Artificial Sequence
  derived and/or modified sequence
atggcccccgccgccgccaccggcggcagcaccctgcccagcggcttctccgtttttactactcttcccgacttgttgttcattttcgaatttgatgctgcctaccactgcactgccgccctcttctatctgagtgctagcgtgttagaagctctggctactataactatgcaagatggttttacctataggcattaccacgagaatatcgcagccgtcgtattttcctacatcgcgacactcttatacgtagtgcatgcagtattctcccttattcgttggaagtcttcctag

SEQ ID NO: 212075 - DNA, 294 bp, Artificial Sequence
  derived and/or modified sequence
atggccccagccgcagcaaccggcggaagcaccctgccgagtgggtttagtgtgttcaccactctccccgatctgctcttcatctttgaatttgacgccgcatatcactgtacagctgcacttttttacctgagcgcgtccgtattagaggcactggccacaatcacaatgcaagatgggtttacctaccggcattatcacgagaatattgctgccgttgtgttctcttatatcgctacactcctctatgtcgtgcatgcagtgttctctctgattaggtggaaaagctcttag

SEQ ID NO: 212076 - DNA, 294 bp, Artificial Sequence
  derived and/or modified sequence
atggcccccgccgccgccaccggcggcagcaccctgcccagcggcttcagcgtgttcaccaccctgcccgacctgctgttcatcttcgagttcgacgccgcctaccactgcaccgccgccctgttctacctgagcgccagcgtgctggaggccctggccaccatcaccatgcaggacggcttcacctacagacactaccacgagaacatcgccgccgtggtgttcagctacatcgccaccctgctgtacgtggtgcacgccgtgttcagcctgatcagatggaagagcagctag

SEQ ID NO: 212077 - protein, 55 aa, Artificial Sequence
  derived and/or modified sequence
MAPAAATGGSTLPSGFSVFTTLPDLLFIFEFVFSYIATLLYVVHAVFSLIRWKSS

SEQ ID NO: 212078 - DNA, 168 bp, Artificial Sequence
  derived and/or modified sequence
atggcaccagccgctgctacgggaggcagcactcttccttccggatttagcgtcttcacaactctccccgatctcctctttatctttgagtttgtgtttagctatattgccacactactgtacgtggtgcacgcggtcttctctctgattaggtggaaaagcagctag

SEQ ID NO: 212079 - DNA, 168 bp, Artificial Sequence
  derived and/or modified sequence
atggccccagctgctgccactggaggcagcaccctgcccagcggcttctctgtgttcaccaccctgcctgacctgctcttcatctttgaatttgtgttctcctacatcgccaccctgctgtatgtggtgcatgctgtgttcagcctcatccgctggaagagcagctag

SEQ ID NO: 212080 - DNA, 705 bp, Artificial Sequence
  derived and/or modified sequence
atggcccccgcagcggcgacggggggcagcaccctgcccagtggcttctcggtcttcaccaccttgcccgacttgctcttcatctttgagtttgtgttctcctacatagccactctgctctacgtggtccatgcggtgttctctttaatcagatggaagtcttcataaagccgcagtagaacttgagctgaaaacccagatggtgttaactggccgccccactttccggcataactttttagaaaacagaaatgcccttgatggtggaaaaaagaaaacaaccacccccccactgcccaaaaaaaaaagccctgccctgttgctcgtgggtgctgtgtttactctcccgtgtgccttcgcgtccgggttgggagcttgctgtgtctaacctccaactgctgtgctgtctgctagggtcacctcctgtttgtgaaaggggaccttcttgttcgggggtgggaagtggcgaccgtgacctgagaaggaaagaaagatcctctgctgacccctggagcagctctcgagaactacctgttggtattgtccacaagctctcccgagcgccccatcttgtgccatgttttaagtcttcatggatgttctgcatgtcatggggactaaaactcacccaacagatctttccagaggtccatggtggaagacgataaccctgtgaaatactttataaaatgtcttaatgttcaa

SEQ ID NO: 212081 - DNA, 168 bp, Artificial Sequence
  derived and/or modified sequence
atggcccccgccgccgccaccggcggcagcaccctgcccagcggcttctccgtgtttacaacacttcccgaccttcttttcatatttgagttcgttttttcttacatcgcaactcttctctacgtagtgcacgcagtgttctccctcatccggtggaaatcttcttag

SEQ ID NO: 212082 - DNA, 168 bp, Artificial Sequence
  derived and/or modified sequence
atggcgcctgccgcagccacaggaggctccaccctcccctccgggttctctgtcttcaccaccctgcccgacctgttgtttattttcgagttcgtgttctcttacatcgcaacacttttgtacgttgtgcatgccgttttcagtttaatcagatggaagtcaagctag

SEQ ID NO: 212083 - DNA, 168 bp, Artificial Sequence
  derived and/or modified sequence
atggcccccgccgccgccaccggcggcagcaccctgcccagcggcttcagcgtgttcaccaccctgcccgacctgctgttcatcttcgagttcgtgttcagctacatcgccaccctgctgtacgtggtgcacgccgtgttcagcctgatcagatggaagagcagctag

SEQ ID NO: 212084 - protein, 103 aa, Artificial Sequence [sequence omitted]

SEQ ID NO: 212085 - protein, 103 aa, Artificial Sequence
  derived and/or modified sequence
MKEDLNLENFTAKTIYENRIYSLKIECGPKYPEAPPFVRFVTKINMNGVNSSNGVVDPRAISVLAKWQNSYSIKVVLQELRRLMMSKENMKLPQPPEGQCYSN

SEQ ID NO: 212086 - DNA, 312 bp, Artificial Sequence
  derived and/or modified sequence
atggagaagggcctgaacaccaagaacttcaccgagcagaccatctacgagaacagaatctacagcctgaagatcgagtgcggccccaagtaccccgaggccccccccttcgtgagattcgtgaccaagatcaacatgaacggcgtgaacagcagcaacggcgtggtggaccccagagccatcagcgtgctggccaagtggcagaacagctacagcatcaaggtggtgctgcaggagctgagaagactgatgatgagcaaggagaacatgaagctgccccagccccccgagggccagtgctacagcaactag

SEQ ID NO: 212087 - DNA, 312 bp, Artificial Sequence
  derived and/or modified sequence
atgaaggaggacctgaacctggagaacttcaccgccaagaccatctacgagaacagaatctacagcctgaagatcgagtgcggccccaagtaccccgaggccccccccttcgtgagattcgtgaccaagatcaacatgaacggcgtgaacagcagcaacggcgtggtggaccccagagccatcagcgtgctggccaagtggcagaacagctacagcatcaaggtggtgctgcaggagctgagaagactgatgatgagcaaggagaacatgaagctgccccagccccccgagggccagtgctacagcaactag

SEQ ID NO: 212088 - DNA, 312 bp, Artificial Sequence
  derived and/or modified sequence
atggaaaagggccttaacactaagaactttaccgagcagactatttatgagaacagaatatatagcctgaaaatcgaatgtggacctaagtaccctgaagccccgccctttgttaggttcgtaactaagattaatatgaacggggtcaattccagcaatggggtggttgacccccgagctattagcgttctcgccaagtggcaaaactcttactctatcaaagtggtgctccaggagctcaggcgcctgatgatgtctaaggaaaacatgaagctgccgcagccaccagagggccagtgctactctaattag

SEQ ID NO: 212089 - DNA, 312 bp, Artificial Sequence
  derived and/or modified sequence
atgaaagaagacctgaacctggaaaattttaccgctaagaccatctacgaaaacaggatttacagcttgaaaattgagtgtggtccaaagtatcctgaggctccaccgtttgtgcgctttgtcactaaaattaatatgaacggggttaattccagtaacggcgtggtggatcccagagctatcagtgtgttagctaagtggcagaacagctattcaatcaaagtggtgctgcaggagttacgcagactcatgatgtctaaagaaaacatgaaattgccacaacctcctgagggccagtgctacagtaattag

SEQ ID NO: 212090 - DNA, 312 bp, Artificial Sequence
  derived and/or modified sequence
atgaaggaggatttgaacctcgaaaatttcacggccaaaaccatctacgagaataggatctacagcttaaagatcgagtgtggccccaagtatccagaagcccctccattcgtgcggtttgtgaccaaaattaacatgaatggggtcaattcatctaatggcgtggtggacccgagggctatcagcgtgctggccaaatggcagaactcttatagcataaaagtagtactccaagaacttcgcagactgatgatgtcaaaagagaatatgaaactgccgcagccccctgagggtcagtgctattcgaattag

SEQ ID NO: 212091 - DNA, 312 bp, Artificial Sequence
  derived and/or modified sequence
atggagaagggcctgaacaccaagaacttcacagagcagaccatctatgaaaatcgcatctacagcctgaagattgaatgtggccccaagtacccagaggcccccccatttgtgcgctttgtgaccaagatcaacatgaatggagtgaacagcagcaatggagtggtggacccccgggccatctctgtgctggccaagtggcagaacagctacagcatcaaggtggtgctgcaggagctgcggcggctgatgatgagcaaggagaacatgaagctgccccagcccccagagggccagtgctacagcaactag

SEQ ID NO: 212092 - DNA, 312 bp, Artificial Sequence
  derived and/or modified sequence
atgaaggaggacctgaacctggagaacttcaccgccaagaccatctatgaaaatcgcatctacagcctgaagattgaatgtggccccaagtacccagaggcccccccatttgtgcgctttgtgaccaagatcaacatgaatggagtgaacagcagcaatggagtggtggacccccgggccatctctgtgctggccaagtggcagaacagctacagcatcaaggtggtgctgcaggagctgcggcggctgatgatgagcaaggagaacatgaagctgccccagcccccagagggccagtgctacagcaactag

SEQ ID NO: 212093 - DNA, 312 bp, Artificial Sequence
  derived and/or modified sequence
atggagaagggcctgaacaccaagaacttcaccgagcagaccatctacgaaaataggatctacagcttgaaaatcgagtgcggacctaagtatcctgaggcccctcccttcgtgcgtttcgtcaccaagatcaatatgaatggcgttaatagcagcaatggtgtggtagatccaagagccatttcagtactcgcaaaatggcagaactcttattctatcaaggtcgtcctgcaggagctgaggcgactaatgatgtctaaagagaacatgaagttgccccagccccctgagggtcagtgctactctaactag

SEQ ID NO: 212094 - DNA, 312 bp, Artificial Sequence
  derived and/or modified sequence
atgaaggaggacctgaacctggagaacttcaccgccaagaccatctacgagaaccggatttacagtttgaaaatcgaatgtggccccaagtacccggaagccccaccatttgtccggtttgtgacaaagattaacatgaatggcgtgaattcatcaaacggagtagttgatcccagagctatcagcgttctggcaaagtggcagaactcatacagtatcaaggtggtgttgcaggagctcaggagactgatgatgagcaaggagaatatgaaactcccacagccacctgaaggccagtgctattctaactag

SEQ ID NO: 212095 - DNA, 312 bp, Artificial Sequence
  derived and/or modified sequence
atgaaggaggacctgaacctggagaacttcaccgccaagaccatctacgagaaccggatctatagtctgaagattgagtgcgggcccaagtatccagaggccccacccttcgtccgcttcgttaccaaaattaacatgaacggcgtgaacagcagcaatggtgttgtggatcccagggctattagtgtcctggccaaatggcagaacagctactcgatcaaagtggtgttacaggagctgcggcgtctgatgatgtcgaaagagaacatgaagctgcctcagccacctgaaggccagtgctactcaaactag

SEQ ID NO: 212096 - DNA, 312 bp, Artificial Sequence
  derived and/or modified sequence
atggagaaagggctcaataccaagaactttaccgagcaaaccatttacgagaaccgcatctatagcctcaaaattgagtgtggacccaagtaccccgaggcccctccctttgtcagatttgtgaccaagattaatatgaacggcgtaaattcctccaatggcgtggtggatccgagagccatttcggtgctggccaaatggcaaaactcctatagcatcaaggtagtgttgcaagagctaagacggttgatgatgagcaaggagaacatgaagctcccacagcccccagaggggcaatgttattctaactag

SEQ ID NO: 212097 - DNA, 312 bp, Artificial Sequence
  derived and/or modified sequence
atgaaggaagacctcaatctggaaaatttcactgctaagactatctacgagaaccgcatctactctctgaaaattgagtgtggacctaaataccccgaggctcctcctttcgtccggtttgtgactaagatcaatatgaatggggtgaattcaagtaatggtgtagtggacccgagagccatctcggttctggctaaatggcagaattcgtattcaattaaagtggtcctgcaagaattgcggaggcttatgatgtctaaggagaatatgaagcttcctcagcccccagaggggcaatgctattccaattag

SEQ ID NO: 212098 - DNA, 312 bp, Artificial Sequence
  derived and/or modified sequence
atgaaggaggatctcaatctggaaaactttaccgctaagacgatttatgaaaatcgcatatatagcctgaaaattgaatgcggaccaaaataccctgaggcccctcctttcgtgagatttgttaccaaaattaatatgaatggggtcaacagtagcaacggcgttgttgatcccagagcgatcagtgtactggccaaatggcagaactcctattcaatcaaagtggtgctgcaggagcttagaaggctgatgatgtccaaggaaaatatgaagctccctcagccccctgagggccagtgctacagcaattag

SEQ ID NO: 212099 - DNA, 1954 bp, Artificial Sequence
  derived and/or modified sequence
atggagaagggacttaatactaaaaacttcactgaacaaacaatttatgaaaaccgaatatacagccttaaaatagaatgtggacctaaatacccagaagcacccccctttgtaagatttgtaacaaaaattaatatgaatggagtaaatagttctaatggagtggtggacccaagagccatatcagtgctagcaaaatggcagaattcatatagcatcaaagttgtcctgcaagagcttcggcgcctaatgatgtctaaagaaaatatgaaactccctcagccgcccgaaggacagtgttacagcaattaatcaaaaagaaaaaccacaggcccttccccttccccccaattcgatttaatcagtcttcattttccacagtagtaaattttctagatacgtcttgtagacctcaaagtaccggaaaggaagctcccattcaaaggaaatttatcttaagatactgtaaatgatactaattttttgtccatttgaaatatataagttgtgctataacaaatcatcctgtcaagtgtaaccactgtccacgtagttgaacttctgggatcaagaaagtctatttaaattgattcccatcataactggtggggcacatctaactcaactgtgaaaagacacatcacacaatcaccttgctgctgattacacggcctggggtctctgccttctccccttaccctcccgcctcccaccctccctgcaacaacagccctctagcctggggggcttgttagagtagatgtgaaggtttcaggtcgcagcctgtgggactactgctaggtgtgtggggtgtttcgcctgcacccctggtttctttaagtcttaagtgatgccccttccaaaccatcatcctgtccccacgctcctccactcccgcccttggccgaagcatagattgtaacccctccactcccctctgagattggccttcggtgaggaattcagggctttccccatatcttctctcccccacctttatcgaggggtgctgctttttctccctcctcctcaagttcctttttgcaccgtcaccacccaacaccttccatgacacttccttgctttggccagaagccatcaggtaaggttggaaagagcctctgacctcccttgtttagttttggaaccatactcactcactctccaccagcctgggaaatgaatattgggtcctcagccctgccaccctctgctgtcatcagctgatgcattgtttttagctcaggttttgataaggtgaaaagaatagtcaccagggttactcagacctgccagctctcggagtccttggtggttgaacttggagaaagaccgcatgaagatacttgtaagcacacatgatccctctgaattgttttactttcctgtaactgcttttgcttttaaaaattgaagaagttttaaacagggctttcatttggtcatccttgcaatccattggggtctagtttggaatctgacaactggaacaaaaagaaccttgaatccggtgcatgccttggttttggtgctgctgctgcttcccaagatcctcagcagggattaagaaggaacccggtgtgcacagcagatccccgaaattggtgggcttgacctcctggcaaattgctgcgtctttccacttgctgttcaggaccactaaatgctgaaatgtggatgcataccgaaataaaagcaattcattgtgtactaaaggttttttttttttttttaatttagtatttgtgtaaaaccaccttttgaagcagcaactatcaagtctgaaaagcaattgatgtttccattaatctttttctggggggaaaaccttagttctaaggatttaacatcctgtaagtgaagtttaacataacagtattccataagcagcctttttattgtcagaccattgcctgattttaatataataaaaaaaaagtgtgcgttaatattt

SEQ ID NO: 212100 - DNA, 2387 bp, Artificial Sequence
  derived and/or modified sequence
gcctaacctcttcctgcgatgagctcggcacgggaattattattgtcaattttacttgcaagaagtttcctacaagagccaaggaatccatgcgagtaaacatttacgggcaccatagataaaaggcttgtgttttaatcctcatcctctccacctgttagctctgagtctcagttttctcatctctaaaaatggggatattcacaggagttgctgcatcgagttgtgaggattaaaagttggatgtaacggcttggtaattatgagctcttctagtgtcccttcctcttccctgtgcccaaggggttttaggaaagcattttatctccacagcaatcctatgaggttgatactactatcctcatagaaggggaaactgatgccaggagaggttcaagcgtcttacctgaagtcacaaagcaaactgagtgatgaaggaagacttgaacctagaaaatttcactgcaaagacaatttatgaaaaccgaatatacagccttaaaatagaatgtggacctaaatacccagaagcacccccctttgtaagatttgtaacaaaaattaatatgaatggagtaaatagttctaatggagtggtggacccaagagccatatcagtgctagcaaaatggcagaattcatatagcatcaaagttgtcctgcaagagcttcggcgcctaatgatgtctaaagaaaatatgaaactccctcagccgcccgaaggacagtgttacagcaattaatcaaaaagaaaaaccacaggcccttccccttccccccaattcgatttaatcagtcttcattttccacagtagtaaattttctagatacgtcttgtagacctcaaagtaccggaaaggaagctcccattcaaaggaaatttatcttaagatactgtaaatgatactaattttttgtccatttgaaatatataagttgtgctataacaaatcatcctgtcaagtgtaaccactgtccacgtagttgaacttctgggatcaagaaagtctatttaaattgattcccatcataactggtggggcacatctaactcaactgtgaaaagacacatcacacaatcaccttgctgctgattacacggcctggggtctctgccttctccccttaccctcccgcctcccaccctccctgcaacaacagccctctagcctggggggcttgttagagtagatgtgaaggtttcaggtcgcagcctgtgggactactgctaggtgtgtggggtgtttcgcctgcacccctggtttctttaagtcttaagtgatgccccttccaaaccatcatcctgtccccacgctcctccactcccgcccttggccgaagcatagattgtaacccctccactcccctctgagattggccttcggtgaggaattcagggctttccccatatcttctctcccccacctttatcgaggggtgctgctttttctccctcctcctcaagttcctttttgcaccgtcaccacccaacaccttccatgacacttccttgctttggccagaagccatcaggtaaggttggaaagagcctctgacctcccttgtttagttttggaaccatactcactcactctccaccagcctgggaaatgaatattgggtcctcagccctgccaccctctgctgtcatcagctgatgcattgtttttagctcaggttttgataaggtgaaaagaatagtcaccagggttactcagacctgccagctctcggagtccttggtggttgaacttggagaaagaccgcatgaagatacttgtaagcacacatgatccctctgaattgttttactttcctgtaactgcttttgcttttaaaaattgaagaagttttaaacagggctttcatttggtcatccttgcaatccattggggtctagtttggaatctgacaactggaacaaaaagaaccttgaatccggtgcatgccttggttttggtgctgctgctgcttcccaagatcctcagcagggattaagaaggaacccggtgtgcacagcagatccccgaaattggtgggcttgacctcctggcaaattgctgcgtctttccacttgctgttcaggaccactaaatgctgaaatgtggatgcataccgaaataaaagcaattcattgtgtactaaaggttttttttttttttttaatttagtatttgtgtaaaaccaccttttgaagcagcaactatcaagtctgaaaagcaattgatgtttccattaatctttttctggggggaaaaccttagttctaaggatttaacatcctgtaagtgaagtttaacataacagtattccataagcagcctttttattgtcagaccattgcctgattttaatataataaaaaaaaagtgtgcgttaatatttaa

SEQ ID NO: 212101 - DNA, 2179 bp, Artificial Sequence
  derived and/or modified sequence
gcctaacctcttcctgcgatgagctcggcacgggaattattattgtcaattttacttgcaagaagtttcctacaagagccaaggaatccatgcgagtaaacatttacgggcaccatagataaaagcaatcctatgaggttgatactactatcctcatagaaggggaaactgatgccaggagaggttcaagcgtcttacctgaagtcacaaagcaaactgagtgatgaaggaagacttgaacctagaaaatttcactgcaaagacaatttatgaaaaccgaatatacagccttaaaatagaatgtggacctaaatacccagaagcacccccctttgtaagatttgtaacaaaaattaatatgaatggagtaaatagttctaatggagtggtggacccaagagccatatcagtgctagcaaaatggcagaattcatatagcatcaaagttgtcctgcaagagcttcggcgcctaatgatgtctaaagaaaatatgaaactccctcagccgcccgaaggacagtgttacagcaattaatcaaaaagaaaaaccacaggcccttccccttccccccaattcgatttaatcagtcttcattttccacagtagtaaattttctagatacgtcttgtagacctcaaagtaccggaaaggaagctcccattcaaaggaaatttatcttaagatactgtaaatgatactaattttttgtccatttgaaatatataagttgtgctataacaaatcatcctgtcaagtgtaaccactgtccacgtagttgaacttctgggatcaagaaagtctatttaaattgattcccatcataactggtggggcacatctaactcaactgtgaaaagacacatcacacaatcaccttgctgctgattacacggcctggggtctctgccttctccccttaccctcccgcctcccaccctccctgcaacaacagccctctagcctggggggcttgttagagtagatgtgaaggtttcaggtcgcagcctgtgggactactgctaggtgtgtggggtgtttcgcctgcacccctggtttctttaagtcttaagtgatgccccttccaaaccatcatcctgtccccacgctcctccactcccgcccttggccgaagcatagattgtaacccctccactcccctctgagattggccttcggtgaggaattcagggctttccccatatcttctctcccccacctttatcgaggggtgctgctttttctccctcctcctcaagttcctttttgcaccgtcaccacccaacaccttccatgacacttccttgctttggccagaagccatcaggtaaggttggaaagagcctctgacctcccttgtttagttttggaaccatactcactcactctccaccagcctgggaaatgaatattgggtcctcagccctgccaccctctgctgtcatcagctgatgcattgtttttagctcaggttttgataaggtgaaaagaatagtcaccagggttactcagacctgccagctctcggagtccttggtggttgaacttggagaaagaccgcatgaagatacttgtaagcacacatgatccctctgaattgttttactttcctgtaactgcttttgcttttaaaaattgaagaagttttaaacagggctttcatttggtcatccttgcaatccattggggtctagtttggaatctgacaactggaacaaaaagaaccttgaatccggtgcatgccttggttttggtgctgctgctgcttcccaagatcctcagcagggattaagaaggaacccggtgtgcacagcagatccccgaaattggtgggcttgacctcctggcaaattgctgcgtctttccacttgctgttcaggaccactaaatgctgaaatgtggatgcataccgaaataaaagcaattcattgtgtactaaaggttttttttttttttttaatttagtatttgtgtaaaaccaccttttgaagcagcaactatcaagtctgaaaagcaattgatgtttccattaatctttttctggggggaaaaccttagttctaaggatttaacatcctgtaagtgaagtttaacataacagtattccataagcagcctttttattgtcagaccattgcctgattttaatataataaaaaaaaagtgtgcgttaatatttaa

SEQ ID NO: 212102 - protein, 268 aa, Artificial Sequence
  derived and/or modified sequence
MFRMLNSSFEDDPFFSESILAHRENMRQMIRSFSEPFGRDLLSISDGRGRAHNRRGHNDGEDSLTHTDVSSFQTMDQMVSNMRNYMQKLERNFGQLSVDPNGHSFCSSSVMTYSKIGDEPPKVFQASTQTRRAPGGIKETRKAMRDSDSGLEKMAIGHHIHDRAHVIKKSKNKKTGDEEVNQEFINMNESDAHAFDEEWQSEVLKYKPGRHNLGNTRMRSVGHENPGSRELKRREKPQQSPAIEHGRRSNVLGDKLHIKGSSVKSNKK

SEQ ID NO: 212103 - DNA, 807 bp, Artificial Sequence
  derived and/or modified sequence
atgttccggatgctcaattccagctttgaagacgatccctttttttctgaaagtatacttgcacatagagagaatatgcgtcagatgataagaagtttcagtgagcccttcggacgcgacctgctgtccatcagtgatgggaggggccgcgcacacaatcggagaggccataacgacggggaggacagtctgacccataccgatgtttcctcatttcaaacaatggaccagatggtctccaacatgaggaattatatgcaaaagctcgaaaggaacttcggccagttaagtgtcgaccccaatggccattctttttgttcatcttccgtcatgacttactctaagatcggtgatgagccacctaaggtgtttcaggctagcacgcagaccaggagggctcccggggggattaaagagacaagaaaagcaatgcgcgatagtgatagcggtttggaaaagatggccattggacaccacatccacgatcgggcccatgttatcaagaagtccaagaacaagaagaccggggacgaggaagttaaccaggaatttattaacatgaacgagagcgacgcgcacgcgttcgatgaggagtggcaatcagaggtcctgaaatataaacccgggagacataacttgggaaacaccaggatgaggagcgtgggacatgagaacccggggtcacgggagctcaagagacgggaaaagccacagcagtcccctgctatcgaacacggcaggagatccaacgtgctgggggataaacttcacataaagggctccagcgttaaatccaataaaaaatag

SEQ ID NO: 212104 - DNA, 807 bp, Artificial Sequence
  derived and/or modified sequence
atgttcaggatgctgaacagcagctttgaagatgaccccttcttcagcgagagcatcctggcccaccgggagaacatgaggcagatgatccgctccttcagcgagcccttcggccgggacctgctgagcatcagtgatggccggggccgggcccacaacagaagaggccacaatgatggagaggacagcctgacccacacagatgtgtcctccttccagaccatggaccagatggtgagcaacatgaggaactacatgcagaagctggagaggaactttggccagctgtctgtggaccccaacggccacagcttctgcagcagctctgtgatgacctacagcaagattggagatgagccccccaaggtgttccaggccagcacccagacccggcgggcccctgggggcatcaaggagaccaggaaggccatgagggacagcgacagcggcctggagaagatggccatcggccaccacatccatgaccgggcccacgtgatcaagaagagcaagaacaagaagacaggagatgaggaggtgaaccaggagttcatcaacatgaatgaaagtgatgcccacgcctttgatgaggagtggcagagcgaggtgctgaagtacaagccaggccgccacaacctgggcaacaccaggatgaggtctgtgggccacgagaaccctggcagccgggagctgaagagaagagagaagccccagcagagccctgccattgaacatggaagaagaagcaatgtgctgggggacaagctgcacatcaagggcagctctgtgaagagcaacaagaagtag

SEQ ID NO: 212105 - DNA, 2203 bp, Artificial Sequence
  derived and/or modified sequence
ctatcccggcgggcaccgcctgcgccgcggcgagtgaggcgtcgtccgtactggaggctagctcttgtcgcggccgcggcgagttaacatcgtttttccaatctgtccgcggctgccgccacccaagacagagccagaatgttcaggatgctgaacagcagttttgaggatgaccccttcttctctgagtccattcttgcacaccgagaaaatatgcgacagatgataagaagtttttctgaaccctttggaagagacttgctcagtatctctgatggtagagggagagctcataatcgtagaggacataatgatggtgaagattctttgactcatacagatgtcagctctttccagacaatggaccaaatggtgtcaaatatgagaaactatatgcagaaattagaaagaaacttcggtcaactttcagtggatccaaatggacattcattttgttcttcctcagttatgacttattccaaaataggagatgaaccgccaaaggtttttcaggcctcaactcaaactcgtcgagctccaggaggaataaaggaaaccaggaaagcaatgagagattctgacagtggactagaaaaaatggctattggtcatcatatccatgaccgagctcatgtcattaaaaagtcaaagaacaagaagactggagatgaagaggtcaaccaggagttcatcaatatgaatgaaagtgatgctcatgcttttgatgaggagtggcaaagtgaggttttgaagtacaaaccaggacgacacaatctaggaaacactagaatgagaagtgttggccatgagaatcctggctcccgagaacttaaaagaagggagaaacctcaacaaagtccagccattgaacatggaaggagatcaaatgttttgggggacaaactccacatcaaaggctcatctgtgaaaagcaacaaaaaataaatagccatgcatttgatttgtttagttttgattgttttaacagttagtaatggtgctgggtaataagcataagaccaatctcttgctgttaaatcagttctgtccttggcaactttcttctgatatctgaatgttcatgaaggtcctagctttatattgtccctcttttaggaataaaattttgattttcaacaatgtgagtaaattgagtctatttaatgtaaaactctttaaaacatactaattttttaaagcttatatgcttatttcgcttccccagttgtttttgtgttggctaaatattcttttatatttatcaagattgattgcagagcagttctatcacttataattagttataagaaattataatgttaaaaaagtctcagtttttactaacactgtactagggtgatattaataaaggtttaaataatttatctctaattttataatgtgttgtaaagccaactagcttaaaactttaaaaataataaagcaaaactacactagtactcttttatgagaaaatagttactattttgataaagggcaaggataatcaaatagttcattttcagagaaaaatattttaaattgctaatgtacatgattgttttggttataatttatttatagaatgtatcttttctatattacattcttaatattcaccagatattatattgaccattctctttaacttcttaatgtggcatatttctactctcctttcccacaaacagcttcatctgtctccaaggttaacattctgaagctggagagtccttggagaaactctgctcagcttttttgtgacatttagaaaaatgcatttggtattctccaaaccagaatgatacattgtctcaaaatctgttagacagctgatgggtgtttttgagcaacgtcttaataattcagttgtttctgttttaattataccattaaaaatcagctttagctttttaattctagaatttaagcatcagtctgttcttataaaagttaggtttgaagtttataagaatataaaatcttaactcacatttgttgtttaatatttctgtcaaggaaaaaagcccccaaaaattgctatcactctataatcctaagtatttttcttttcaattttgtaagtaaaattatatgactatgttcatacttctctaattttttatataatatttttgttaattttactagtttgtgttttatgcctttagtcattaaaataaaatgcaaatgtgttaattca

SEQ ID NO: 212106 - DNA, 2222 bp, Artificial Sequence
  derived and/or modified sequence
gcgccgcggcgagtgaggcgtcgtccgtactggaggctagctcttgtcgcggccgcggcgagttaacatcgtttttccaatctgtccgcggctgccgccacccaagacagagccagaatgttcaggatgctgaacagcagttttgaggatgaccccttcttctcgtgagttacgggagccaggagtccggggtcgcgcgggaattaagtgagtccattcttgcacaccgagaaaatatgcgacagatgataagaagtttttctgaaccctttggaagagacttgctcagtatctctgatggtagagggagagctcataatcgtagaggacataatgatggtgaagattctttgactcatacagatgtcagctctttccagacaatggaccaaatggtgtcaaatatgagaaactatatgcagaaattagaaagaaacttcggtcaactttcagtggatccaaatggacattcattttgttcttcctcagttatgacttattccaaaataggagatgaaccgccaaaggtttttcaggcctcaactcaaactcgtcgagctccaggaggaataaaggaaaccaggaaagcaatgagagattctgacagtggactagaaaaaatggctattggtcatcatatccatgaccgagctcatgtcattaaaaagtcaaagaacaagaagactggagatgaagaggtcaaccaggagttcatcaatatgaatgaaagtgatgctcatgcttttgatgaggagtggcaaagtgaggttttgaagtacaaaccaggacgacacaatctaggaaacactagaatgagaagtgttggccatgagaatcctggctcccgagaacttaaaagaagggagaaacctcaacaaagtccagccattgaacatggaaggagatcaaatgttttgggggacaaactccacatcaaaggctcatctgtgaaaagcaacaaaaaataaatagccatgcatttgatttgtttagttttgattgttttaacagttagtaatggtgctgggtaataagcataagaccaatctcttgctgttaaatcagttctgtccttggcaactttcttctgatatctgaatgttcatgaaggtcctagctttatattgtccctcttttaggaataaaattttgattttcaacaatgtgagtaaattgagtctatttaatgtaaaactctttaaaacatactaattttttaaagcttatatgcttatttcgcttccccagttgtttttgtgttggctaaatattcttttatatttatcaagattgattgcagagcagttctatcacttataattagttataagaaattataatgttaaaaaagtctcagtttttactaacactgtactagggtgatattaataaaggtttaaataatttatctctaattttataatgtgttgtaaagccaactagcttaaaactttaaaaataataaagcaaaactacactagtactcttttatgagaaaatagttactattttgataaagggcaaggataatcaaatagttcattttcagagaaaaatattttaaattgctaatgtacatgattgttttggttataatttatttatagaatgtatcttttctatattacattcttaatattcaccagatattatattgaccattctctttaacttcttaatgtggcatatttctactctcctttcccacaaacagcttcatctgtctccaaggttaacattctgaagctggagagtccttggagaaactctgctcagcttttttgtgacatttagaaaaatgcatttggtattctccaaaccagaatgatacattgtctcaaaatctgttagacagctgatgggtgtttttgagcaacgtcttaataattcagttgtttctgttttaattataccattaaaaatcagctttagctttttaattctagaatttaagcatcagtctgttcttataaaagttaggtttgaagtttataagaatataaaatcttaactcacatttgttgtttaatatttctgtcaaggaaaaaagcccccaaaaattgctatcactctataatcctaagtatttttcttttcaattttgtaagtaaaattatatgactatgttcatacttctctaattttttatataatatttttgttaattttactagtttgtgttttatgcctttagtcattaaaataaaatgcaaatgtgttaa

SEQ ID NO: 212107 - DNA, 1050 bp, Artificial Sequence
  derived and/or modified sequence
gtactggaggctagctcttgtcgcggccgcggcgagttaacatcgtttttccaatctgtccgcggctgccgccacccaagacagagccagaatgttcaggatgctgaacagcagttttgaggatgaccccttcttctcagctaaccttgtttgtgaagggactccgctttctgtcaaaactagaaataggacagggaagctgatggggcggggcggggggaggggggcgggaggagggcggcgggggggggggggtgtgtatttaacacctcagtgagtccattcttgcacaccgagaaaatatgcgacagatgataagaagtttttctgaaccctttggaagagacttgctcagtatctctgatggtagagggagagctcataatcgtagaggacataatgatggtgaagattctttgactcatacagatgtcagctctttccagacaatggaccaaatggtgtcaaatatgagaaactatatgcagaaattagaaagaaacttcggtcaactttcagtggatccaaatggacattcattttgttcttcctcagttatgacttattccaaaataggagatgaaccgccaaaggtttttcaggcctcaactcaaactcgtcgagctccaggaggaataaaggaaaccaggaaagcaatgagagattctgacagtggactagaaaaaatggctattggtcatcatatccatgaccgagctcatgtcattaaaaagtcaaagaacaagaagactggagatgaagaggtcaaccaggagttcatcaatatgaatgaaagtgatgctcatgcttttgatgaggagtggcaaagtgaggttttgaagtacaaaccaggacgacacaatctaggaaacactagaatgagaagtgttggccatgagaatcctggctcccgagaacttaaaagaagggagaaacctcaacaaagtccagccattgaacatggaaggagatcaaatgttttgggggacaaactccacatcaaaggctcatctgtgaaaagcaacaaaaaataaatagccatgcatttga

SEQ ID NO: 212108 - DNA, 1247 bp, Artificial Sequence
  derived and/or modified sequence
gggcaccgcctgcgccgcggcgagtgaggcgtcgtccgtactggaggctagctcttgtcgcggccgcggcgagttaacatcgtttttccaatctgtccgcggctgccgccacccaagacagagccagaatgttcaggatgctgaacagcagttttgaggatgaccccttcttctcgtgagttacgggagccaggagtccggggtcgcgcgggaattaagacatacaggtggtcttactctgcagcagctgaaactgaagcacaagaagcccttggaactatcatcaggacattgagtccattcttgcacaccgagaaaatatgcgacagatgataagaagtttttctgaaccctttggaagagacttgctcagtatctctgatggtagagggagagctcataatcgtagaggacataatgatggtgaagattctttgactcatacagatgtcagctctttccagacaatggaccaaatggtgtcaaatatgagaaactatatgcagaaattagaaagaaacttcggtcaactttcagtggatccaaatggacattcattttgttcttcctcagttatgacttattccaaaataggagatgaaccgccaaaggtttttcaggcctcaactcaaactcgtcgagctccaggaggaataaaggaaaccaggaaagcaatgagagattctgacagtggactagaaaaaatggctattggtcatcatatccatgaccgagctcatgtcattaaaaagtcaaagaacaagaagactggagatgaagaggtcaaccaggagttcatcaatatgaatgaaagtgatgctcatgcttttgatgaggagtggcaaagtgaggttttgaagtacaaaccaggacgacacaatctaggaaacactagaatgagaagtgttggccatgagaatcctggctcccgagaacttaaaagaagggagaaacctcaacaaagtccagccattgaacatggaaggagatcaaatgttttgggggacaaactccacatcaaaggctcatctgtgaaaagcaacaaaaaataaatagccatgcatttgatttgtttagttttgattgttttaacagttagtaatggtgctgggtaataagcataagaccaatctcttgctgttaaatcagttctgtccttggcaactttcttctgatatctgaatgttcatgaaggtcctagctttatattgtccctcttttaggaataaaattttgattttcaacaa

SEQ ID NO: 212109 - DNA, 1098 bp, Artificial Sequence
  derived and/or modified sequence
agtgaggcgtcgtccgtactggaggctagctcttgtcgcggccgcggcgagttaacatcgtttttccaatctgtccgcggctgccgccacccaagacagagccagaatgttcaggatgctgaacagcagttttgaggatgaccccttcttctcgtgagttacgggagccaggagtccggggtcgcgcgggaattaagacatacaggtggtcttactctgcagcagctgaaactgaagcacaagaagcccttggaactatcatcaggacattgagtccattcttgcacaccgagaaaatatgcgacagatgataagaagtttttctgaaccctttggaagagacttgctcagtatctctgatggtagagggagagctcataatcgtagaggacataatgatggtgaagattctttgactcatacagatgtcagctctttccagacaatggaccaaatggtgtcaaatatgagaaactatatgcagaaattagaaagaaacttcataaaggaaaccaggaaagcaatgagagattctgacagtggactagaaaaaatggctattggtcatcatatccatgaccgagctcatgtcattaaaaagtcaaagaacaagaagactggagatgaagaggtcaaccaggagttcatcaatatgaatgaaagtgatgctcatgcttttgatgaggagtggcaaagtgaggttttgaagtacaaaccaggacgacacaatctaggaaacactagaatgagaagtgttggccatgagaatcctggctcccgagaacttaaaagaagggagaaacctcaacaaagtccagccattgaacatggaaggagatcaaatgttttgggggacaaactccacatcaaaggctcatctgtgaaaagcaacaaaaaataaatagccatgcatttgatttgtttagttttgattgttttaacagttagtaatggtgctgggtaataagcataagaccaatctcttgctgttaaatcagttctgtccttggcaactttcttctgatatctgaatgttcatgaaggtcctagctttatattgtccctcttttaggaataaaattttgattttcaacaatg

SEQ ID NO: 212110 - DNA, 807 bp, Artificial Sequence
  derived and/or modified sequence
atgttccggatgctgaacagcagcttcgaggacgaccccttcttctccgagtctatactggcccatagagagaatatgcgtcagatgatacgctcctttagtgagccattcggccgtgatctattgtcaatttcagatggacgagggcgtgcccacaacaggagggggcataatgatggtgaggattctctcacacatactgacgtctcatcatttcagacgatggatcaaatggtcagtaatatgcgaaactacatgcagaaattggagcgtaacttcggtcagcttagtgtggaccctaacggacactctttctgttccagttctgtgatgacatatagtaaaattggggacgagccaccgaaagtatttcaagcctccactcagaccagaagagccccgggaggaatcaaagagaccagaaaagccatgagagacagcgactctggactcgaaaaaatggccataggccatcacatccatgatagagctcatgtcatcaaaaagagcaagaataagaagaccggagacgaggaggttaaccaagaatttatcaacatgaatgaaagtgatgcacacgcatttgacgaggaatggcaatcagaggttttgaaatacaagccgggcagacacaatctggggaacacgcggatgcggtccgtcgggcacgagaacccagggtctcgcgagctgaaaaggcgtgagaagcctcagcaatccccggcaattgaacatggtaggaggagcaacgtactcggtgacaagctccatatcaaggggtctagcgtgaagagtaacaagaagtag

SEQ ID NO: 212111 - DNA, 807 bp, Artificial Sequence
  derived and/or modified sequence
atgtttcggatgcttaacagtagcttcgaggatgatccatttttctctgagtcaatcctggcacacagagaaaatatgcgccagatgatcagaagcttttcggagcctttcggtagggacctcctttcaatctccgatggtcgcggacgcgcacataacaggcgagggcacaacgacggggaggattctttgacacacaccgacgtgtccagttttcagacgatggatcaaatggtgtctaatatgaggaactatatgcagaaactcgagcggaatttcgggcaactgagtgtcgacccaaacggacactcattctgttccagttctgtcatgacctatagcaaaattggcgatgaacctccgaaagtgttccaagcatctacccagacacgcagggccccaggcggtatcaaagagacaaggaaggccatgcgcgactctgatagtggcctggaaaagatggcgattggacaccacatccatgaccgagcccatgtcatcaaaaaaagtaaaaacaaaaagacgggcgacgaagaggtgaatcaagagttcattaatatgaacgaaagcgatgcccatgcttttgacgaagagtggcagtcagaagtcttaaaatacaaaccaggacggcacaacctgggcaacactcgtatgaggagcgtggggcacgagaatccgggatcaagagaactgaagcgtagggagaagccccagcagagcccagccatcgagcacgggcgacgctctaatgttcttggggataaactccacataaagggaagtagtgtcaaaagcaacaagaaatag

SEQ ID NO: 212112 - DNA, 807 bp, Artificial Sequence
  derived and/or modified sequence
atgttcagaatgctgaacagcagcttcgaggacgaccccttcttcagcgagagcatcctggcccacagagagaacatgagacagatgatcagaagcttcagcgagcccttcggcagagacctgctgagcatcagcgacggcagaggcagagcccacaacagaagaggccacaacgacggcgaggacagcctgacccacaccgacgtgagcagcttccagaccatggaccagatggtgagcaacatgagaaactacatgcagaagctggagagaaacttcggccagctgagcgtggaccccaacggccacagcttctgcagcagcagcgtgatgacctacagcaagatcggcgacgagccccccaaggtgttccaggccagcacccagaccagaagagcccccggcggcatcaaggagaccagaaaggccatgagagacagcgacagcggcctggagaagatggccatcggccaccacatccacgacagagcccacgtgatcaagaagagcaagaacaagaagaccggcgacgaggaggtgaaccaggagttcatcaacatgaacgagagcgacgcccacgccttcgacgaggagtggcagagcgaggtgctgaagtacaagcccggcagacacaacctgggcaacaccagaatgagaagcgtgggccacgagaaccccggcagcagagagctgaagagaagagagaagccccagcagagccccgccatcgagcacggcagaagaagcaacgtgctgggcgacaagctgcacatcaagggcagcagcgtgaagagcaacaagaagtag

SEQ ID NO: 212113 - protein, 595 aa, Artificial Sequence
  derived and/or modified sequence
MKFFSYILVYRRFLFVVFTVLVLLPLPIVLHTKEAECAYTLFVVATFWLTEALPLSVTALLPSLMLPMFGIMPSKKVASAYFKDFHLLLIGVICLATSIEKWNLHKRIALKMVMMVGVNPAWLTLGFMSSTAFLSMWLSNTSTAAMVMPIAEAVVQQIINAEAEVEATQMTYFNGSTNHGLEIDESVNGHEINERKEKTKPVPGYNNDTGKISSKVELEKNSGMRTKYRTKKGHVTRKLTCLCIAYSSTIGGLTTITGTSTNLIFAEYFNTRYPDCRCLNFGSWFTFSFPAALIILLLSWIWLQWLFLGFNFKEMFKCGKTKTVQQKACAEVIKQEYQKLGPIRYQEIVTLVLFIIMALLWFSRDPGFVPGWSALFSEYPGFATDSTVALLIGLLFFLIPAKTLTKTTPTGEIVAFDYSPLITWKEFQSFMPWDIAILVGGGFALADGCEESGLSKWIGNKLSPLGSLPAWLIILISSLMVTSLTEVASNPATITLFLPILSPLAEAIHVNPLYILIPSTLCTSFAFLLPVANPPNAIVFSYGHLKVIDMVKAGLGVNIVGVAVVMLGICTWIVPMFDLYTYPSWAPAMSNETMP

SEQ ID NO: 212114 - DNA, 1788 bp, Artificial Sequence
  derived and/or modified sequence
atgaagttctttagctacatattggtttatcggcggtttttgtttgtcgtcttcactgtgctggtacttcttcctctcccaatagttctccatactaaggaggccgagtgcgcctacacactgttcgtggtcgctacattctggctcaccgaggctctgcccttgtcggttactgcgctattgccgagtctcatgctgccaatgtttggcataatgccaagtaaaaaagtggcatccgcatactttaaagacttccaccttctcctgatcggagttatctgtctggctaccagtatcgagaaatggaaccttcacaaacgtatagctctgaaaatggtaatgatggtaggtgtcaatccagcatggcttaccttaggcttcatgagttcaaccgccttcttgtccatgtggctgtcaaacacctcgacagccgccatggtgatgcctattgccgaggctgtcgtccagcagatcattaatgcagaggccgaagtcgaggcaacccaaatgacctacttcaatgggagcacaaaccatgggctggagatagatgagtccgttaatgggcatgagattaacgagcgtaaagagaaaaccaaaccagtgcctggctacaacaacgacactgggaagatatcgtctaaagtggagctcgagaaaaactccggtatgcgtaccaaataccgcacgaaaaagggacacgtgacacgcaaactcacgtgcctgtgcatcgcctacagtagcaccatagggggactgacgacgattacaggcacaagtactaacctgatctttgccgaatactttaatacccggtaccccgactgccggtgcctgaacttcgggagctggttcactttcagctttcccgcagcgcttattatattgttattgtcctggatatggctccagtggctattcctgggcttcaactttaaggaaatgttcaaatgtgggaaaactaagactgtccagcagaaggcatgtgcagaagtgattaaacaagaatatcagaagctggggcccatccggtatcaggaaattgtcactttggtcctctttatcatcatggcattactctggttcagcagggaccccggattcgtgcctggctggagcgcattattctcagaatatcctggcttcgccacagattcaacagtcgcactgctgatcggcctgctgttcttccttatccccgctaaaactttgactaaaacaactccaacaggggaaatagtcgcgtttgattatagccccctcattacgtggaaagagttccagtccttcatgccctgggacattgcgattttggtcggaggcggttttgctctggcagatggttgtgaggaatccggtttgagcaagtggattggaaacaaacttagtcctctgggctccctgccagcctggctgattatcctcatttcaagcctcatggtgacaagcctcacagaagtggcatccaaccccgccaccatcaccctgtttctccccattctttctccgctggcagaagccatccacgtgaaccccctttacattctcatacccagcacactgtgtacatccttcgcgttcttgctcccagtggctaaccctcccaatgcaattgtgttctcctacggacacctcaaagtgatcgacatggttaaggccggcctcggggttaacatcgtgggcgtggcagtggtcatgctgggaatctgcacgtggattgtgcccatgttcgatctttatacataccccagctgggctcccgcaatgagcaacgaaacgatgccttag

SEQ ID NO: 212115 - DNA, 1788 bp, Artificial Sequence
  derived and/or modified sequence
atgaagttcttctcctacatcctggtgtaccgccgcttcctgtttgtggtgttcaccgtgctggtgctgctgcccctgcccatcgtgctgcacaccaaggaggccgagtgtgcctacaccctgtttgtggtggccaccttctggctgacagaggccctgcccctgtctgtgacagccctgctgcccagcctgatgctgcccatgtttggcatcatgcccagcaagaaggtggccagcgcctacttcaaggacttccacctgctgctgattggagtcatctgcctggccaccagcattgagaagtggaacctgcacaagagaattgccctgaagatggtgatgatggtgggcgtgaacccagcctggctgaccctgggcttcatgagcagcacagccttcctgtccatgtggctgagcaacaccagcacagctgccatggtgatgcccatcgccgaggccgtggtgcagcagatcatcaatgctgaggccgaggtggaggccacccagatgacctacttcaacggcagcaccaaccacggcctggagattgatgagagcgtgaatggccacgagatcaatgaaaggaaggagaagaccaagcctgtgcccggctacaacaatgacaccgggaagatcagcagcaaggtggagctggagaagaacagcggcatgaggaccaagtaccgcaccaagaagggccacgtgaccaggaagctgacctgcctgtgcatcgcctacagcagcaccatcggcggcctgaccaccatcaccggcaccagcaccaacctgatctttgctgagtacttcaacacccgctacccagactgccgctgcctgaactttggctcctggttcaccttctccttccctgctgccctgatcatcctgctgctgtcctggatctggctgcagtggctgttcctgggcttcaacttcaaggagatgtttaaatgtgggaagaccaagacagtgcagcagaaggcctgtgccgaggtgatcaagcaggagtaccagaagctgggccccatccgctaccaggagatcgtgaccctggtgctcttcatcatcatggccctgctgtggttcagccgggaccccggctttgtgcccggctggagcgccctcttcagcgagtacccaggctttgccacagacagcacagtggccctgctgattggcctgctcttcttcctgatcccagccaagaccctgaccaagaccacccccaccggggagatcgtggcctttgactacagccccctcatcacctggaaggagttccagagcttcatgccctgggacatcgccatcctggtgggcggcggctttgccctggctgatggctgtgaggagagcggcctgagcaagtggattggcaacaagctgagccccctgggcagcctgcctgcctggctgatcatcctgatcagcagcctgatggtgaccagcctgacagaggtggccagcaacccagccaccatcaccctcttcctgcccatcctgagccccctggccgaggccatccacgtgaaccccctgtacatcctgatccccagcaccctgtgcaccagctttgccttcctgctgcctgtggccaaccccccaaatgccatcgtgttctcctatggccacctgaaggtgattgacatggtgaaggccggcctgggcgtgaacatcgtgggcgtggccgtggtgatgctgggcatctgcacctggatcgtgcccatgtttgacctgtacacctaccccagctgggccccagccatgagcaatgagaccatgccctag

SEQ ID NO: 212116 - DNA, 1788 bp, Artificial Sequence
  derived and/or modified sequence
atgaagttcttcagctacatcctggtgtaccggcggttcctgttcgtggtctttacagtgctggtccttctgccgctccctatagtgctacatacaaaggaagcagagtgcgcttatacgctctttgtggtcgctacattctggctgacggaggcactgcctctgagcgtcactgcactcctccccagcctgatgcttcccatgttcggaatcatgccgagtaagaaggtggcatccgcatacttcaaagattttcacctgctgctcatcggcgttatctgcttagctacttcaattgaaaagtggaacctccataaaagaatcgcgttgaaaatggttatgatggtaggagtgaacccagcctggctcacactcggcttcatgtcttccaccgcttttctttccatgtggctctccaatacatcaacagcagccatggtcatgcctatagcagaagccgtagtgcagcagataatcaatgcagaggccgaggttgaggccacacagatgacatatttcaatggcagcacaaaccacggcctcgaaatcgatgagtccgtcaacggacacgagataaatgaaaggaaagagaaaaccaagcccgtgccgggctataacaatgacacaggaaagatatccagcaaagtcgagcttgagaaaaattccggcatgcggaccaagtatcggaccaaaaaagggcacgtcacaagaaaactgacctgtttatgcatcgcttattctagtactattggcggccttaccaccatcaccggcacttccacaaacctcatcttcgctgaatactttaacacccgctacccggattgccggtgcctgaattttggaagttggtttacgttcagtttcccggccgcgctcatcattctgttgttaagctggatatggctgcagtggctcttcctggggtttaacttcaaggaaatgttcaaatgcgggaaaaccaagactgtgcagcagaaggcttgcgccgaagtgattaagcaggagtatcagaaactgggcccgattcgctaccaggagatcgttacattggtattgttcattattatggccctgctgtggttctcacgcgatccaggctttgtacccggctggtccgccctgttctccgaatatcctggcttcgccaccgatagcactgtggccctgcttattggattactcttttttttgatcccagccaaaacgctcacgaaaacaacgcctacgggcgagatagtggccttcgactatagtccactgattacatggaaagaatttcagtcttttatgccctgggacatagctattctggtggggggtggcttcgctctggcagatggatgtgaagagtctggcctgtccaaatggatcggaaacaaactctctccattaggatccctgcccgcttggctgattatcttgatctcatctctgatggtcacttcccttacagaagttgcatcaaaccctgcgacaatcaccctgttccttccaatccttagtccactggctgaggcaatccatgttaatcccctctatattctcattccttcgaccctctgcacctcattcgcctttttgcttcccgtagctaatccaccgaatgccatcgtgttctcttacggacatcttaaggttattgatatggtcaaggccggactcggggtgaatatcgtgggcgtcgccgttgtcatgctggggatctgtacttggatagttcctatgttcgacctgtacacctacccctcctgggctccagccatgtctaatgaaactatgccgtag

SEQ ID NO: 212117 - DNA, 1788 bp, Artificial Sequence
  derived and/or modified sequence
atgaagttctttagctatattcttgtatatcgtaggttcttgtttgtggtattcacagttctcgtactactgcccctcccaatagtgctgcatacaaaggaggctgaatgtgcctacaccctattcgtcgtggctactttttggcttacagaggcattgcccctcagcgtcacggcgttgcttccatcgctaatgctgcctatgtttggaattatgccgagtaaaaaggtggcatcagcctatttcaaggactttcatctgttgctgataggcgtgatctgcttagctacttctattgaaaaatggaacctgcacaagaggattgcactgaaaatggtgatgatggtgggtgtcaatcccgcatggctaaccctcgggttcatgtctagtacagcattcctgagtatgtggctgtctaataccagcaccgcggctatggttatgccaatcgccgaagcagtcgtgcaacaaatcattaatgctgaagcagaggtggaagcaacacagatgacctactttaatgggtccaccaaccacgggctggagattgacgagagcgtcaacggacacgaaatcaacgagcgcaaggagaaaaccaagcccgtgccaggctataacaatgatacggggaaaatcagcagcaaggtggagctggaaaaaaatagcggtatgaggaccaagtatcggacaaagaaagggcatgtgacccggaaactcacgtgtctctgtattgcctactcatctacaatcggcggtcttacaacaattaccggcacaagcacgaatctcatttttgccgaatatttcaatacacgttaccccgactgccggtgtctgaattttgggtcatggttcactttcagtttcccagctgctctcattattcttcttctgtcatggatatggctacagtggttgtttctgggttttaacttcaaggagatgtttaaatgtgggaagactaagaccgtgcagcagaaggcatgcgccgaggtgatcaaacaggagtatcagaaacttggccctataagataccaggagatcgtgaccctcgttctctttatcatcatggctttactttggttctccagagaccccggattcgtaccagggtggtccgcacttttttccgagtaccccggatttgccacggactctaccgtcgccctcctgatcggattactcttcttcctgatcccagccaagactctgactaagaccaccccaacaggagaaatagtggcctttgactatagcccattgatcacttggaaggaattccagtcattcatgccttgggacattgccattctggtagggggagggttcgcgttagctgacggatgcgaggaaagcggcctgagtaaatggatcggcaataagctctctcccttaggctcacttcctgcctggcttattatcctgatctcctccttaatggtgacatcgctaacagaagtggcatcaaacccagccactatcactcttttcctccctatcctgtctccgcttgccgaagctattcatgtgaatcccctctacattctgatccccagcaccttgtgcacaagtttcgcctttttactccccgtcgctaaccctccaaatgctatcgtgttctcgtacggtcacctcaaggtgattgatatggtgaaggcaggactgggggttaacattgttggggtggcggtcgtgatgctggggatctgcacctggatcgtcccgatgtttgacctctatacatacccttcttgggccccagctatgagtaacgagacgatgccttag

SEQ ID NO: 212118 - DNA, 3815 bp, Artificial Sequence
  derived and/or modified sequence
tttatttggaggacactattgaagccacctgctcaggacaatgaaattcttcagttacattctggtttatcgccgatttctcttcgtggttttcactgtgttggttttactacctctgcccatcgtcctccacaccaaggaagcagaatgtgcctacacactctttgtggtcgccacattttggctcacagaagcattgcctctgtcggtaacagctttgctacctagtttaatgttacccatgtttgggatcatgccttctaagaaggtggcatctgcttatttcaaggattttcacttactgctaattggagttatctgtttagcaacatccatagaaaaatggaatttgcacaagagaattgctctgaaaatggtgatgatggttggtgtaaatcctgcatggctgacgctggggttcatgagcagcactgcctttttgtctatgtggctcagcaacacctcgacggctgccatggtgatgcccattgcggaggctgtagtgcagcagatcatcaatgcagaagcagaggtcgaggccactcagatgacttacttcaacggatcaaccaaccacggactagaaattgatgaaagtgttaatggacatgaaataaatgagaggaaagagaaaacaaaaccagttccaggatacaataatgatacagggaaaatttcaagcaaggtggagttggaaaagaactcaggcatgagaaccaaatatcgaacaaagaagggccacgtgacacgtaaacttacgtgtttgtgcattgcctactcttctaccattggtggactgacaacaatcactggtacctccaccaacttgatctttgcagagtatttcaatacacgctatcctgactgtcgttgcctcaactttggatcatggtttacgttttccttcccagctgcccttatcattctactcttatcctggatctggcttcagtggcttttcctaggattcaattttaaggagatgttcaaatgtggcaaaaccaaaacagtccaacaaaaagcttgtgctgaggtgattaagcaagaataccaaaagcttgggccaataaggtatcaagaaattgtgaccttggtcctcttcattataatggctctgctatggtttagtcgagaccccggatttgttcctggttggtctgcacttttttcagagtaccctggttttgctacagattcaactgttgctttacttatagggctgctattctttcttatcccagctaagacactgactaaaactacacctacaggagaaattgttgcttttgattactctccactgattacttggaaagaattccagtcattcatgccctgggatatagccattcttgttggtggagggtttgccctggcagatggttgtgaggagtctggattatctaagtggataggaaataaattatctcctctgggttcattaccagcatggctaataattctgatatcttctttgatggtgacatctttaactgaggtagccagcaatccagctaccattacactctttctcccaatattatctccattggccgaagccattcatgtgaaccctctttatattctgataccttctactctgtgtacttcatttgcattcctcctaccagtagcaaatccacccaatgctattgtcttttcatatggtcatctgaaagtcattgacatggttaaagctggacttggtgtcaacattgttggtgttgctgtggttatgcttggcatatgtacttggattgtacccatgtttgacctctacacttacccttcgtgggctcctgctatgagtaatgagaccatgccataataagcacaaaatttctgactatcttgcggtaatttctggaagacattaatgattgactgtaaaatgtggctctaaataactaatgacacacatttaaatcagttatggtgtagctgctgcaattcctgtgaatacccgaaacctgctgttataactcagagtccatatttgttattgcagtgcaactaaagagcatctatgtgccttcatcaagaagcccatgttttgagattttgctcatgaaccatctgcaacttgcttcatcataagaataatttataacttgaccttcaaagagattagagcatttgtttcatcttacagttggagttcaatgtaacattttaaatgcaatttattatttcagaaatttcccatgaaactaaaaatagaaaataagatatacaagttaattcggtacttggataaatcatttctgcattgttgttccagagaatttgctgagaaatcaaagccatggtcatctggtgatgaagagaaaagtttaatctaaatgatatgtgcatttcctcatttaaaaaatccaattggattattcttaatatatacatgtaatatgaaaattgagattgaagcactaattccaaaattatggctgaatatactaaataacagaaaagttacagataagaatttatttctactgaactctatagttagtgtaatataattcatatttttatgatattggcacactgagaaattcattttgtagagctatggataaggcttgctatgatttgcactattagtacagtatagttagaaaggaaagctgaacactataaaactattaacatattttcgtatatgagtaacaactttgcttaagtgtttatcttagttcagaaatacataatgtcatatgttaaaaataaagagatgtagaaatctaaatgaattatcactgtgtatacagacagaaaaatcacataactctggtgtgttaacattgcaatgaaaaaatgaaaaaaagaaggaaaaaagaataagaatgaaaactgctgacgtattacaaaacagaaaaataaatgatttaaaatcaaatcaaaaagaaaaaactaaacatttaaacaaaaatgggataagaatagtcttctagaagtgaggatgcgaaaaagaatgagtttccaattaccctgatgtgacaattacacattgtagacaggtagcaaaatatcacatacacccccaaaatatgtacaaatattatatatcaataaataaatttttaaagagtaagtgctattggcattccaaaattcagctaaaggaaaaatgatcaaaaacaaagtaaggtgcacagttagcaaaagatgcagatgttatatcacagcaattctcatgctaaaaatacaacaaaagacaaagcaaaaaataaacctttgcttttttttttttttttttttttttgagacggagtctcgctctgtcgcccaggctggagtgcagtggcgggatctcggctcactgcaagctccgcctcccaggttcacgccattctcctgcctcagccaaacctttgctatttttaatcttcgttggcactttccagctgttactgaccttgtcattttttattcaaataagattatttacaaacttattcttgaaactaaatatagtaaagagggtttttaaaataatatttaacatacgaattattaattggccatgttcattatttatctatgtttattaatgggccaatgcaaaaaatcattttttcaaagaaaaatttgtccatgtaaagcttaaattataatattgctgctttgtataactcttctatgtttattctattcatttgttcctttccctaccatattttacacatgtatttataatctgtagtatttattacatttctgcttttttctagtcattcaatttatcactgctgaattgcatcagatcatggatgcatttttattatgaaaaaataaaatgacttttcaaattataa

SEQ ID NO: 212119 - DNA, 1788 bp, Artificial Sequence
  derived and/or modified sequence
atgaagttcttcagctacatcctggtgtacagaagattcctgttcgtggtgttcaccgtgctggtgctgctgcccctgcccatcgtgctgcacaccaaggaggccgagtgcgcctacaccctgttcgtggtggccaccttctggctgaccgaggccctgcccctgagcgtgaccgccctgctgcccagcctgatgctgcccatgttcggcatcatgcccagcaagaaggtggccagcgcctacttcaaggacttccacctgctgctgatcggcgtgatctgcctggccaccagcatcgagaagtggaacctgcacaagagaatcgccctgaagatggtgatgatggtgggcgtgaaccccgcctggctgaccctgggcttcatgagcagcaccgccttcctgagcatgtggctgagcaacaccagcaccgccgccatggtgatgcccatcgccgaggccgtggtgcagcagatcatcaacgccgaggccgaggtggaggccacccagatgacctacttcaacggcagcaccaaccacggcctggagatcgacgagagcgtgaacggccacgagatcaacgagagaaaggagaagaccaagcccgtgcccggctacaacaacgacaccggcaagatcagcagcaaggtggagctggagaagaacagcggcatgagaaccaagtacagaaccaagaagggccacgtgaccagaaagctgacctgcctgtgcatcgcctacagcagcaccatcggcggcctgaccaccatcaccggcaccagcaccaacctgatcttcgccgagtacttcaacaccagataccccgactgcagatgcctgaacttcggcagctggttcaccttcagcttccccgccgccctgatcatcctgctgctgagctggatctggctgcagtggctgttcctgggcttcaacttcaaggagatgttcaagtgcggcaagaccaagaccgtgcagcagaaggcctgcgccgaggtgatcaagcaggagtaccagaagctgggccccatcagataccaggagatcgtgaccctggtgctgttcatcatcatggccctgctgtggttcagcagagaccccggcttcgtgcccggctggagcgccctgttcagcgagtaccccggcttcgccaccgacagcaccgtggccctgctgatcggcctgctgttcttcctgatccccgccaagaccctgaccaagaccacccccaccggcgagatcgtggccttcgactacagccccctgatcacctggaaggagttccagagcttcatgccctgggacatcgccatcctggtgggcggcggcttcgccctggccgacggctgcgaggagagcggcctgagcaagtggatcggcaacaagctgagccccctgggcagcctgcccgcctggctgatcatcctgatcagcagcctgatggtgaccagcctgaccgaggtggccagcaaccccgccaccatcaccctgttcctgcccatcctgagccccctggccgaggccatccacgtgaaccccctgtacatcctgatccccagcaccctgtgcaccagcttcgccttcctgctgcccgtggccaacccccccaacgccatcgtgttcagctacggccacctgaaggtgatcgacatggtgaaggccggcctgggcgtgaacatcgtgggcgtggccgtggtgatgctgggcatctgcacctggatcgtgcccatgttcgacctgtacacctaccccagctgggcccccgccatgagcaacgagaccatgccctag

SEQ ID NO: 212120 - protein, 855 aa, Artificial Sequence
  derived and/or modified sequence
MSEARRDSTSSLQRKKPPWLKLDIPSAVPLTAEEPSFLQPLRRQAFLRSVSMPAETAHISSPHHELRRPVLQRQTSITQTIRRGTADWFGVSKDSDSTQKWQRKSIRHCSQRYGKLKPQVLRELDLPSQDNVSLTSTETPPPLYVGPCQLGMQKIIDPLARGRAFRVADDTAEGLSAPHTPVTPGAASLCSFSSSRSGFHRLPRRRKRESVAKMSFRAAAALMKGRSVRDGTFRRAQRRSFTPASFLEEDTTDFPDELDTSFFAREGILHEELSTYPDEVFESPSEAALKDWEKAPEQADLTGGALDRSELERSHLMLPLERGWRKQKEGAAAPQPKVRLRQEVVSTAGPRRGQRIAVPVRKLFAREKRPYGLGMVGRLTNRTYRKRIDSFVKRQIEDMDDHRPFFTYWLTFVHSLVTILAVCIYGIAPVGFSQHETVDSVLRNRGVYENVKYVQQENFWIGPSSEALIHLGAKFSPCMRQDPQVHSFIRSAREREKHSACCVRNDRSGCVQTSEEECSSTLAVWVKWPIHPSAPELAGHKRQFGSVCHQDPRVCDEPSSEDPHEWPEDITKWPICTKNSAGNHTNHPHMDCVITGRPCCIGTKGRCEITSREYCDFMRGYFHEEATLCSQVHCMDDVCGLLPFLNPEVPDQFYRLWLSLFLHAGILHCLVSICFQMTVLRDLEKLAGWHRIAIIYLLSGVTGNLASAIFLPYRAEVGPAGSQFGILACLFVELFQSWQILARPWRAFFKLLAVVLFLFTFGLLPWIDNFAHISGFISGLFLSFAFLPYISFGKFDLYRKRCQIIIFQVVFLGLLAGLVVLFYVYPVRCEWCEFLTCIPFTDKFCEKYELDAQLH

SEQ ID NO: 212121 - protein, 190 aa, Artificial Sequence
  derived and/or modified sequence
MSEARRDSTSSLQRKKPPWLKLDIPSAVPLTAEEPSFLQPLRRQAFLRSVSMPAETAHISSPHHELRRPVLQRQTSITQTIRSSRQVRFGRVHTLPLLGPRAARRAFPQRQSLSWSLLRGTADWFGVSKDSDSTQKWQRKSIRHCSQRYGKLKPQVLRELDLPSQDNVSLTSTETPPPLYVGPCQLGMQK

SEQ ID NO: 212122 - protein, 163 aa, Artificial Sequence
  derived and/or modified sequence
MSEARRDSTSSLQRKKPPWLKLDIPSAVPLTAEEPSFLQPLRRQAFLRSVSMPAETAHISSPHHELRRPVLQRQTSITQTIRRGTADWFGVSKDSDSTQKWQRKSIRHCSQRYGKLKPQVLRELDLPSQDNVSLTSTETPPPLYVGPCQLGMQKIIDPLARGR

SEQ ID NO: 212123 - DNA, 2568 bp, Artificial Sequence
  derived and/or modified sequence
atgtcagaggcaagaagggactctacttcgagcctgcaaagaaaaaaaccgccttggctcaaacttgatataccgtctgctgtgcctttaacagctgaagaaccttcgttcctacagccattgcgacgccaggccttcctgagaagcgtgtcaatgccagcagagaccgcccacattagtagtcctcaccacgaactccgcagacccgtcctgcagcggcagacatctatcacccagacgattcggcgagggacggctgactggtttggcgtgtccaaggattccgattcaacgcagaaatggcagcggaagtcgatccggcattgttcccagagatacggcaaattaaaaccacaagtgttgagagaactggacttaccgtctcaagacaatgtctctctaacctccaccgaaacccccccccccctttatgtgggaccatgccagctggggatgcagaaaatcatcgatcctttagcccgggggcgagcctttcgcgtagcagatgataccgccgagggcctctcggcaccccacacacctgtaacccccggagcggcttcactgtgtagcttctcttcttcaaggtccgggtttcacaggctcccccggcgcagaaaacgggaaagtgttgcaaagatgagttttcgcgcagcagccgctctcatgaaagggagaagcgtgcgcgatggcacattccgtagagcccaacgcaggtcgttcacaccagcgtcatttcttgaggaagacacaactgacttccctgatgagctagacacttctttctttgccagggagggaatcctgcacgaagaactcagtacatatccagacgaagtgtttgagagtccttccgaagccgccttgaaggactgggagaaggcacccgagcaggccgatttaaccggcggcgcattggatcgttcagagctggaacgcagtcatctgatgctgccactggagcgtggatggcgcaagcaaaaagaaggagccgccgccccacaacctaaggtgcgactgaggcaggaagtcgtgtcaacagccggacccagacgcggtcaacgcattgccgtgccagttcgcaagcttttcgccagggagaagcggccctacgggctgggcatggtgggcagattgactaacagaacttataggaaacggatcgatagttttgtgaaaaggcagatcgaggacatggatgaccatagaccgttttttacatattggctcacttttgtccattctctggttactatcctggccgtctgtatttacgggattgccccagtggggttcagccagcacgagacagtggattccgtgttaagaaatagaggagtttatgaaaatgtcaagtacgtgcagcaggagaatttttggatcggccccagtagcgaggctcttattcacctcggcgcgaaattctcgccttgcatgagacaggaccctcaggtgcactcatttataaggtcagccagggaacgtgagaaacacagcgcctgctgcgtgcgcaacgacagaagtggatgcgtgcagacatcggaggaagagtgttcttctactctcgccgtctgggtgaagtggcctattcacccatccgcccccgagctggccgggcataaacgacagtttggcagtgtgtgccaccaggatcctagggtgtgcgatgagccttcctcagaggacccgcacgagtggccagaggacataactaagtggcctatctgcaccaagaactcggcgggcaatcacactaaccatccccatatggactgcgtcattacagggcgcccttgctgcatcggtaccaagggcaggtgcgagattacatccagggaatactgcgatttcatgcgaggttacttccacgaggaagctacattgtgctctcaagtgcattgcatggacgacgtctgtggccttctgcccttcctgaatcctgaagtgcccgatcaattctacaggctgtggctgtccctatttttgcacgccggcatattgcactgcctggtctccatctgctttcagatgacggtgttgagggatctggaaaaactcgccgggtggcaccggatcgccataatctatctcctgagcggcgtgacaggcaacctcgcctcagccatattcctcccctatcgcgcagaagtcgggcccgcgggctcccagttcggcatactcgcctgtctgttcgttgagctgtttcagtcctggcagatcctagcacgcccttggagggcgtttttcaagttgcttgcggtggttctcttcctgtttacctttggactgctgccctggattgataacttcgcccatattagcggcttcatcagcgggttatttttgagcttcgcgttcctcccctatatatcctttggtaagttcgacttgtaccgcaagagatgccagataattatattccaggtagtttttttggggctgttggcgggcctggtcgtcctattctatgtgtacccagtgaggtgcgaatggtgcgagtttctgacttgcatccctttcaccgacaaattctgcgagaagtacgagttagatgctcagctgcattag

SEQ ID NO: 212124 - DNA, 1740 bp, Artificial Sequence
  derived and/or modified sequence
atgtcagaggcccggcgggattctactagcagtttacaacgcaagaagcctccctggctcaagctggacataccttcagccgtgccactgacggcagaagagccgagctttctgcagcccctcagacggcaggcatttttgaggtccgtcagtatgccagcagaaacggcacacatttcaagcccccatcatgagctgagacggccagtgttacagagacagacatcaattacacaaactatccgccgggggaccgctgactggtttggtgtgtccaaggactcagactctacacagaagtggcagcggaagagcataaggcactgcagtcaacgatatgggaaattaaaaccccaggtccttcgcgaactcgatctgccctcacaggacaatgtgagtctaacgagtacggaaacgccaccacccctgtacgttggcccatgccaactcgggatgcagaaaattatcgatcccctagctagaggcagggcatttagagtggccgacgataccgccgaaggccttagtgctccgcacaccccagtgacccccggggctgcaagcctgtgttccttttccagtagtaggtctggatttcaccgactccctcggcggcgcaagcgagagtcagtggcaaagatgtctttccgcgccgccgctgctctgatgaaaggtcgctctgtgcgtgatgggacctttcgaagggcccagcgtcggagctttacaccagcctcctttctggaggaggacacaaccgacttcccggatgagctggacacttcatttttcgcgcgagaaggaattttgcacgaagagctcagtacttacccggacgaagtattcgagagccctagcgaggctgctctgaaggactgggaaaaggcccctgagcaggcagatctcactgggggcgcactcgacagaagtgagttggagagaagtcacctaatgctgccccttgagcgagggtggcgaaaacaaaaggaaggggcagcggccccccaaccaaaggtgagactacgacaggaggtggtgtcaaccgcagggccacgccgcggtcagaggattgctgtgcccgtaagaaaactttttgcgcgggaaaaaagaccctatggtcttgggatggtgggtaggcttacaaaccgaacctatcgtaagcgcattgattcatttgtgaagagacagatcgaggacatggatgatcatcgacccttttttacctattggctgacatttgtccactctctggtcacgattcttgctgtctgcatctacggtatagcgcctgtgggcttctcacagcacgaaacagtggactccgtgttgcgaaatcggggtgtctacgagaacgtgaagtacgttcagcaggaaaatttttggataggtcccagtagcgtgcggactggacttggggctgggccagccggggccggcccaggaggagcaagacgggggcaggaagcaccggattgtgggcgcagttctccaagccccgcaggcggtccccatcctccgggccggcaggtgtttgctctccatgcgccgggacccgcgggcgcccaactccatagtttgggggcaagggcccgtgaggctctcagacttctgcgggcccaaaggcaagttggcctcagagctgacctgggggggggcgtcctgggagctttcccccggccgggtctgccacccagttcagcccggtgctcattgttccgacctcagattgattccgcagaatag

SEQ ID NO: 212125 - DNA, 2568 bp, Artificial Sequence
  derived and/or modified sequence
atgtctgaggcccggcgggacagcaccagcagcctgcagaggaagaagccaccctggctgaagctggacatccccagcgctgtgcccctgacagctgaggagcccagcttcctgcagcccctgcggcggcaggccttcctgcggtctgtgtccatgcctgctgagacagcccacatcagcagcccccaccacgagctgcggcggcctgtgctgcagaggcagaccagcatcacccagaccatccggcggggcacagctgactggtttggagtgtccaaggacagcgacagcacccagaagtggcagaggaagagcatccgccactgcagccagagatatggcaagctgaagccccaggtgctgcgggagctggacctgcccagccaggacaacgtgtccctgaccagcacagagaccccaccacccctgtatgtgggcccctgccagctgggcatgcagaagatcatcgaccccctggcccggggccgggccttccgggtggctgatgacacagctgagggcctgagcgccccccacacccctgtgacccctggggccgccagcctgtgcagcttcagcagcagccgcagcggcttccaccggctgcccaggaggaggaagcgggagagcgtggccaagatgtccttccgggctgctgctgccctgatgaagggccgctctgtgagagatggcaccttccggcgggcccagaggaggagcttcaccccagccagcttcctggaggaggacaccacagacttcccagatgagctggacaccagcttctttgcccgggagggcatcctgcacgaggagctgagcacctacccagatgaggtgtttgagagccccagcgaggccgccctgaaggactgggagaaggcccctgagcaggccgacctgaccggcggggccctggacagaagtgagctggagaggagccacctgatgctgcccctggagcggggctggaggaagcagaaggagggcgccgccgccccccagcccaaggtgcggctgcggcaggaggtggtgtccacagctggcccccggcggggccagagaattgctgtgcctgtgaggaagctgtttgcccgggagaagaggccctacggcctgggcatggtgggccgcctgaccaacagaacctacaggaagagaattgacagctttgtgaagaggcagatcgaggacatggatgaccaccggcccttcttcacctactggctgacctttgtgcacagcctggtgaccatcctggccgtgtgcatctatggaattgcccctgtgggcttcagccagcatgaaacagtggacagcgtgctgaggaacagaggagtgtatgaaaatgtgaagtatgtgcagcaggagaacttctggattggccccagcagcgaggccctgatccacctgggcgccaagttcagcccctgcatgaggcaggacccccaggtgcacagcttcatccgcagcgcccgggagcgggagaagcacagcgcctgctgcgtgagaaatgacaggagcggctgtgtgcagaccagcgaggaggagtgcagcagcaccctggccgtgtgggtgaagtggcccatccaccccagcgcccctgagctggccggccacaagaggcagtttggatctgtgtgccaccaggacccccgggtgtgtgatgagcccagcagcgaggacccccatgagtggccagaggacatcaccaagtggcccatctgcaccaagaacagcgctggcaaccacaccaaccacccccacatggactgtgtgatcaccggccggccctgctgcatcggcaccaagggccgctgtgagatcaccagccgggagtactgtgacttcatgaggggctacttccacgaggaggccaccctgtgcagccaggtgcactgcatggatgatgtgtgtggcctgctgcccttcctgaaccctgaggtgcctgaccagttctaccgcctgtggctgagcctcttcctgcacgccggcatcctgcactgcctggtgtccatctgcttccagatgacagtgctgcgggacctggagaagctggccggctggcaccgcatcgccatcatctacctgctgtctggagtgacaggcaacctggccagcgccatcttcctgccctacagagctgaggtgggccctgctggcagccagtttggcatcctggcctgcctgtttgtggagctgttccagagctggcagatcctggcccggccctggagggccttcttcaagctgctggccgtggtgctcttcctgttcaccttcggcctgctgccctggattgacaactttgcccacatcagcggcttcatcagcggcctcttcctgagctttgccttcctgccctacatcagctttgggaagtttgacctgtacaggaagcgctgccagatcatcatcttccaggtggtgttcctgggcctgctggccggcctggtggtgctcttctacgtgtaccctgtgcgctgtgagtggtgtgagttcctgacctgcatccccttcacagacaagttctgtgagaagtatgagctggatgcccagctgcactag

SEQ ID NO: 212126 - DNA, 1740 bp, Artificial Sequence
  derived and/or modified sequence
atgtctgaggcccggcgggacagcaccagcagcctgcagaggaagaagccaccctggctgaagctggacatccccagcgctgtgcccctgacagctgaggagcccagcttcctgcagcccctgcggcggcaggccttcctgcggtctgtgtccatgcctgctgagacagcccacatcagcagcccccaccacgagctgcggcggcctgtgctgcagaggcagaccagcatcacccagaccatccggcggggcacagctgactggtttggagtgtccaaggacagcgacagcacccagaagtggcagaggaagagcatccgccactgcagccagagatatggcaagctgaagccccaggtgctgcgggagctggacctgcccagccaggacaacgtgtccctgaccagcacagagaccccaccacccctgtatgtgggcccctgccagctgggcatgcagaagatcatcgaccccctggcccggggccgggccttccgggtggctgatgacacagctgagggcctgagcgccccccacacccctgtgacccctggggccgccagcctgtgcagcttcagcagcagccgcagcggcttccaccggctgcccaggaggaggaagcgggagagcgtggccaagatgtccttccgggctgctgctgccctgatgaagggccgctctgtgagagatggcaccttccggcgggcccagaggaggagcttcaccccagccagcttcctggaggaggacaccacagacttcccagatgagctggacaccagcttctttgcccgggagggcatcctgcacgaggagctgagcacctacccagatgaggtgtttgagagccccagcgaggccgccctgaaggactgggagaaggcccctgagcaggccgacctgaccggcggggccctggacagaagtgagctggagaggagccacctgatgctgcccctggagcggggctggaggaagcagaaggagggcgccgccgccccccagcccaaggtgcggctgcggcaggaggtggtgtccacagctggcccccggcggggccagagaattgctgtgcctgtgaggaagctgtttgcccgggagaagaggccctacggcctgggcatggtgggccgcctgaccaacagaacctacaggaagagaattgacagctttgtgaagaggcagatcgaggacatggatgaccaccggcccttcttcacctactggctgacctttgtgcacagcctggtgaccatcctggccgtgtgcatctatggaattgcccctgtgggcttcagccagcatgaaacagtggacagcgtgctgaggaacagaggagtgtatgaaaatgtgaagtatgtgcagcaggagaacttctggattggccccagctctgtgaggacaggcctgggcgccggccctgctggagctggccctggaggagcccggcggggccaggaggccccagactgtggccgcagcagccccagccctgctgggggcccccaccccccaggccggcaggtgtttgccctgcacgcccctggccctgctggggcccagctgcacagcctgggcgcccgggcccgggaggccctgcggctgctgcgggcccagaggcaggtgggcctgcgggctgacctgggcggcggcgtgctgggcgccttccccaggcctggcctgccccccagcagcgcccgctgcagcctcttccggccccagattgattctgctgagtag

SEQ ID NO: 212127 - DNA, 2568 bp, Artificial Sequence
  derived and/or modified sequence
atgagcgaggcccggcgggacagcaccagcagcctgcagcggaagaaacctccttggctgaagctagacatcccctctgctgtccccctgactgccgaggaaccatcttttctccagcctctgaggcgtcaggctttcctgcgcagtgtatccatgcctgctgagacagcccacatcagttctccccaccacgaactgcggcggcccgtgctgcagcgacagaccagtatcactcagaccatcaggaggggaaccgctgattggtttggcgtgtcaaaagacagcgacagtacccagaaatggcagagaaagtccatcaggcactgttctcaacggtacgggaaactgaaaccacaggtgctgagggagctggacttgccgtcccaggataatgtctcgctcacttcaacggagacacctccccctttgtatgtggggccttgccaactcggcatgcagaagattattgatcctctagcaagaggtcgcgccttcagggtcgccgacgatacagctgaggggctcagtgcgccccatacgccagttacacctggcgccgcaagcctctgttcattttctagctccagatccggtttccatcggctgccaaggcgcagaaagagagagagtgtcgctaagatgtcatttagggctgctgccgcactaatgaaaggcaggtccgtgcgagatgggacctttcggcgggctcagcgtcgatccttcactcccgcatctttcctggaggaggataccacagattttcctgatgagctcgacacctcgttcttcgctcgcgaaggaatactgcatgaagagctcagcacataccctgacgaagtgtttgagtctccttcagaagccgcattgaaagactgggaaaaagcccctgaacaggccgaccttaccggtggtgcactggatagatctgagttagagcgtagccatctgatgcttccacttgagagggggtggcgaaagcaaaaagaaggcgcagctgccccccagccaaaggtgagactaagacaggaagtggtgagtacagcagggcccaggcgtggacaaagaattgccgtaccggtgcgcaagctgttcgcaagggagaagcgaccctacggactaggcatggttgggaggctgaccaataggacttatcgcaagagaatcgactctttcgtgaagaggcaaatcgaggacatggacgaccatagaccttttttcacctactggttgacattcgttcactcgcttgtaacgattctggccgtttgcatctatggaatcgcaccagtgggcttttcgcagcatgaaacagtcgacagcgtgctgagaaaccgaggagtgtacgagaacgtgaagtatgtccaacaggaaaatttctggattggtccgagttctgaggcgctgattcatctcggggccaagttttctccctgtatgcgtcaggatccgcaggtccactcatttatcaggagcgcacgggaaagggagaaacactctgcatgctgtgtcaggaatgacagatctggctgtgtgcaaaccagtgaggaagagtgttcctcgacgttagctgtctgggtgaaatggcctatccaccccagcgccccggaacttgctggccacaaacgtcagttcggctcggtgtgccaccaggacccgcgcgtttgcgatgagccttcctccgaagatccacatgagtggcccgaggacatcacaaagtggcctatttgcacaaagaatagcgccggaaatcataccaaccacccacatatggattgcgtgatcaccggccgaccatgctgcatcggcactaaagggagatgcgagatcacctcccgtgaatattgtgatttcatgcgcggctatttccacgaggaggccaccctctgttctcaggtccattgtatggacgacgtttgtggcctgctgccctttcttaacccagaggttccggaccaattttaccgtctgtggctttcattgttcctgcatgccggaatcttgcattgccttgtcagtatctgtttccaaatgacagtactgagggaccttgagaagctggctgggtggcaccggattgccattatttatctcctgtctggtgtcaccggaaatcttgcgagcgccatttttctgccctacagggctgaagtgggtccggccggatcacagtttggcatcttggcgtgcctgtttgtagagctgtttcaatcctggcagatcctcgctaggccatggagagccttctttaaacttctggctgtggtgctgtttctattcacctttgggctcttgccatggatcgacaactttgcccatatctctggctttatttctggattatttctttctttcgctttcctgccttacatctctttcgggaaatttgacctttaccgaaagcggtgccagatcattatcttccaagtggtgttcctggggcttttagccgggttggtggttctgttttatgtttaccctgtgagatgcgagtggtgcgaattcctgacttgtatcccattcaccgacaaattttgtgagaagtatgaattggatgcacaactgcattag

SEQ ID NO: 212128 - DNA, 1740 bp, Artificial Sequence
  derived and/or modified sequence
atgagcgaggcccggcgggacagcaccagcagcctgcagcggaagaagcccccttggcttaaattagacataccatcagcagttcccctgacggctgaggagccgagctttctccagcctctgcgaagacaggcttttctcagaagcgtatccatgcccgcggaaacagctcacatttcatcaccacaccacgagctaagacgccctgtactgcaaagacagacgagcattacacagacgatccggcggggcaccgcagattggttcggggtgtccaaagactccgatagcacacagaagtggcagcgcaagtccatacgccactgctcgcaacggtatggaaagctgaagccacaggtcctgcgcgagctcgatttgcctagtcaagataacgtaagtctcacctccaccgagaccccgccccccttatatgttggaccctgccagctaggcatgcagaaaatcatagatccactggctcgtggaagggcctttagggtagccgatgacactgcggagggtcttagcgcccctcacacacctgtcacgcccggtgcagcaagcctgtgcagcttttccagctctagatccggcttccaccgcttacctcggcgacgcaagcgcgagagcgtcgcgaagatgagtttcagggctgccgctgctcttatgaaggggagaagcgtccgggacgggacatttaggcgggcacagaggagatctttcacccccgcttcctttctggaagaggacacgacggacttccccgatgagttggacacttctttttttgctagagagggaattctgcatgaagaactgtccacgtaccctgatgaagtcttcgagtcacccagtgaggccgccttgaaggattgggagaaagcacccgaacaggctgatctgaccggcggcgctctggatcggtccgaattagaaaggagtcatcttatgctgcctctcgaacgcggctggagaaaacagaaggaaggcgctgctgcccctcagcccaaagtgagactgaggcaagaggttgtgtccactgctggccctaggcggggtcagcgaattgcagtgcccgttagaaagttgttcgctcgcgaaaaacgaccgtacgggttaggcatggtcggaaggctcactaaccgtacttatcggaaaagaatcgattctttcgtgaaacgtcagattgaagacatggatgatcataggcccttcttcacatattggctgacctttgtccactcgctggtcaccatccttgccgtatgcatttatggcatcgctcccgtcggcttttcgcaacatgagaccgtggactccgtcctgaggaatcgcggcgtctacgagaatgtgaagtacgtgcaacaggagaatttctggatcggtcctagctcagtgaggaccggccttggagctgggccagccggggcaggtccggggggggcacgccgtgggcaggaggcgccagactgcgggcgcagtagccccagtcctgcaggtggcccccaccccccaggtcgtcaggtctttgcccttcacgcaccggggccggctggagctcagctgcactcacttggcgccagggccagagaggcactgcgccttctccgggctcagcgccaggtgggcctcagggctgacctgggcggaggggtattaggggctttccctaggccaggacttcccccgtcttctgcccggtgtagcctttttcgaccccagattgattccgccgaatag

SEQ ID NO: 212129 - DNA, 2568 bp, Artificial Sequence
  derived and/or modified sequence
atgagtgaggccagaagggattctacctcatcgttacaacggaaaaagccaccatggctgaaactggacatcccctctgcagtccctctcaccgccgaggagccgtcttttttgcagcccttgcggaggcaagccttcctccgatctgtgtcgatgccagcggaaactgcccacatcagcagcccccatcatgaacttaggcggcctgttctgcagcgtcagacttctatcacccaaaccatacgccgtggcacggccgactggttcggggtgagcaaagacagcgacagtactcagaaatggcagaggaaatctattcgacattgtagtcaaaggtacgggaaactaaaaccccaggtgctccgagagctcgatctgcccagtcaggacaatgtgagcctgacctctactgaaacccctcctcccctgtacgtcgggccttgccagctggggatgcagaaaattatagaccctctagcgagaggccgagcctttagagtggctgatgacaccgcggaggggctaagcgccccacacactcccgtcacaccaggagccgcttctctgtgttccttttcttcaagtcgttccggtttccacaggcttcctcgccgacggaaaagagagtccgtcgcaaagatgtccttccgcgctgccgctgcgcttatgaaaggtagaagcgtaagggacggtaccttccgacgtgcacaacggcgttcatttaccccagcgagctttctggaagaagataccacagacttcccggacgagttggatacctctttttttgcccgagagggcatactgcacgaggagttgtccacctaccctgatgaggtgttcgaaagccccagtgaagccgctctgaaagactgggaaaaagctccagagcaggctgatctgacaggtggagctcttgacaggagcgagcttgagagaagccatctgatgctccccttggaaagagggtggcgcaaacaaaaggagggggctgcagcgccacaaccaaaggtgcggctgaggcaggaagtggtttccactgctggcccaaggcgcggacagaggatcgctgtgcctgtgaggaaacttttcgcacgggaaaaaagaccctacgggcttggaatggttggccgtctgaccaaccgcacctaccgcaaacggattgacagcttcgtgaagcggcagattgaagatatggatgatcacaggccctttttcacctactggttgacatttgtacatagtctggtgactattctggccgtatgtatctacggaatcgctccggttggtttttcacaacacgagactgtcgatagtgtgttgcgcaaccggggagtgtatgaaaacgtcaagtacgtacaacaggaaaacttctggatcggtcctagtagtgaggcactgatacacctgggcgctaaattcagcccatgcatgcgtcaggacccccaggtgcacagctttatacgctcagccagggaaagagagaaacacagtgcttgttgcgtgagaaatgataggagcgggtgcgtgcagacatctgaggaagagtgctccagtactctcgcggtctgggttaagtggcctattcaccctagcgcgcctgagctggcgggtcataagaggcagttcggtagtgtttgccaccaggaccccagagtgtgtgatgaaccgtcttccgaagatcctcatgagtggccagaggacatcactaagtggccgatctgcaccaagaattcagctggaaaccacaccaatcacccacacatggattgcgtcatcactgggaggccttgttgcattggcacgaaaggacgatgtgaaataacatcaagagaatattgcgatttcatgaggggttacttccacgaagaggccacattgtgttctcaggtacactgcatggatgacgtgtgcggcctcctgccttttctcaaccctgaagtgcccgaccaattttatcgattgtggctctctctctttctgcacgctgggattctgcactgtctcgtttcaatatgctttcaaatgacagtcctccgcgacctcgagaaactcgctgggtggcaccggattgcgataatttacctcctgagtggagtgacggggaacctggcttccgcgatttttctcccataccgggcagaggtaggacccgctggcagccagtttggtatccttgcctgcttgtttgttgagctgtttcagtcgtggcagatactcgccaggccttggagggctttcttcaagcttttagctgtggtactgttcctgttcacatttggcttgctgccttggattgataactttgcccatatttctgggtttattagtgggttgtttctgtccttcgccttcttgccctacatatcattcgggaagttcgacctctacagaaaaagatgccagataatcatcttccaggtcgtattcttgggactcttggctggcctcgtggtcctgttttatgtctaccccgtgagatgcgagtggtgcgaatttcttacctgcatcccgtttacagacaaattttgtgagaagtatgaactggacgcccaattacactag

SEQ ID NO: 212130 - DNA, 1740 bp, Artificial Sequence
  derived and/or modified sequence
atgtctgaggcacggagagatagcaccagctcactccaaagaaagaaacccccttggctgaagctcgacatccctagcgcagtgccgctaactgcggaagaacccagctttttgcagccactgcgcagacaggcctttctccggtccgtttctatgcctgccgagacagcccatatctctagcccgcatcacgaactcagacgacctgtcctgcagaggcagacatcgataacccagaccatccggagagggaccgccgattggtttggagtgtccaaagatagtgattctacccagaagtggcaacgcaaatccatacggcattgcagtcaaagatatggcaagctcaagccccaggtactgagggagctcgacttacctagtcaggataacgtgagcctgacaagcacagaaactcctccccctctgtacgtcggaccctgccagctgggtatgcagaaaatcatcgatcccttagcgagaggaagagctttcagagtggccgacgacacagcagagggcttgtcagcccctcataccccagtgacccctggtgcagcaagcctatgcagctttagctcatcacgaagcggattccatagactccccaggcggaggaaaagagaatccgtcgcgaagatgagtttccgcgctgctgcagccttgatgaaaggtaggtcagtcagggacggaacatttagaagggctcagaggaggtccttcactccggcatcattcctggaggaagacaccaccgatttcccagacgagctcgacacctctttttttgcgagggagggcattctccacgaggaactgagcacttatccagacgaggtcttcgagagccctagtgaggccgctttgaaggattgggaaaaggcaccagagcaagccgaccttactggcggtgccctggatcgatctgagctggagcggtcacatctgatgctcccgttagaaagagggtggcggaaacagaaggagggagcagcggctccacagccaaaagttaggctgaggcaggaagtagtgagtaccgcaggccctagacggggtcaacgcatagctgtcccagttcgcaagcttttcgcaagagaaaagagaccttacgggctgggcatggtggggaggcttacaaatcgcacgtaccgaaagcgcatagactcgttcgtgaaaaggcagatcgaggatatggatgatcataggccgtttttcacttattggctcacctttgtacactccctcgtgacaatcttggccgtgtgcatctacgggatcgcgccagtgggtttctctcaacatgagacagtggacagtgtactcagaaatcgaggggtctacgagaatgtgaaatacgtgcagcaggagaatttctggatcgggccatcatctgtcagaacaggcttgggagccggaccagccggtgccggacctgggggagctcgcagaggacaggaggctccggactgcggtcgttcttctcccagtcccgcaggtgggccacacccacctggaagacaggtgtttgcattgcacgcgccaggaccagccggtgctcaactccactccctgggggcacgagctcgtgaggccttaaggctactgagagcccagaggcaggtcgggcttagagcggacctgggcggtggcgtgctcggggctttccccaggcctggactcccaccctcaagcgccagatgtagcctcttccggcctcagattgattccgcagagtag

SEQ ID NO: 212131 - DNA, 2992 bp, Artificial Sequence
  derived and/or modified sequence
gcattcccgggcgggccggaccggcgggcgggcggggactcggcgcgggccctcccggccagcggcggcagcctcctccccggcgccctcaggaccccccagagcccccggcggcggcagcctgccttgctctgccaggaaccatgagtgaggcccgcagggacagcacgagcagcctgcagcgcaagaagccaccctggctaaagctggacattccctctgcggtgcccctgacggcagaagagcccagcttcctgcagcccctgaggcgacaggctttcctgaggagtgtgagtatgccagccgagacagcccacatctcttcaccccaccatgagctccggcggccggtgctgcaacgccagacgtccatcacacagaccatccgcagggggaccgccgactggtttggagtgagcaaggacagtgacagcacccagaaatggcagcgcaagagcatccgtcactgcagccagcgctacgggaagctgaagccccaggtcctccgggagctggacctgcccagccaggacaacgtgtcgctgaccagcaccgagacgccacccccactctacgtggggccatgccagctgggcatgcagaagatcatagaccccctggcccgtggccgtgccttccgtgtggcagatgacactgcggaaggcctgagtgccccacacactcccgtcacgccgggtgctgcctccctctgctccttctccagctcccgctcaggtttccaccggctcccgcggcggcgcaagcgagagtcggtggccaagatgagcttccgggcggccgcagcgctgatgaaaggccgctccgttagggatggcacctttcgccgggcacagcgtcgaagcttcactccagctagctttctggaggaggacacaactgatttccccgatgagctggacacatccttctttgcccgggaaggtatcctccatgaagagctgtccacatacccggatgaagttttcgagtccccatcggaggcagcgctaaaggactgggagaaggcaccggagcaggcggacctcaccggcggggccctggaccgcagcgagcttgagcgcagccacctgatgctgcccttggagcgaggctggcggaagcagaaggagggcgccgcagccccgcagcccaaggtgcggctccgacaggaggtggtgagcaccgcggggccgcgacggggccagcgtatcgcggtgccggtgcgcaagctcttcgcccgggagaagcggccgtatgggctgggcatggtgggacggctcaccaaccgcacctaccgcaagcgcatcgacagcttcgtcaagcgccagatcgaggacatggacgaccacaggcccttcttcacctactggcttaccttcgtgcactcgctcgtcaccatcctagccgtgtgcatctatggcatcgcgcccgtgggcttctcgcagcatgagacggtggactcggtgctgcggaaccgcggggtctacgagaacgtcaagtacgtgcagcaggagaacttctggatcgggcccagctcggaggccctcatccacctgggcgccaagttttcgccctgcatgcgccaggacccgcaggtgcacagcttcattcgctcggcgcgcgagcgcgagaagcactccgcctgctgcgtgcgcaacgacaggtcgggctgcgtgcagacctcggaggaggagtgctcgtccacgctggcagtgtgggtgaagtggcccatccatcccagcgccccagagcttgcgggccacaagagacagtttggctctgtctgccaccaggatcccagggtgtgtgatgagccctcctccgaagaccctcatgagtggccagaagacatcaccaagtggccgatctgcaccaaaaacagcgctgggaaccacaccaaccatccccacatggactgtgtcatcacaggacggccctgctgcattggcaccaagggcaggtgtgagatcacctcccgggagtactgtgacttcatgaggggctacttccatgaggaggccacgctctgctctcaggtgcactgcatggatgatgtgtgtgggctcctgccttttctcaaccccgaggtgcctgaccagttctaccgcctgtggctatccctcttcctgcacgccgggatcttgcactgcctggtgtccatctgcttccagatgactgtcctgcgggacctggagaagctggcaggctggcaccgcatagccatcatctacctgctgagtggtgtcaccggcaacctggccagtgccatcttcctgccataccgagcagaggtgggtcctgctggctcccagttcggcatcctggcctgcctcttcgtggagctcttccagagctggcagatcctggcgcggccctggcgtgccttcttcaagctgctggctgtggtgctcttcctcttcacctttgggctgctgccgtggattgacaactttgcccacatctcagggttcatcagtggcctcttcctctccttcgccttcttgccctacatcagctttggcaagttcgacctgtaccggaaacgctgccagatcatcatctttcaggtggtcttcctgggcctcctggctggcctggtggtcctcttctacgtctatcctgtccgctgtgagtggtgtgagttcctcacctgcatccccttcactgacaagttctgtgagaagtacgaactggacgctcagctccactgagctggctgcgggctccagcggccgtgtgctccagcaggccagagccagacacgacctccctgagcctcacaggcttacaggagtcacctgctccatgtggggactggcctgtttcctgaacacagacctctttcttgtgccttgttcacttctgttgaacccctcgtactgccgggcatttattatactacttcctgtcataaccttctaacttgtttcttgacgaccacctcatgtggccaataaatggactgggagcgttttagctgccattaacttga

SEQ ID NO: 212132 - DNA, 1871 bp, Artificial Sequence
  derived and/or modified sequence
atgctcccaccacaggctggaagcggtgggatgagagttccaactgtggcctgcagagtgggctggcgggctggtccaggacaagagaaagtggtgccaggcctgccttgctctgccaggaaccatgagtgaggcccgcagggacagcacgagcagcctgcagcgcaagaagccaccctggctaaagctggacattccctctgcggtgcccctgacggcagaagagcccagcttcctgcagcccctgaggcgacaggctttcctgaggagtgtgagtatgccagccgagacagcccacatctcttcaccccaccatgagctccggcggccggtgctgcaacgccagacgtccatcacacagaccatccgcagggggaccgccgactggtttggagtgagcaaggacagtgacagcacccagaaatggcagcgcaagagcatccgtcactgcagccagcgctacgggaagctgaagccccaggtcctccgggagctggacctgcccagccaggacaacgtgtcgctgaccagcaccgagacgccacccccactctacgtggggccatgccagctgggcatgcagaagatcatagaccccctggcccgtggccgtgccttccgtgtggcagatgacactgcggaaggcctgagtgccccacacactcccgtcacgccgggtgctgcctccctctgctccttctccagctcccgctcaggtttccaccggctcccgcggcggcgcaagcgagagtcggtggccaagatgagcttccgggcggccgcagcgctgatgaaaggccgctccgttagggatggcacctttcgccgggcacagcgtcgaagcttcactccagctagctttctggaggaggacacaactgatttccccgatgagctggacacatccttctttgcccgggaaggtatcctccatgaagagctgtccacatacccggatgaagttttcgagtccccatcggaggcagcgctaaaggactgggagaaggcaccggagcaggcggacctcaccggcggggccctggaccgcagcgagcttgagcgcagccacctgatgctgcccttggagcgaggctggcggaagcagaaggagggcgccgcagccccgcagcccaaggtgcggctccgacaggaggtggtgagcaccgcggggccgcgacggggccagcgtatcgcggtgccggtgcgcaagctcttcgcccgggagaagcggccgtatgggctgggcatggtgggacggctcaccaaccgcacctaccgcaagcgcatcgacagcttcgtcaagcgccagatcgaggacatggacgaccacaggcccttcttcacctactggcttaccttcgtgcactcgctcgtcaccatcctagccgtgtgcatctatggcatcgcgcccgtgggcttctcgcagcatgagacggtggactcggtgctgcggaaccgcggggtctacgagaacgtcaagtacgtgcagcaggagaacttctggatcgggcccagctcggtgaggacggggctgggggcggggccggcgggggcgggacctggaggtgcccggcgggggcaggaggccccggactgcggccgctcgtctccctcgcccgcaggaggccctcatccacctgggcgccaagttttcgccctgcatgcgccaggacccgcaggtgcacagcttcattcgctcggcgcgcgagcgcgagaagcactccgcctgctgcgtgcgcaacgacaggtcgggctgcgtgcagacctcggaggaggagtgctcggtgcgtttccccgcccgggactcccgccttcgtctgcccggtgttcgctcttcagacctcagatagactcggcagagtgatccttcg

SEQ ID NO: 212133 - DNA, 2568 bp, Artificial Sequence
  derived and/or modified sequence
atgagcgaggccagaagagacagcaccagcagcctgcagagaaagaagcccccctggctgaagctggacatccccagcgccgtgcccctgaccgccgaggagcccagcttcctgcagcccctgagaagacaggccttcctgagaagcgtgagcatgcccgccgagaccgcccacatcagcagcccccaccacgagctgagaagacccgtgctgcagagacagaccagcatcacccagaccatcagaagaggcaccgccgactggttcggcgtgagcaaggacagcgacagcacccagaagtggcagagaaagagcatcagacactgcagccagagatacggcaagctgaagccccaggtgctgagagagctggacctgcccagccaggacaacgtgagcctgaccagcaccgagacccccccccccctgtacgtgggcccctgccagctgggcatgcagaagatcatcgaccccctggccagaggcagagccttcagagtggccgacgacaccgccgagggcctgagcgccccccacacccccgtgacccccggcgccgccagcctgtgcagcttcagcagcagcagaagcggcttccacagactgcccagaagaagaaagagagagagcgtggccaagatgagcttcagagccgccgccgccctgatgaagggcagaagcgtgagagacggcaccttcagaagagcccagagaagaagcttcacccccgccagcttcctggaggaggacaccaccgacttccccgacgagctggacaccagcttcttcgccagagagggcatcctgcacgaggagctgagcacctaccccgacgaggtgttcgagagccccagcgaggccgccctgaaggactgggagaaggcccccgagcaggccgacctgaccggcggcgccctggacagaagcgagctggagagaagccacctgatgctgcccctggagagaggctggagaaagcagaaggagggcgccgccgccccccagcccaaggtgagactgagacaggaggtggtgagcaccgccggccccagaagaggccagagaatcgccgtgcccgtgagaaagctgttcgccagagagaagagaccctacggcctgggcatggtgggcagactgaccaacagaacctacagaaagagaatcgacagcttcgtgaagagacagatcgaggacatggacgaccacagacccttcttcacctactggctgaccttcgtgcacagcctggtgaccatcctggccgtgtgcatctacggcatcgcccccgtgggcttcagccagcacgagaccgtggacagcgtgctgagaaacagaggcgtgtacgagaacgtgaagtacgtgcagcaggagaacttctggatcggccccagcagcgaggccctgatccacctgggcgccaagttcagcccctgcatgagacaggacccccaggtgcacagcttcatcagaagcgccagagagagagagaagcacagcgcctgctgcgtgagaaacgacagaagcggctgcgtgcagaccagcgaggaggagtgcagcagcaccctggccgtgtgggtgaagtggcccatccaccccagcgcccccgagctggccggccacaagagacagttcggcagcgtgtgccaccaggaccccagagtgtgcgacgagcccagcagcgaggacccccacgagtggcccgaggacatcaccaagtggcccatctgcaccaagaacagcgccggcaaccacaccaaccacccccacatggactgcgtgatcaccggcagaccctgctgcatcggcaccaagggcagatgcgagatcaccagcagagagtactgcgacttcatgagaggctacttccacgaggaggccaccctgtgcagccaggtgcactgcatggacgacgtgtgcggcctgctgcccttcctgaaccccgaggtgcccgaccagttctacagactgtggctgagcctgttcctgcacgccggcatcctgcactgcctggtgagcatctgcttccagatgaccgtgctgagagacctggagaagctggccggctggcacagaatcgccatcatctacctgctgagcggcgtgaccggcaacctggccagcgccatcttcctgccctacagagccgaggtgggccccgccggcagccagttcggcatcctggcctgcctgttcgtggagctgttccagagctggcagatcctggccagaccctggagagccttcttcaagctgctggccgtggtgctgttcctgttcaccttcggcctgctgccctggatcgacaacttcgcccacatcagcggcttcatcagcggcctgttcctgagcttcgccttcctgccctacatcagcttcggcaagttcgacctgtacagaaagagatgccagatcatcatcttccaggtggtgttcctgggcctgctggccggcctggtggtgctgttctacgtgtaccccgtgagatgcgagtggtgcgagttcctgacctgcatccccttcaccgacaagttctgcgagaagtacgagctggacgcccagctgcactag

SEQ ID NO: 212134 - DNA, 1740 bp, Artificial Sequence
  derived and/or modified sequence
atgagcgaggccagaagagacagcaccagcagcctgcagagaaagaagcccccctggctgaagctggacatccccagcgccgtgcccctgaccgccgaggagcccagcttcctgcagcccctgagaagacaggccttcctgagaagcgtgagcatgcccgccgagaccgcccacatcagcagcccccaccacgagctgagaagacccgtgctgcagagacagaccagcatcacccagaccatcagaagaggcaccgccgactggttcggcgtgagcaaggacagcgacagcacccagaagtggcagagaaagagcatcagacactgcagccagagatacggcaagctgaagccccaggtgctgagagagctggacctgcccagccaggacaacgtgagcctgaccagcaccgagacccccccccccctgtacgtgggcccctgccagctgggcatgcagaagatcatcgaccccctggccagaggcagagccttcagagtggccgacgacaccgccgagggcctgagcgccccccacacccccgtgacccccggcgccgccagcctgtgcagcttcagcagcagcagaagcggcttccacagactgcccagaagaagaaagagagagagcgtggccaagatgagcttcagagccgccgccgccctgatgaagggcagaagcgtgagagacggcaccttcagaagagcccagagaagaagcttcacccccgccagcttcctggaggaggacaccaccgacttccccgacgagctggacaccagcttcttcgccagagagggcatcctgcacgaggagctgagcacctaccccgacgaggtgttcgagagccccagcgaggccgccctgaaggactgggagaaggcccccgagcaggccgacctgaccggcggcgccctggacagaagcgagctggagagaagccacctgatgctgcccctggagagaggctggagaaagcagaaggagggcgccgccgccccccagcccaaggtgagactgagacaggaggtggtgagcaccgccggccccagaagaggccagagaatcgccgtgcccgtgagaaagctgttcgccagagagaagagaccctacggcctgggcatggtgggcagactgaccaacagaacctacagaaagagaatcgacagcttcgtgaagagacagatcgaggacatggacgaccacagacccttcttcacctactggctgaccttcgtgcacagcctggtgaccatcctggccgtgtgcatctacggcatcgcccccgtgggcttcagccagcacgagaccgtggacagcgtgctgagaaacagaggcgtgtacgagaacgtgaagtacgtgcagcaggagaacttctggatcggccccagcagcgtgagaaccggcctgggcgccggccccgccggcgccggccccggcggcgccagaagaggccaggaggcccccgactgcggcagaagcagccccagccccgccggcggcccccacccccccggcagacaggtgttcgccctgcacgcccccggccccgccggcgcccagctgcacagcctgggcgccagagccagagaggccctgagactgctgagagcccagagacaggtgggcctgagagccgacctgggcggcggcgtgctgggcgccttccccagacccggcctgccccccagcagcgccagatgcagcctgttcagaccccagatcgacagcgccgagtag

SEQ ID NO: 212135 - protein, 800 aa, Artificial Sequence
  derived and/or modified sequence
MKFRRNKKQIPSFRKLIKTSKVKLENKLKNKQFKQQSTLKKYRKEQRKLRQAVKDAVSKKPIPLENPKEKRPGKRIEREEEEEEEALPLDMMDEDDLQLMKDLGQRVSFLTRDLSSSEPVHAKKRKHERIIDKYEKIPRTLQTAPEKELIHLLPIKDKSGIIPQTREKPVTDSNKDEEDQEEERELEEEIIEDPIQELTIEEHLIERKKKLQEKKMHIAALASAILSDPENNIKKLKELRSMLMEQDPDVAVTVRKLVIVSLMELFKDITPSYKIRPLTEAEKSTKTRKETQKLREFEEGLVSQYKFYLENLEQMVKDWKQRKLKKSNVVSLKAYKGLAEVAVKSLCELLVALPHFNFHNNIIVLIVPLMNDMSKLISEMCCEAVKKLFKQDKLGQASLGVIKVISGFVKGRNYEVRPEMLKTFLCLRIKEVEVKKDTEDINKPKKFMTFKEKRKSLSRMQRKWKKAEEKLERELREAEASESTEKKLKLHTETLNIVFVTYFRILKKAQRSPLLPAVLEGLAKFAHLINVEFFDDLLVVLHTLIESGDLSYQESLHCVQTAFHILSGQGDVLNIDPLKFYTHLYKTLFKLHAGATNEGVEIVLQCLDVMLTKRRKQVSQQRALAFIKRLCTLALHVLPNSSIGILATTRILMHTFPKTDLLLDSESQGSGVFLPELDEPEYCNAQNTALWELHALRRHYHPIVQRFAAHLIAGAPSEGSGALKPELSRRSATELFEAYSMAEMTFNPPVESSNPKIKGKFLQGDSFLNEDLNQLIKRYSSEVATESPLDFTKYLKTSLH

SEQ ID NO: 212136 - protein, 800 aa, Artificial Sequence
  derived and/or modified sequence
MKARRNKKQIPSFRKLIKTSKVKLENKLKNKQFKQQSTLKKYRKEQRKLRQAVKDAVSKKPIPLENPKEKRPGKRIEREEEEEEEALPLDMMDEDDLQLMKDLGQRVSFLTRDLSSSEPVHAKKRKHERIIDKYEKIPRTLQTAPEKELIHLLPIKDKSGIIPQTREKPVTDSNKDEEDQEEERELEEEIIEDPIQELTIEEHLIERKKKLQEKKMHIAALASAILSDPENNIKKLKELRSMLMEQDPDVAVTVRKLVIVSLMELFKDITPSYKIRPLTEAEKSTKTRKETQKLREFEEGLVSQYKFYLENLEQMVKDWKQRKLKKSNVVSLKAYKGLAEVAVKSLCELLVALPHFNFHNNIIVLIVPLMNDMSKLISEMCCEAVKKLFKQDKLGQASLGVIKVISGFVKGRNYEVRPEMLKTFLCLRIKEVEVKKDTEDINKPKKFMTFKEKRKSLSRMQRKWKKAEEKLERELREAEASESTEKKLKLHTETLNIVFVTYFRILKKAQRSPLLPAVLEGLAKFAHLINVEFFDDLLVVLHTLIESGDLSYQESLHCVQTAFHILSGQGDVLNIDPLKFYTHLYKTLFKLHAGATNEGVEIVLQCLDVMLTKRRKQVSQQRALAFIKRLCTLALHVLPNSSIGILATTRILMHTFPKTDLLLDSESQGSGVFLPELDEPEYCNAQNTALWELHALRRHYHPIVQRFAAHLIAGAPSEGSGALKPELSRRSATELFEAYSMAEMTFNPPVESSNPKIKGKFLQGDSFLNEDLNQLIKRYSSEVATESPLDFTKYLKTSLH

SEQ ID NO: 212137 - protein, 501 aa, Artificial Sequence
  derived and/or modified sequence
MELFKDITPSYKIRPLTEAEKSTKTRKETQKLREFEEGLVSQYKFYLENLEQMVKDWKQRKLKKSNVVSLKAYKGLAEVAVKSLCELLVALPHFNFHNNIIVLIVPLMNDMSKLISEMCCEAVKKLFKQDKLGQASLGVIKVISGFVKGRNYEVRPEMLKTFLCLRIKEVEVKKDTEDINKPKKFMTFKEKRKSLSRMQRKWKKAEEKLERELREAEASESTEKKLKLHTETLNIVFVTYFRILKKAQRSPLLPAVLEGLAKFAHLINVEFFDDLLVVLHTLIESGDLSYQESLHCVQTAFHILSGQGDVLNIDPLKFYTHLYKTLFKLHAGATNEGVEIVLQCLDVMLTKRRKQVSQQRALAFIKRLCTLALHVLPNSSIGILATTRILMHTFPKTDLLLDSESQGSGVFLPELDEPEYCNAQNTALWELHALRRHYHPIVQRFAAHLIAGAPSEGSGALKPELSRRSATELFEAYSMAEMTFNPPVESSNPKIKVTTKG

SEQ ID NO: 212138 - DNA, 2403 bp, Artificial Sequence
  derived and/or modified sequence
atgaaattccgacggaacaagaagcaaattccttctttcaggaagctaattaagacatccaaggtcaagctggagaacaaactgaaaaacaaacagttcaagcagcagagcacattgaagaaatacagaaaggagcagcgaaaactgcgtcaggctgtgaaagatgccgtgtctaagaagccaatcccgctcgaaaacccaaaagaaaaaagacccgggaagaggattgaaagggaagaggaggaggaggaggaggcgcttcccctggacatgatggacgaagacgatttgcagttgatgaaggaccttggccagagagtgtcatttctgacccgagacctgtccagcagcgagccagtccacgccaagaagagaaagcacgaacggatcatcgacaaatatgagaagatacctcgcacacttcagacggctcctgagaaggaacttattcacctgttgcccatcaaagacaagtcagggatcataccccagactcgcgaaaaacctgtgaccgattcaaataaggacgaggaggatcaagaggaggagcgcgagttagaggaggagataattgaggatcctattcaggaacttactattgaggaacacctgatcgagaggaaaaaaaagcttcaggagaagaaaatgcatatcgctgcgctggctagcgccatcctgtctgaccccgagaacaatattaaaaaattgaaggagttgcgctcaatgcttatggaacaggatccagacgtggccgttacagtgcgcaagttagtgatagtatcccttatggaactctttaaagatatcacaccatcatataagatccgccccctcaccgaagccgagaaatctaccaagactcgcaaagagacccaaaaactgagagagttcgaggaaggtttagtaagtcagtataaattctacttagaaaatctagagcaaatggtgaaagattggaaacagaggaagctgaagaagagcaacgttgtatcattaaaggcctacaaaggactcgccgaggtggctgtaaaatctctgtgcgagcttctggtcgccctaccccacttcaatttccataataatatcatcgtgctcattgtccctttgatgaatgacatgagcaaactcatttccgaaatgtgctgcgaggcggtaaaaaagctgttcaaacaagataagctgggccaggctagtctgggcgtcataaaagttatatccggcttcgtgaagggacgtaactatgaagtgaggcccgaaatgctgaagacttttctttgcttaaggattaaggaggttgaagtgaaaaaggacacggaggatatcaacaagcccaaaaagtttatgaccttcaaagagaagcggaaatctcttagccgaatgcagaggaagtggaagaaagccgaggagaagctcgagcgggaacttcgggaagcagaagcaagtgagagtactgagaagaagctgaaactgcatacagagacattgaacatcgtcttcgtgacatacttccgcattctaaaaaaagctcagcggagccctttgctgcctgccgtcctggaagggctggcaaagtttgcgcaccttatcaatgtggagtttttcgatgatctgctagtcgttctgcacacattaattgagagcggagatctctcctatcaggaatccctgcactgtgtccagaccgcatttcatatactgagtggacaaggagacgtcctaaatattgacccacttaaattttacacacatctatataagaccttgttcaagctgcacgcaggagctactaatgagggagtagaaattgtgctgcagtgcctagacgtgatgctgaccaaaagacggaaacaggtcagccagcaacgagctcttgcatttatcaaaagactttgtactctggccttacatgttttacccaatagtagcattgggatcctcgcaaccactagaatactgatgcatacttttcctaagacagacctgctcttggatagcgaatcccagggcagcggggtgttcctgccagaattagacgaacccgagtattgcaacgctcagaatactgctctatgggagctccatgccctgagacgtcattatcaccctattgtgcagagattcgccgctcatctgatcgctggcgccccttccgaaggcagcggggcacttaagcctgaactctcgaggcggagcgcaactgagcttttcgaagcctatagtatggcagaaatgacttttaacccccctgttgagagtagtaatccgaagatcaaaggcaagtttctgcagggggatagcttcttaaacgaggaccttaaccaactcatcaaacgctactcttcagaggtggccactgagtctcctctggacttcaccaagtatctcaagaccagcctacattag

SEQ ID NO: 212139 - DNA, 2403 bp, Artificial Sequence
  derived and/or modified sequence
atgaaggcaaggcgcaataagaaacagataccttcctttcggaagctgatcaagacatctaaggtgaagctcgaaaacaagctgaaaaacaaacagttcaaacagcagagcacgctgaagaagtacagaaaggaacagaggaagctgagacaggctgtcaaagatgccgtgagtaagaaaccgatcccattagaaaaccctaaggaaaagcggcccggaaagcggatcgagcgtgaagaagaggaagaggaggaggctctgccactcgacatgatggacgaggacgacctgcagctcatgaaggacctcggccagagagttagcttcttgactagggatctgtcctctagcgaacccgttcatgccaagaagagaaagcacgaacggatcattgacaagtacgagaagatccccagaacactacagacagcgccagagaaagagctgatccatctgctccccatcaaggacaagagtgggattatcccgcagacacgagaaaaacccgtgacggacagtaacaaggacgaggaagaccaggaagaggagagggagctggaagaagaaatcattgaggatcccatacaggagctgactattgaggaacacctcatagagcggaagaagaagctgcaagagaagaagatgcatatcgctgcgcttgcgtccgctatcctgtctgaccctgagaataatattaagaagcttaaggaactgaggtctatgctgatggagcaagatccagatgtggcagtgaccgtaaggaagctggtgatcgtttcgctgatggagcttttcaaagatattacaccctcgtacaagatcagacccctgactgaggccgagaaatcaactaagacgaggaaagagactcagaagctccgtgagtttgaggagggcctggtgtcgcagtataagttttacctggaaaatctggagcagatggtgaaggattggaagcagcgcaaactgaagaagtccaacgtggtaagcctgaaagcctataaaggtctcgcagaggtggccgttaagtccctgtgcgagctcctggtggccttgccacatttcaactttcacaacaatattatagtattgatcgtccctctgatgaatgatatgtccaagcttatcagtgaaatgtgttgcgaggctgtgaagaagctgtttaagcaggataaactggggcaggccagcctcggagtaatcaaggtcatctccggtttcgtgaaggggaggaattatgaggtgagaccagagatgctgaaaaccttcctgtgtcttagaatcaaagaggtggaagtgaagaaggatacagaagatatcaacaagcccaagaagtttatgaccttcaaagagaagaggaaaagtctgagtcggatgcagcgtaagtggaaaaaagcagaggagaaactagaaagagagctgcgggaagccgaggcctctgagagcaccgagaaaaagcttaagctgcacaccgagactttgaatatagtgtttgtgacatactttagaattctaaaaaaagctcagcgctctccgctcctgccagccgttctggagggtctagctaagtttgcccatttgattaatgtcgaatttttcgacgatctgcttgtcgtgttgcatacccttatcgaaagtggggacctctcctaccaggagagcttacattgcgtccaaaccgctttccatatcctttcgggccagggcgacgtactcaatattgacccactcaaattctatactcacctgtacaagacattgttcaaactgcatgccggggccactaatgagggcgtcgagatcgttctccagtgtttagatgtgatgctgacgaagcgaagaaaacaggtgtcgcagcaacgagccctcgctttcattaagaggctttgcactctcgccctgcatgtgctgccgaactctagcattgggatcctggctactacgcggattttgatgcacacatttcccaaaaccgaccttttgctagatagtgagtctcagggaagcggtgttttcctgcccgaactggacgagccggaatattgtaatgctcagaacactgcactgtgggaactgcacgccctccgtcggcactaccatccaatcgttcagaggttcgcggcacatctgatagccggcgccccttccgaaggcagcggagccctgaagcctgagttgagcaggaggtcagcaaccgaactgtttgaagcttactccatggccgagatgacgtttaatccacccgtggaaagttcaaatcccaaaattaagggaaagtttctgcagggcgactcgtttctgaacgaagatttaaaccagctcataaagcgctattcatccgaggttgctacagagtcaccattagacttcaccaaataccttaagacatcactccattag

SEQ ID NO: 212140 - DNA, 1506 bp, Artificial Sequence
  derived and/or modified sequence
atggaattatttaaggatataactccctcatataaaattcgacccttgaccgaagcagagaagtctaccaaaacacggaaggaaacacagaaactcagagaattcgaggagggactggtctctcaatataagttttaccttgagaacttggagcagatggttaaggactggaaacaaaggaaactgaagaaatccaatgttgtaagcctgaaagcctacaagggattggccgaagtggccgttaagtccctctgcgaattactagtagccctgcctcacttcaacttccacaacaacatcatcgtgctcatcgtgccgctgatgaatgatatgtcaaaactgatctctgagatgtgctgtgaagctgtgaagaagctgttcaaacaggacaaactgggccaggcctcacttggggtgattaaggtcattagtggattcgtgaagggacggaactacgaggtacgacccgaaatgctgaagacatttctctgtctgcggattaaggaggtggaggtgaagaaagataccgaggatatcaacaagccaaagaaatttatgactttcaaagagaaaaggaaaagtttgagtcgcatgcaacggaaatggaagaaggctgaagagaaactggagagagagctgagggaagcagaggcatcggaatccacagaaaagaagctgaaattgcatacagagactttgaatatagtgttcgtgacgtattttaggatactgaagaaggctcagcggtccccgttactgcctgcagttctggagggactggcaaaattcgctcacctgatcaacgttgaattcttcgacgatctgctggttgtcttacacactctcattgaaagcggcgacctgagctaccaagaatctctccactgcgtgcaaaccgctttccacattctctcgggccagggggatgtcctgaacatcgacccgctgaaattctatacacacctctacaaaaccttgtttaagcttcacgctggggccactaacgagggggtggaaatcgtattacagtgccttgatgtgatgcttacaaagaggagaaagcaggttagccaacaacgcgccttagcctttatcaagcggctctgcacgctggccctacacgtgctgcctaattcaagcattggcatccttgccacaacacggattctgatgcacacctttcccaaaaccgacttactcctggactctgaatcccagggtagcggggtgtttctgcccgagctggatgagccggagtactgtaatgcccaaaataccgctctgtgggagctgcacgcacttagaagacactaccatccaattgtgcagagattcgccgctcacctgatagccggggcacctagcgaaggtagtggcgcactaaagcccgagctgtcaaggagatctgccacggagttatttgaagcctatagtatggcggaaatgacctttaacccaccagttgagtcttccaatccaaagatcaaggtaacaacgaagggatag

SEQ ID NO: 212141 - DNA, 2403 bp, Artificial Sequence
  derived and/or modified sequence
atgaagttcagaagaaacaagaagcagatccccagcttcaggaagctgatcaagaccagcaaggtgaagctggagaacaagctgaagaacaagcagttcaagcagcagagcaccctgaagaagtacaggaaggagcagaggaagctgcggcaggccgtgaaggatgctgtgtccaagaagcccatccccctggagaaccccaaggagaagaggcctgggaagagaattgaaagagaggaggaggaggaggaggaggccctgcccctggacatgatggatgaagatgacctgcagctgatgaaggacctgggccagagggtgtccttcctgacccgggacctgagcagcagcgagcctgtgcacgccaagaagaggaagcatgagcgcatcatcgacaagtatgagaagatccccaggaccctgcagacagcccctgagaaggagctgatccacctgctgcccatcaaggacaagagcggcatcatcccccagacccgggagaagcctgtgacagacagcaacaaggatgaggaggaccaggaggaggagcgggagctggaggaggagatcatcgaggaccccatccaggagctgaccatcgaggagcacctgattgaaaggaagaagaagctgcaggagaagaagatgcacatcgccgccctggccagcgccatcctgagtgaccctgagaacaacatcaagaagctgaaggagctgcgctccatgctgatggagcaggaccctgatgtggccgtgacagtgaggaagctggtgattgtgtccctgatggagctgttcaaggacatcacccccagctacaagatccggcccctgacagaagctgagaagagcaccaagaccaggaaggagacccagaagctgcgggagtttgaggagggcctggtgtcccagtacaagttctacctggagaacctggagcagatggtgaaggactggaagcagaggaagctgaagaagagcaatgtggtgtccctgaaggcctacaagggcctggccgaggtggccgtgaagagcctgtgtgagctgctggtggccctgccccacttcaacttccacaacaacatcatcgtgctgattgtgcccctgatgaatgacatgagcaagctgatcagcgagatgtgctgtgaggccgtgaagaagctgttcaagcaggacaagctgggccaggccagcctgggcgtcatcaaggtgatcagcggctttgtgaagggcaggaactatgaggtgcggcctgagatgctgaagaccttcctgtgcctgcgcatcaaggaggtggaggtgaagaaggacacagaggacatcaacaagcccaagaagttcatgaccttcaaggagaagaggaagagcctgagcaggatgcagaggaagtggaagaaggccgaggagaagctggagcgggagctgcgggaggccgaggccagcgagagcacagagaagaagctgaagctgcacacagagaccctgaacatcgtgtttgtgacctacttccgcatcctgaagaaggcccagaggagccccctgctgcctgctgtgctggagggcctggccaagtttgcccacctgatcaacgtggagttctttgatgacctgctggtggtgctgcacaccctgattgaaagtggggacctgagctaccaggagagcctgcactgtgtgcagacagccttccacatcctgagcggccagggagatgtgctgaacatcgaccccctgaagttctacacccacctgtacaagaccctcttcaagctgcatgctggggccaccaatgaaggagtggagatcgtgctgcagtgcctggatgtgatgctgaccaagaggaggaagcaggtgtcccagcagagggccctggccttcatcaagaggctgtgcaccctggccctgcacgtgctgcccaacagcagcatcggcatcctggccaccacccgcatcctgatgcacaccttccccaagacagacctgctgctggacagcgagagccagggcagcggggtcttcctgcctgagctggatgagcctgagtactgcaatgcccagaacacagccctgtgggagctgcacgccctgcggcggcactaccaccccatcgtgcagagatttgctgcccacctgattgctggggcccccagcgagggcagcggggccctgaagccagagctgagcagaagaagtgccacagagctgtttgaggcctacagcatggccgagatgaccttcaacccccctgtggagagcagcaaccccaagatcaagggcaagttcctgcagggcgacagcttcctgaatgaagacctgaaccagctgatcaagcgctacagcagcgaggtggccacagagagccccctggacttcaccaagtacctgaagaccagcctgcactag

SEQ ID NO: 212142 - DNA, 2403 bp, Artificial Sequence
  derived and/or modified sequence
atgaaggcccggaggaacaagaagcagatccccagcttcaggaagctgatcaagaccagcaaggtgaagctggagaacaagctgaagaacaagcagttcaagcagcagagcaccctgaagaagtacaggaaggagcagaggaagctgcggcaggccgtgaaggatgctgtgtccaagaagcccatccccctggagaaccccaaggagaagaggcctgggaagagaattgaaagagaggaggaggaggaggaggaggccctgcccctggacatgatggatgaagatgacctgcagctgatgaaggacctgggccagagggtgtccttcctgacccgggacctgagcagcagcgagcctgtgcacgccaagaagaggaagcatgagcgcatcatcgacaagtatgagaagatccccaggaccctgcagacagcccctgagaaggagctgatccacctgctgcccatcaaggacaagagcggcatcatcccccagacccgggagaagcctgtgacagacagcaacaaggatgaggaggaccaggaggaggagcgggagctggaggaggagatcatcgaggaccccatccaggagctgaccatcgaggagcacctgattgaaaggaagaagaagctgcaggagaagaagatgcacatcgccgccctggccagcgccatcctgagtgaccctgagaacaacatcaagaagctgaaggagctgcgctccatgctgatggagcaggaccctgatgtggccgtgacagtgaggaagctggtgattgtgtccctgatggagctgttcaaggacatcacccccagctacaagatccggcccctgacagaagctgagaagagcaccaagaccaggaaggagacccagaagctgcgggagtttgaggagggcctggtgtcccagtacaagttctacctggagaacctggagcagatggtgaaggactggaagcagaggaagctgaagaagagcaatgtggtgtccctgaaggcctacaagggcctggccgaggtggccgtgaagagcctgtgtgagctgctggtggccctgccccacttcaacttccacaacaacatcatcgtgctgattgtgcccctgatgaatgacatgagcaagctgatcagcgagatgtgctgtgaggccgtgaagaagctgttcaagcaggacaagctgggccaggccagcctgggcgtcatcaaggtgatcagcggctttgtgaagggcaggaactatgaggtgcggcctgagatgctgaagaccttcctgtgcctgcgcatcaaggaggtggaggtgaagaaggacacagaggacatcaacaagcccaagaagttcatgaccttcaaggagaagaggaagagcctgagcaggatgcagaggaagtggaagaaggccgaggagaagctggagcgggagctgcgggaggccgaggccagcgagagcacagagaagaagctgaagctgcacacagagaccctgaacatcgtgtttgtgacctacttccgcatcctgaagaaggcccagaggagccccctgctgcctgctgtgctggagggcctggccaagtttgcccacctgatcaacgtggagttctttgatgacctgctggtggtgctgcacaccctgattgaaagtggggacctgagctaccaggagagcctgcactgtgtgcagacagccttccacatcctgagcggccagggagatgtgctgaacatcgaccccctgaagttctacacccacctgtacaagaccctcttcaagctgcatgctggggccaccaatgaaggagtggagatcgtgctgcagtgcctggatgtgatgctgaccaagaggaggaagcaggtgtcccagcagagggccctggccttcatcaagaggctgtgcaccctggccctgcacgtgctgcccaacagcagcatcggcatcctggccaccacccgcatcctgatgcacaccttccccaagacagacctgctgctggacagcgagagccagggcagcggggtcttcctgcctgagctggatgagcctgagtactgcaatgcccagaacacagccctgtgggagctgcacgccctgcggcggcactaccaccccatcgtgcagagatttgctgcccacctgattgctggggcccccagcgagggcagcggggccctgaagccagagctgagcagaagaagtgccacagagctgtttgaggcctacagcatggccgagatgaccttcaacccccctgtggagagcagcaaccccaagatcaagggcaagttcctgcagggcgacagcttcctgaatgaagacctgaaccagctgatcaagcgctacagcagcgaggtggccacagagagccccctggacttcaccaagtacctgaagaccagcctgcactag

SEQ ID NO: 212143 - DNA, 1506 bp, Artificial Sequence
  derived and/or modified sequence
atggagctgttcaaggacatcacccccagctacaagatccggcccctgacagaagctgagaagagcaccaagaccaggaaggagacccagaagctgcgggagtttgaggagggcctggtgtcccagtacaagttctacctggagaacctggagcagatggtgaaggactggaagcagaggaagctgaagaagagcaatgtggtgtccctgaaggcctacaagggcctggccgaggtggccgtgaagagcctgtgtgagctgctggtggccctgccccacttcaacttccacaacaacatcatcgtgctgattgtgcccctgatgaatgacatgagcaagctgatcagcgagatgtgctgtgaggccgtgaagaagctgttcaagcaggacaagctgggccaggccagcctgggcgtcatcaaggtgatcagcggctttgtgaagggcaggaactatgaggtgcggcctgagatgctgaagaccttcctgtgcctgcgcatcaaggaggtggaggtgaagaaggacacagaggacatcaacaagcccaagaagttcatgaccttcaaggagaagaggaagagcctgagcaggatgcagaggaagtggaagaaggccgaggagaagctggagcgggagctgcgggaggccgaggccagcgagagcacagagaagaagctgaagctgcacacagagaccctgaacatcgtgtttgtgacctacttccgcatcctgaagaaggcccagaggagccccctgctgcctgctgtgctggagggcctggccaagtttgcccacctgatcaacgtggagttctttgatgacctgctggtggtgctgcacaccctgattgaaagtggggacctgagctaccaggagagcctgcactgtgtgcagacagccttccacatcctgagcggccagggagatgtgctgaacatcgaccccctgaagttctacacccacctgtacaagaccctcttcaagctgcatgctggggccaccaatgaaggagtggagatcgtgctgcagtgcctggatgtgatgctgaccaagaggaggaagcaggtgtcccagcagagggccctggccttcatcaagaggctgtgcaccctggccctgcacgtgctgcccaacagcagcatcggcatcctggccaccacccgcatcctgatgcacaccttccccaagacagacctgctgctggacagcgagagccagggcagcggggtcttcctgcctgagctggatgagcctgagtactgcaatgcccagaacacagccctgtgggagctgcacgccctgcggcggcactaccaccccatcgtgcagagatttgctgcccacctgattgctggggcccccagcgagggcagcggggccctgaagccagagctgagcagaagaagtgccacagagctgtttgaggcctacagcatggccgagatgaccttcaacccccctgtggagagcagcaaccccaagatcaaggtgaccaccaagggctag

SEQ ID NO: 212144 - DNA, 2403 bp, Artificial Sequence
  derived and/or modified sequence
atgaagttccggcggaacaagaagcagatccccagcttccggaagctgatcaagacctcaaaagtgaagctggagaataagttaaagaataagcagtttaaacagcaatcaacgctcaaaaagtacaggaaagagcagcggaagttaagacaagcggtcaaggatgctgttagtaaaaagccaatcccattggagaatcctaaagagaagcggcccggcaaaaggatagagcgcgaagaagaggaggaagaggaggctcttccactggatatgatggatgaagatgatctgcagttgatgaaggatctgggccagagggtgagctttctgactcgcgacctgtcatcatccgagccagtacacgctaaaaagcgcaaacatgagcggattatcgacaagtacgaaaagattccacgcactttgcagacagcgcctgaaaaggaactcatccacttgctgcccattaaggataagtccggaattattcctcaaacgagggagaaaccagtaactgattctaataaagacgaagaggatcaggaagaggaacgggaacttgaggaggagataattgaggatccaatccaggagctcaccattgaggagcacttaatcgaacggaagaagaagcttcaagagaaaaaaatgcatatagccgcactggcatctgccatcctaagcgaccctgagaacaacataaaaaagctcaaagagttgcgctcaatgctgatggaacaggatcctgatgtcgccgtcaccgtgagaaagctggtgatcgtttccttaatggagctctttaaagatatcaccccctcttacaaaatcagacccctgactgaggcggagaaatcaacaaagacgcggaaagaaactcagaaactcagggagtttgaggaaggcctggtgagccagtacaaattttacctggagaacctcgagcaaatggtgaaggattggaaacaaaggaagctcaagaaaagcaacgtggtgtccctgaaagcttacaaaggactcgctgaagttgcggtgaagagcctatgcgagctgctcgtcgccctgccgcattttaacttccacaataatattatcgtcctgattgtgccactcatgaatgacatgtctaagcttataagcgaaatgtgctgcgaagcagtcaaaaaattgttcaagcaggataaactgggacaggcttcactgggagtgatcaaagtgatcagcgggtttgttaaggggagaaattacgaagtgcgaccagagatgcttaaaacctttctgtgcctgcgcattaaagaagttgaggtgaagaaggatactgaagacattaacaagcctaagaagtttatgacctttaaagagaaaagaaagtccctttcccggatgcagcggaagtggaagaaagcagaagaaaaactggagcgagagttgagggaagctgaagcgtccgaaagtaccgaaaagaagctcaagctccatacagagacgcttaatatcgtgtttgtgacatatttccgcatactgaagaaggcacagcggagcccccttctgccagccgtgctggaagggctcgcaaaattcgcccatttaatcaacgtggagttctttgatgatttgctggtagtgctgcatacactgattgaatctggggatttaagctatcaggagagccttcattgtgtgcaaaccgcctttcatatcctgtcgggtcagggggatgtgttgaatatcgatcctttgaagttttatacccacctctataagacactgttcaaactccacgccggagctacaaacgaaggcgtggaaattgtgctacaatgtctggatgtaatgcttaccaagcgacggaaacaggtcagtcagcagcgcgcactcgctttcataaagcgcctgtgtactctggcgctgcacgttctgccgaacagctcaattgggatcctggcgacaaccaggattcttatgcataccttcccgaagacagatcttctgctggacagcgagtcccaaggttccggagtgttcctgcctgaactcgatgaacccgagtactgcaatgcacagaacaccgcactgtgggaactccacgccctccggaggcactaccatcctattgtgcagcggttcgcagcccacctgattgcgggtgctccatcagaaggctccggcgcattgaaaccagaactcagcaggagaagtgcgacagaactgttcgaagcttacagtatggctgaaatgacctttaaccctccggttgagtccagcaatccaaagatcaaggggaagtttcttcaaggggactctttcttgaacgaggatctgaaccagctaataaagcggtattcttcggaagtggccaccgaatcacctcttgacttcacaaaatatctgaaaactagcctgcactag

SEQ ID NO: 212145 - DNA, 2403 bp, Artificial Sequence
  derived and/or modified sequence
atgaaggcccggcggaacaagaagcagatccccagcttccggaagctgatcaagacctctaaggttaaactagaaaataagctgaagaataaacagttcaagcagcaatcgaccctaaaaaagtacagaaaagagcagcgcaagttgaggcaagcagtgaaggatgccgtcagcaaaaagcccatccctctcgaaaaccctaaagagaaaaggcccggtaaaaggatcgaacgggaggaggaggaggaggaggaggctctgcctctggatatgatggatgaggacgacctacagctgatgaaagatttaggtcagcgcgtatcattcttaacgagagacctaagttcctcagagccggtgcacgccaagaagcgcaaacatgaacgcatcatcgacaagtacgagaagatcccccgaacactgcaaacggccccagagaaggagctaattcacttgctgcccatcaaggacaagtcgggaattatacctcagactagagaaaaacctgtgaccgattctaacaaggacgaggaggatcaagaagaagaaagagaactcgaggaggaaatcattgaagaccccatccaagagctaaccatcgaggagcacttaattgaacggaaaaaaaagctgcaggaaaagaagatgcacatcgcagctctggctagcgccatcctctcagaccctgagaacaatattaaaaagctgaaggagctgcggagcatgctcatggaacaggatcctgatgtcgccgttaccgtgcgaaaactggtcatcgtttcactgatggagcttttcaaggatattacacccagctataagatcagaccccttacggaagccgagaaatcaactaagacccggaaagagactcagaagctacgggagtttgaagaaggactggtttcacagtataaattctatctggaaaatctggagcagatggttaaggattggaaacagcgcaaattgaagaagtcaaatgtggtgagcctgaaggcttacaaaggcctggcggaggttgccgtgaagagtttgtgcgaattgctcgttgcactgccccacttcaacttccataataacattatagtgctcatagtgccattgatgaatgacatgagcaagctgatctccgaaatgtgttgcgaagccgtgaaaaaacttttcaagcaagacaaactgggccaggccagcctgggagtgattaaggtgatcagtgggttcgtcaagggacgcaattacgaagttcggcctgagatgctgaaaacctttctatgcctcaggataaaggaggtggaggtgaagaaggataccgaggatatcaacaagcccaagaaattcatgacctttaaggaaaagcggaaatcactttctcggatgcagcgcaaatggaaaaaagccgaggagaagctcgaacgcgaactgcgcgaagcggaagctagtgagtcaactgagaagaaacttaaactgcacacggagacgctgaatatagtgttcgtaacttatttcaggattctgaaaaaagcccagcggtccccactgttacccgccgttttggaagggttggctaaattcgctcacctgatcaatgtggaatttttcgatgatctgctagtggtgttgcatactttaattgagtccggcgatctgtcttatcaggaatccctgcattgtgttcagaccgcattccatatccttagtggccagggtgacgtcctaaatatcgaccctctgaaattctatacccacctgtacaagaccctgttcaagcttcatgccggggccacaaacgagggagtggagattgtccttcaatgcctcgacgtcatgctcaccaagcgacggaaacaggtctctcagcagcgggccctagcctttatcaagagattgtgcacccttgcgctgcacgtgctccccaactcctcgattggtattctggcaaccacgagaatccttatgcatacatttcccaagacggatctactgctagattcagagtcccaggggtccggcgtgttcttgcccgaactggatgagccagaatactgtaacgcacagaatacagctctttgggagttacatgccttgcgtagacactaccatcctattgtccaacgctttgcagcacatctcatcgcgggagcaccctctgagggatctggggctttaaagcccgaattgagccggaggagcgctactgaactcttcgaggcctacagtatggcagagatgacattcaaccctccagtggaaagctcgaaccccaagataaagggcaaattcttgcagggagatagttttctgaacgaagatcttaaccaacttattaaaaggtactcaagcgaagttgccactgagtcacccttggacttcactaaatatttgaaaacgtctctccactag

SEQ ID NO: 212146 - DNA, 1506 bp, Artificial Sequence
  derived and/or modified sequence
atggagctgttcaaggacatcacccccagctacaagatccggcccttgaccgaagccgaaaaaagcactaagacaaggaaggagactcagaaattgcgcgagttcgaggagggacttgttagccagtacaaattctacttggaaaacctcgagcagatggtcaaggactggaagcagcggaagctcaaaaaaagcaatgtggtgtccctcaaagcatacaaaggactggctgaggtcgccgtgaaaagcctgtgtgaactcctggttgccctccctcacttcaacttccacaataatattatagtgctgattgtgccattgatgaatgacatgagtaagttaatttctgagatgtgctgcgaggccgtgaaaaagctcttcaagcaggataagctcgggcaggctagtttgggggtgatcaaggtgatcagcggattcgtcaaagggcggaattatgaggtcaggccagaaatgttgaagacattcctttgcctcaggatcaaagaagtcgaggtcaagaaggacactgaggatattaacaagccaaaaaaattcatgacctttaaagagaagcgcaagtctttgtctcggatgcaaagaaagtggaaaaaggcagaagaaaagttggagcgggagctgagagaggcagaagctagtgaaagcacagaaaaaaagctgaaacttcacaccgagaccttgaacatcgtgttcgttacctatttccgcatcctgaaaaaagctcagagaagtcccctgttaccagctgttttagagggcttggccaagtttgcccacctgataaatgtcgagtttttcgacgacctcctcgtcgtcctgcacaccctgatcgaatccggcgatctttcctatcaggagtccttacactgtgtgcagacggcgtttcatattctatccggtcagggtgacgttttgaacatagacccccttaagttctacacccacctttataagacactctttaaactgcacgctggggctaccaatgagggcgttgagatcgttctacagtgtctggacgtgatgcttacgaaaagacgtaagcaggtaagccagcagcgggctttggctttcatcaagcgcctttgtaccctggcccttcatgtcctgcctaactctagtatcggcattttggcaaccactaggattctgatgcacactttcccgaagacagatttactgttagattccgagtcccaggggagcggggtgttcctccccgagctagacgagccggaatactgcaatgcccagaacacagccctctgggaattgcatgctctgcgcagacactatcatccaattgtgcaacgctttgccgcgcacttaattgcaggagcccccagcgaggggtctggcgcactcaaacccgaattgagtcgccgatcagcaactgagctgttcgaggcttactccatggctgagatgacattcaatcccccagtcgagagttccaaccccaaaataaaggtcacaacaaagggttag

SEQ ID NO: 212147 - DNA, 3348 bp, Artificial Sequence
  derived and/or modified sequence
atgaaatttagaagaaataaaaaacagatcccaagctttcgcaagttaataaaaactagtaaagtcaaacttgaaaacaagctaaaaaataagcagtttaaacaacaaagcactctcaagaagtaccgaaaagaacagaggaaactaaggcaagctgtgaaagatgctgtgtctaagaaacccattccattggagaacccaaaggaaaagcgaccaggtaaaaggattgagagggaagaagaggaagaagaagaagcccttcctttagatatgatggatgaagatgacttacagttaatgaaggatttaggacaaagagtatcttttctaacaagagatctttcttctagtgagcctgttcatgcgaagaaacggaagcatgaacgcattatagataaatatgaaaaaataccaagaactctgcaaactgcaccagagaaggaactgattcatttacttcctatcaaagataaaagtggtataatcccacagactagggagaagccagttactgatagtaacaaagatgaagaggatcaagaagaagagagggaacttgaggaagagatcattgaagatcctattcaagagctgaccatagaagaacatttgattgagagaaagaagaaattacaggagaagaagatgcatattgcagccttggcatctgccatattatcagatccagaaaataatattaaaaaattgaaagaattacgttctatgttgatggaacaagatcctgatgtggctgttactgttcgaaagctggtaattgtttctctgatggagttatttaaagatattactccttcatataaaatccggcccctcacagaagcagaaaaatctactaagacccgaaaagaaacccagaagttaagagaatttgaagaaggcctggttagccaatacaagttttatttggaaaatctggaacaaatggttaaagattggaagcagaggaagctgaagaaaagtaatgtagtttccttaaaggcatacaaaggactggcagaagtcgctgtgaagagcttgtgtgagctgttggtggcactacctcattttaactttcacaacaacatcatcgtattgattgtccctctcatgaatgacatgtcaaaattgatatctgaaatgtgttgtgaagctgtgaagaaactctttaagcaagataaattaggccaagcttctcttggtgtaattaaagtgatttctggttttgtgaagggcagaaattacgaagttaggccagagatgttaaaaacatttttatgcctaagaatcaaggaagtagaagtgaaaaaagatacagaagacattaataaaccaaaaaaatttatgactttcaaagaaaagagaaaatctctatcaagaatgcagagaaagtggaagaaagcagaagagaaactagagcgagagcttcgagaggcagaagcttcagagagtactgagaaaaaacttaaactgcacacagagactctgaatattgtgtttgtaacctacttcagaatattgaagaaggcccagaggtcacctctcctgccagcagttctagaaggtcttgccaagtttgctcaccttataaatgtggaattttttgatgatctgttagtagttcttcatactctcattgagtctggtgacctaagctatcaagaaagtcttcactgtgtccagactgcttttcatattctttctggacaaggtgatgttctgaatattgatccattgaaattctacacacatctctacaaaacactgttcaaattacatgcaggtgctaccaatgaaggtgttgagattgtactccagtgccttgatgtcatgctaactaagcgcagaaagcaagtttctcagcagcgagctcttgccttcatcaaacgcctttgtacccttgctcttcatgttcttccaaattcaagtattggcattttagcaactaccagaatattaatgcatactttccccaaaacagatctactgcttgacagtgaatctcagggaagtggagttttccttcctgaactggatgagcctgagtactgcaatgctcagaacactgctctgtgggaactgcatgctctgcggaggcattatcatcccatagtgcagagatttgcagcccacctgatcgctggagcaccttctgaaggctctggagcactcaaaccagagttgagtcgaagatctgctactgaactttttgaggcatatagcatggcagaaatgacattcaatcctcctgttgaatcttcaaaccccaaaataaagggtaaatttttacaaggggattcatttttgaatgaagatttaaatcagctaatcaaaagatactccagtgaagttgctactgaatcgcctctggatttcacgaaatatttgaaaacatcactacactagtagaggaatgaagtcagtggactttcttgtatatttgtgtgtgcagatgtacataaagatgagttgttaacttaggatcttttctttttatacaaggaaagcttcctaagaatgtctaggaagaagaggaagaatgaccctttgcatggcacagggttctgcccctattctgaatatgtcattccatcaaggagatcaaaagcctttttttctccccagtatttggaaattactttcttgatgatgctgccttttaaaagcttcacgtacattatagttttttaaaaaaatctttggactggatcttactgaagtgcagttgctatattaaaattagggcatagagcacagaaaaatcaagaccatgagaagacattttaccatttagctactttttataactaaatactctttaaatatttttatttcaatactgtggatggaaatgagaagcattctaaatttgagttaatatatttttatgaagatatttgagaaaagaaaaaaatagcttgtattcaggttcattggcttttgctggatgatccacctaaagaagttacctaatttggccttttaaaaaaggtgttagtgtttattatagctactttcaaggaaagtttgaatatgattctagtctctaaagttcttcacgttttctgacattccctggagggtgactggggaagaattgctccagggtagaagaaccaggcccaagactttaccattctgatctagagacaaaggatactcaatgaggagcttttttcccctcttggaacaggtaaaatgctttttcttattaatataattataaaacagtattttatgtaacagctattcccatattctaggagtggcctaagaaatgcgtgtttcagtgactagattataaatattctctattgtgaatagttgaataaaacagctgtttttttctgc

SEQ ID NO: 212148 - DNA, 3455 bp, Artificial Sequence
  derived and/or modified sequence
ggtagtgtagggacttcggcacgtgtgtcattccccgggatttctgtagtaaccctgcttctggtgaacttgtctggccggcattcatttaaggcctaaggatgaaggcgagaagaaataaaaaacagatcccaagctttcgcaagttaataaaaactagtaaagtcaaacttgaaaacaagctaaaaaataagcagtttaaacaacaaagcactctcaagaagtaccgaaaagaacagaggaaactaaggcaagctgtgaaagatgctgtgtctaagaaacccattccattggagaacccaaaggaaaagcgaccaggtaaaaggattgagagggaagaagaggaagaagaagaagcccttcctttagatatgatggatgaagatgacttacagttaatgaaggatttaggacaaagagtatcttttctaacaagagatctttcttctagtgagcctgttcatgcgaagaaacggaagcatgaacgcattatagataaatatgaaaaaataccaagaactctgcaaactgcaccagagaaggaactgattcatttacttcctatcaaagataaaagtggtataatcccacagactagggagaagccagttactgatagtaacaaagatgaagaggatcaagaagaagagagggaacttgaggaagagatcattgaagatcctattcaagagctgaccatagaagaacatttgattgagagaaagaagaaattacaggagaagaagatgcatattgcagccttggcatctgccatattatcagatccagaaaataatattaaaaaattgaaagaattacgttctatgttgatggaacaagatcctgatgtggctgttactgttcgaaagctggtaattgtttctctgatggagttatttaaagatattactccttcatataaaatccggcccctcacagaagcagaaaaatctactaagacccgaaaagaaacccagaagttaagagaatttgaagaaggcctggttagccaatacaagttttatttggaaaatctggaacaaatggttaaagattggaagcagaggaagctgaagaaaagtaatgtagtttccttaaaggcatacaaaggactggcagaagtcgctgtgaagagcttgtgtgagctgttggtggcactacctcattttaactttcacaacaacatcatcgtattgattgtccctctcatgaatgacatgtcaaaattgatatctgaaatgtgttgtgaagctgtgaagaaactctttaagcaagataaattaggccaagcttctcttggtgtaattaaagtgatttctggttttgtgaagggcagaaattacgaagttaggccagagatgttaaaaacatttttatgcctaagaatcaaggaagtagaagtgaaaaaagatacagaagacattaataaaccaaaaaaatttatgactttcaaagaaaagagaaaatctctatcaagaatgcagagaaagtggaagaaagcagaagagaaactagagcgagagcttcgagaggcagaagcttcagagagtactgagaaaaaacttaaactgcacacagagactctgaatattgtgtttgtaacctacttcagaatattgaagaaggcccagaggtcacctctcctgccagcagttctagaaggtcttgccaagtttgctcaccttataaatgtggaattttttgatgatctgttagtagttcttcatactctcattgagtctggtgacctaagctatcaagaaagtcttcactgtgtccagactgcttttcatattctttctggacaaggtgatgttctgaatattgatccattgaaattctacacacatctctacaaaacactgttcaaattacatgcaggtgctaccaatgaaggtgttgagattgtactccagtgccttgatgtcatgctaactaagcgcagaaagcaagtttctcagcagcgagctcttgccttcatcaaacgcctttgtacccttgctcttcatgttcttccaaattcaagtattggcattttagcaactaccagaatattaatgcatactttccccaaaacagatctactgcttgacagtgaatctcagggaagtggagttttccttcctgaactggatgagcctgagtactgcaatgctcagaacactgctctgtgggaactgcatgctctgcggaggcattatcatcccatagtgcagagatttgcagcccacctgatcgctggagcaccttctgaaggctctggagcactcaaaccagagttgagtcgaagatctgctactgaactttttgaggcatatagcatggcagaaatgacattcaatcctcctgttgaatcttcaaaccccaaaataaagggtaaatttttacaaggggattcatttttgaatgaagatttaaatcagctaatcaaaagatactccagtgaagttgctactgaatcgcctctggatttcacgaaatatttgaaaacatcactacactagtagaggaatgaagtcagtggactttcttgtatatttgtgtgtgcagatgtacataaagatgagttgttaacttaggatcttttctttttatacaaggaaagcttcctaagaatgtctaggaagaagaggaagaatgaccctttgcatggcacagggttctgcccctattctgaatatgtcattccatcaaggagatcaaaagcctttttttctccccagtatttggaaattactttcttgatgatgctgccttttaaaagcttcacgtacattatagttttttaaaaaaatctttggactggatcttactgaagtgcagttgctatattaaaattagggcatagagcacagaaaaatcaagaccatgagaagacattttaccatttagctactttttataactaaatactctttaaatatttttatttcaatactgtggatggaaatgagaagcattctaaatttgagttaatatatttttatgaagatatttgagaaaagaaaaaaatagcttgtattcaggttcattggcttttgctggatgatccacctaaagaagttacctaatttggccttttaaaaaaggtgttagtgtttattatagctactttcaaggaaagtttgaatatgattctagtctctaaagttcttcacgttttctgacattccctggagggtgactggggaagaattgctccagggtagaagaaccaggcccaagactttaccattctgatctagagacaaaggatactcaatgaggagcttttttcccctcttggaacaggtaaaatgctttttcttattaatataattataaaacagtattttatgtaacagctattcccatattctaggagtggcctaagaaatgcgtgtttcagtgactagattataaatattctctattgtgaatagttgaataaaacagctgtttttttctgcttccta

SEQ ID NO: 212149 - DNA, 1715 bp, Artificial Sequence
  derived and/or modified sequence
gtttctctgatggagttatttaaagatattactccttcatataaaatccggcccctcacagaagcagaaaaatctactaagacccgaaaagaaacccagaagttaagagaatttgaagaaggcctggttagccaatacaagttttatttggaaaatctggaacaaatggttaaagattggaagcagaggaagctgaagaaaagtaatgtagtttccttaaaggcatacaaaggactggcagaagtcgctgtgaagagcttgtgtgagctgttggtggcactacctcattttaactttcacaacaacatcatcgtattgattgtccctctcatgaatgacatgtcaaaattgatatctgaaatgtgttgtgaagctgtgaagaaactctttaagcaagataaattaggccaagcttctcttggtgtaattaaagtgatttctggttttgtgaagggcagaaattacgaagttaggccagagatgttaaaaacatttttatgcctaagaatcaaggaagtagaagtgaaaaaagatacagaagacattaataaaccaaaaaaatttatgactttcaaagaaaagagaaaatctctatcaagaatgcagagaaagtggaagaaagcagaagagaaactagagcgagagcttcgagaggcagaagcttcagagagtactgagaaaaaacttaaactgcacacagagactctgaatattgtgtttgtaacctacttcagaatattgaagaaggcccagaggtcacctctcctgccagcagttctagaaggtcttgccaagtttgctcaccttataaatgtggaattttttgatgatctgttagtagttcttcatactctcattgagtctggtgacctaagctatcaagaaagtcttcactgtgtccagactgcttttcatattctttctggacaaggtgatgttctgaatattgatccattgaaattctacacacatctctacaaaacactgttcaaattacatgcaggtgctaccaatgaaggtgttgagattgtactccagtgccttgatgtcatgctaactaagcgcagaaagcaagtttctcagcagcgagctcttgccttcatcaaacgcctttgtacccttgctcttcatgttcttccaaattcaagtattggcattttagcaactaccagaatattaatgcatactttccccaaaacagatctactgcttgacagtgaatctcagggaagtggagttttccttcctgaactggatgagcctgagtactgcaatgctcagaacactgctctgtgggaactgcatgctctgcggaggcattatcatcccatagtgcagagatttgcagcccacctgatcgctggagcaccttctgaaggctctggagcactcaaaccagagttgagtcgaagatctgctactgaactttttgaggcatatagcatggcagaaatgacattcaatcctcctgttgaatcttcaaaccccaaaataaaggttactacaaaaggctgaatttgaagggagtaaaggtcagttgcagtgaagaaactccctttgttgccttcccgtgagaagtagcttggtgatgagagaaagctgccaccatctggtctggattaagcaaacacccttctcctcaggcccctgccaataaggcaaagcccagagcgaacacatctcaccaggaggaaaagcagaatgtgatggactga

SEQ ID NO: 212150 - DNA, 2403 bp, Artificial Sequence
  derived and/or modified sequence
atgaagttcaggcgaaacaagaaacagatcccttcgtttcgaaagctgataaagacttcaaaggtgaaactagaaaataaactgaaaaataaacaattcaagcaacagtccactttgaagaagtataggaaggagcagcggaaactccggcaggcagttaaagacgccgtgtccaaaaaacccattccattggagaaccctaaagaaaagaggcccggaaagaggatcgaacgagaagaagaagaagaggaggaagctctacctttagatatgatggacgaggacgacctccagctgatgaaggacctgggtcaacgcgtctcattcctgacgagagacctctctagctcggagccagtgcacgctaaaaaacggaaacacgagcgaatcatagacaaatatgaaaagatcccaaggacactgcagaccgcacctgagaaagaactcattcatctgttgcctatcaaagacaagagtgggattataccacagacccgtgagaaacccgttacagattccaataaagacgaggaagaccaagaggaggagagggagctggaagaggagataatcgaggaccccatccaggagctcaccatcgaggaacacctgattgaacggaaaaagaaactacaagagaaaaaaatgcatattgctgccctggcatcggcaatattgagcgaccccgagaacaatatcaagaagctcaaagagcttcgttctatgctgatggagcaagatcccgacgtcgcagtcaccgttaggaagctggtcatcgtgagcctcatggagcttttcaaggatattaccccatcctataagattcgaccactgacagaggcagagaagtcaacaaagacacgcaaagagacccagaagctgcgtgagtttgaggagggcctggtctcccagtacaagttctatctcgaaaatctagaacagatggtgaaagattggaagcagaggaagctgaagaaaagcaatgttgtgagtctgaaagcttacaaaggtctggctgaggtggccgtgaagtcactctgtgagctgctggtagcgctgccccatttcaacttccataacaatatcatcgttctgattgttcccctgatgaacgacatgtctaagctgatttcagagatgtgttgcgaagccgtgaaaaagctgttcaagcaggataagctcggacaggcctccctaggcgtgattaaggtcatttccggcttcgtgaaggggagaaactacgaggttagaccagaaatgctcaagacctttttgtgccttagaatcaaagaggtagaagtcaagaaggacaccgaagatatcaataagcccaagaagttcatgacgtttaaagagaagagaaagagcctgtctagaatgcagcggaagtggaagaaggctgaggagaaattggaacgcgagctgcgcgaagctgaggcttccgaatcaactgagaaaaaactcaaattgcacacagaaaccctcaatattgtgttcgtcacttactttcgaattttgaagaaggctcaacgctctcctctgttaccggctgtgctggaggggctggctaaatttgcccaccttatcaatgtggagttctttgacgacctgcttgtagtacttcataccttaatcgagtccggcgatctgagttaccaggagtccctgcactgcgttcagacggcttttcatattctatccggccaaggagatgtattgaacatagacccacttaagttctatacccatctttacaagactctgtttaagctacacgccggagctactaacgagggagtggaaattgttctccagtgtctggacgtaatgctaactaaacgcagaaaacaggtatcccagcaacgggctctcgcgtttataaagaggctgtgtactctggcgctgcatgtcctgcccaatagctccattggaatactggcaactacgcgcattctaatgcacaccttccctaagacagatctgctgttggatagcgagagtcagggctccggagtattcctgccggagctcgatgagcccgaatattgcaacgcccagaataccgctctgtgggaactgcatgcattacgtcgccactaccacccaattgtgcaaagattcgcggcacaccttatcgcgggtgctcccagcgaaggcagtggtgctttaaaacctgaattaagtcgccgaagcgctacagaattatttgaagcctatagcatggctgagatgaccttcaatcctcctgttgaaagctctaacccgaaaattaagggcaagtttttgcaaggggacagttttctcaacgaggacttaaaccagctgatcaagcgctattcttcggaggtggccaccgagtccccgctggacttcactaaatacctaaagacctcgctgcattag

SEQ ID NO: 212151 - DNA, 2403 bp, Artificial Sequence
  derived and/or modified sequence
atgaaagccaggagaaataaaaagcagataccaagctttaggaagttgatcaagacctccaaggttaagttagaaaacaagctgaaaaataagcagtttaagcagcagagtactctcaaaaaataccgaaaagagcaaaggaaacttcggcaggctgtaaaggacgccgtctctaaaaaaccgatcccactagaaaaccctaaagaaaaaaggcccggaaagcggattgaaagagaggaagaggaggaagaagaggctcttcccctcgacatgatggatgaggatgatttgcagctgatgaaggatttggggcaacgcgtctcttttttaacaagagacttatcaagttccgagccggtgcacgcgaaaaaaaggaaacacgagaggatcatcgataagtatgagaaaatcccgaggaccctgcagaccgcccctgaaaaggaactgatacacctgctgccaataaaggacaagtctggcattatcccacagactagagaaaaacctgtcaccgactccaacaaggatgaagaagatcaggaagaagagcgcgaactggaagaggagattatcgaagaccccatacaagaattgacaatagaagaacatctgatcgaacgcaagaaaaagctgcaagaaaagaagatgcatatagcggctctcgcttcagccattctttcagatcctgaaaacaacatcaagaaactgaaagaattgaggagcatgctgatggagcaggatcccgatgtggcagtcactgtaaggaaacttgtgattgtgtccctgatggagctctttaaagatataactcctagttataagatcagacctctgaccgaggccgagaaaagtaccaaaacccggaaggaaacccagaaacttcgggaattcgaagagggtctggtctcgcagtacaagttttatctggaaaatcttgagcaaatggtcaaagactggaaacagcgcaaactgaagaagtcaaacgtcgtcagtctcaaagcatataaaggcctggccgaagtggctgtgaaatcactctgcgaactgcttgtggcactgcctcattttaatttccataataacatcatcgtgctcattgttcccctgatgaatgacatgagcaaacttattagtgagatgtgttgcgaagcagtgaaaaaactgtttaaacaggacaaattgggtcaggcctcacttggcgtaatcaaggtgatctccgggtttgttaaagggcgtaattacgaagtcagacccgagatgctaaagacttttctctgcctgaggatcaaggaggttgaggtgaaaaaggacacagaagacatcaacaagcccaagaaatttatgacgttcaaggaaaaaagaaagtccctgagtcgcatgcagcggaagtggaaaaaggccgaggaaaagctggagagagaacttcgagaagcagaagcctcagaaagcaccgagaaaaagcttaaactgcacacagagacgctgaatatcgtcttcgtcacgtacttccgtatcttgaagaaggcgcagcgtagtcccctactgccagcagtattggagggcctggccaagttcgcacatttgataaatgttgaattctttgacgatctcctggtggtgctccacactctcattgaatccggcgacctgtcttatcaggaaagtcttcactgcgttcagacagcctttcatattttgagtggccagggcgacgtactgaatatcgatcctcttaagttttatactcacctgtataaaactttgtttaagctgcacgcgggtgccacaaacgagggggtggagatcgtgcttcagtgcctggatgtcatgctgactaaacgacgaaaacaggtgagccaacagcgcgcattggccttcattaaaaggctgtgcacattagctttacacgtcctccctaatagctctattgggatcctggctaccacgcgcatccttatgcacacattccctaaaaccgatcttctcctggatagcgaatcccagggcagcggcgtgttcctcccagagctcgatgagcctgaatactgtaatgcgcagaatactgctctgtgggagctgcacgcccttcggcgacattaccatccaatcgtgcagagatttgccgcacacctaattgcaggagccccaagcgagggcagtggcgcactgaagcccgagctctctcggaggagtgccaccgaactgtttgaagcatactctatggcagagatgaccttcaatccacctgtggagtccagcaaccctaagatcaaaggaaaatttctgcaaggagattcttttttgaacgaagatctcaaccaactcataaaacggtactcctccgaagtagctaccgaatccccactggattttacaaagtacctgaagacttcactgcattag

SEQ ID NO: 212152 - DNA, 1506 bp, Artificial Sequence
  derived and/or modified sequence
atggaactgttcaaagacataaccccttcatacaagatccggcctctgaccgaagctgaaaagagtacaaagacacggaaggagacccaaaagctgagggagtttgaagaagggctcgtcagtcaatacaagttctacctcgaaaatctggaacagatggtgaaagattggaaacagcgcaaactgaaaaaatctaatgtggtgagcttgaaggcctacaagggccttgccgaagtcgcagtcaaatccctttgcgaactacttgtcgcactgccccacttcaacttccacaacaatattatcgtcttaatcgttccattgatgaacgacatgtccaagctaatcagtgagatgtgttgcgaggcggtgaagaagctgttcaagcaagataaactcggtcaggcctccctgggcgttatcaaggtgataagtggattcgtgaaaggcaggaattacgaagtgcgcccagagatgcttaagacctttctgtgtctccgaattaaagaggttgaagtcaaaaaggacacggaggacatcaataagcctaagaaattcatgacattcaaagagaagagaaaatccctgagtcgtatgcagcggaagtggaagaaggctgaggagaagttggaaagggaacttcgcgaagcggaggcttccgagagcacagagaaaaaattgaaactccatactgagactctaaacatcgttttcgtgacgtattttagaatcctcaagaaggcacagcggagccctctcctccccgcagtgctggaggggcttgccaagttcgctcatctgatcaatgtcgaattcttcgacgatctgctggtagtgctacacaccctcatagagagcggtgatttgagctatcaggagagccttcattgtgtgcaaacagccttccacatcttaagcgggcagggggatgtcctcaatatcgatcctctgaagttctacacgcatctttacaaaaccctgtttaagttgcacgccggtgccaccaacgagggcgtggagatagtgctgcagtgcttggacgtgatgttgactaaacgtaggaagcaggtttctcagcaaagggcccttgcattcattaagagactctgcaccctcgcgctccacgtgctgccaaatagttccattggtatcctagccaccacgagaatactgatgcatacgtttcccaaaacagatctgctgttggattcggagagccagggatccggggtatttctccctgagctggacgaaccagaatactgcaacgcccagaacactgcattgtgggagcttcacgccttgcgcagacattatcaccctattgttcaaaggttcgcggctcacctgattgccggtgccccaagcgaaggatctggcgctcttaaaccggagctgtctcgacgcagcgcgaccgagctgtttgaagcctactccatggctgagatgaccttcaatccgccagtcgagtcttccaaccccaaaataaaagtgaccactaagggttag

SEQ ID NO: 212153 - DNA, 2403 bp, Artificial Sequence
  derived and/or modified sequence
atgaagttcagaagaaacaagaagcagatccccagcttcagaaagctgatcaagaccagcaaggtgaagctggagaacaagctgaagaacaagcagttcaagcagcagagcaccctgaagaagtacagaaaggagcagagaaagctgagacaggccgtgaaggacgccgtgagcaagaagcccatccccctggagaaccccaaggagaagagacccggcaagagaatcgagagagaggaggaggaggaggaggaggccctgcccctggacatgatggacgaggacgacctgcagctgatgaaggacctgggccagagagtgagcttcctgaccagagacctgagcagcagcgagcccgtgcacgccaagaagagaaagcacgagagaatcatcgacaagtacgagaagatccccagaaccctgcagaccgcccccgagaaggagctgatccacctgctgcccatcaaggacaagagcggcatcatcccccagaccagagagaagcccgtgaccgacagcaacaaggacgaggaggaccaggaggaggagagagagctggaggaggagatcatcgaggaccccatccaggagctgaccatcgaggagcacctgatcgagagaaagaagaagctgcaggagaagaagatgcacatcgccgccctggccagcgccatcctgagcgaccccgagaacaacatcaagaagctgaaggagctgagaagcatgctgatggagcaggaccccgacgtggccgtgaccgtgagaaagctggtgatcgtgagcctgatggagctgttcaaggacatcacccccagctacaagatcagacccctgaccgaggccgagaagagcaccaagaccagaaaggagacccagaagctgagagagttcgaggagggcctggtgagccagtacaagttctacctggagaacctggagcagatggtgaaggactggaagcagagaaagctgaagaagagcaacgtggtgagcctgaaggcctacaagggcctggccgaggtggccgtgaagagcctgtgcgagctgctggtggccctgccccacttcaacttccacaacaacatcatcgtgctgatcgtgcccctgatgaacgacatgagcaagctgatcagcgagatgtgctgcgaggccgtgaagaagctgttcaagcaggacaagctgggccaggccagcctgggcgtgatcaaggtgatcagcggcttcgtgaagggcagaaactacgaggtgagacccgagatgctgaagaccttcctgtgcctgagaatcaaggaggtggaggtgaagaaggacaccgaggacatcaacaagcccaagaagttcatgaccttcaaggagaagagaaagagcctgagcagaatgcagagaaagtggaagaaggccgaggagaagctggagagagagctgagagaggccgaggccagcgagagcaccgagaagaagctgaagctgcacaccgagaccctgaacatcgtgttcgtgacctacttcagaatcctgaagaaggcccagagaagccccctgctgcccgccgtgctggagggcctggccaagttcgcccacctgatcaacgtggagttcttcgacgacctgctggtggtgctgcacaccctgatcgagagcggcgacctgagctaccaggagagcctgcactgcgtgcagaccgccttccacatcctgagcggccagggcgacgtgctgaacatcgaccccctgaagttctacacccacctgtacaagaccctgttcaagctgcacgccggcgccaccaacgagggcgtggagatcgtgctgcagtgcctggacgtgatgctgaccaagagaagaaagcaggtgagccagcagagagccctggccttcatcaagagactgtgcaccctggccctgcacgtgctgcccaacagcagcatcggcatcctggccaccaccagaatcctgatgcacaccttccccaagaccgacctgctgctggacagcgagagccagggcagcggcgtgttcctgcccgagctggacgagcccgagtactgcaacgcccagaacaccgccctgtgggagctgcacgccctgagaagacactaccaccccatcgtgcagagattcgccgcccacctgatcgccggcgcccccagcgagggcagcggcgccctgaagcccgagctgagcagaagaagcgccaccgagctgttcgaggcctacagcatggccgagatgaccttcaacccccccgtggagagcagcaaccccaagatcaagggcaagttcctgcagggcgacagcttcctgaacgaggacctgaaccagctgatcaagagatacagcagcgaggtggccaccgagagccccctggacttcaccaagtacctgaagaccagcctgcactag

SEQ ID NO: 212154 - DNA, 2403 bp, Artificial Sequence
  derived and/or modified sequence
atgaaggccagaagaaacaagaagcagatccccagcttcagaaagctgatcaagaccagcaaggtgaagctggagaacaagctgaagaacaagcagttcaagcagcagagcaccctgaagaagtacagaaaggagcagagaaagctgagacaggccgtgaaggacgccgtgagcaagaagcccatccccctggagaaccccaaggagaagagacccggcaagagaatcgagagagaggaggaggaggaggaggaggccctgcccctggacatgatggacgaggacgacctgcagctgatgaaggacctgggccagagagtgagcttcctgaccagagacctgagcagcagcgagcccgtgcacgccaagaagagaaagcacgagagaatcatcgacaagtacgagaagatccccagaaccctgcagaccgcccccgagaaggagctgatccacctgctgcccatcaaggacaagagcggcatcatcccccagaccagagagaagcccgtgaccgacagcaacaaggacgaggaggaccaggaggaggagagagagctggaggaggagatcatcgaggaccccatccaggagctgaccatcgaggagcacctgatcgagagaaagaagaagctgcaggagaagaagatgcacatcgccgccctggccagcgccatcctgagcgaccccgagaacaacatcaagaagctgaaggagctgagaagcatgctgatggagcaggaccccgacgtggccgtgaccgtgagaaagctggtgatcgtgagcctgatggagctgttcaaggacatcacccccagctacaagatcagacccctgaccgaggccgagaagagcaccaagaccagaaaggagacccagaagctgagagagttcgaggagggcctggtgagccagtacaagttctacctggagaacctggagcagatggtgaaggactggaagcagagaaagctgaagaagagcaacgtggtgagcctgaaggcctacaagggcctggccgaggtggccgtgaagagcctgtgcgagctgctggtggccctgccccacttcaacttccacaacaacatcatcgtgctgatcgtgcccctgatgaacgacatgagcaagctgatcagcgagatgtgctgcgaggccgtgaagaagctgttcaagcaggacaagctgggccaggccagcctgggcgtgatcaaggtgatcagcggcttcgtgaagggcagaaactacgaggtgagacccgagatgctgaagaccttcctgtgcctgagaatcaaggaggtggaggtgaagaaggacaccgaggacatcaacaagcccaagaagttcatgaccttcaaggagaagagaaagagcctgagcagaatgcagagaaagtggaagaaggccgaggagaagctggagagagagctgagagaggccgaggccagcgagagcaccgagaagaagctgaagctgcacaccgagaccctgaacatcgtgttcgtgacctacttcagaatcctgaagaaggcccagagaagccccctgctgcccgccgtgctggagggcctggccaagttcgcccacctgatcaacgtggagttcttcgacgacctgctggtggtgctgcacaccctgatcgagagcggcgacctgagctaccaggagagcctgcactgcgtgcagaccgccttccacatcctgagcggccagggcgacgtgctgaacatcgaccccctgaagttctacacccacctgtacaagaccctgttcaagctgcacgccggcgccaccaacgagggcgtggagatcgtgctgcagtgcctggacgtgatgctgaccaagagaagaaagcaggtgagccagcagagagccctggccttcatcaagagactgtgcaccctggccctgcacgtgctgcccaacagcagcatcggcatcctggccaccaccagaatcctgatgcacaccttccccaagaccgacctgctgctggacagcgagagccagggcagcggcgtgttcctgcccgagctggacgagcccgagtactgcaacgcccagaacaccgccctgtgggagctgcacgccctgagaagacactaccaccccatcgtgcagagattcgccgcccacctgatcgccggcgcccccagcgagggcagcggcgccctgaagcccgagctgagcagaagaagcgccaccgagctgttcgaggcctacagcatggccgagatgaccttcaacccccccgtggagagcagcaaccccaagatcaagggcaagttcctgcagggcgacagcttcctgaacgaggacctgaaccagctgatcaagagatacagcagcgaggtggccaccgagagccccctggacttcaccaagtacctgaagaccagcctgcactag

SEQ ID NO: 212155 - DNA, 1506 bp, Artificial Sequence
  derived and/or modified sequence
atggagctgttcaaggacatcacccccagctacaagatcagacccctgaccgaggccgagaagagcaccaagaccagaaaggagacccagaagctgagagagttcgaggagggcctggtgagccagtacaagttctacctggagaacctggagcagatggtgaaggactggaagcagagaaagctgaagaagagcaacgtggtgagcctgaaggcctacaagggcctggccgaggtggccgtgaagagcctgtgcgagctgctggtggccctgccccacttcaacttccacaacaacatcatcgtgctgatcgtgcccctgatgaacgacatgagcaagctgatcagcgagatgtgctgcgaggccgtgaagaagctgttcaagcaggacaagctgggccaggccagcctgggcgtgatcaaggtgatcagcggcttcgtgaagggcagaaactacgaggtgagacccgagatgctgaagaccttcctgtgcctgagaatcaaggaggtggaggtgaagaaggacaccgaggacatcaacaagcccaagaagttcatgaccttcaaggagaagagaaagagcctgagcagaatgcagagaaagtggaagaaggccgaggagaagctggagagagagctgagagaggccgaggccagcgagagcaccgagaagaagctgaagctgcacaccgagaccctgaacatcgtgttcgtgacctacttcagaatcctgaagaaggcccagagaagccccctgctgcccgccgtgctggagggcctggccaagttcgcccacctgatcaacgtggagttcttcgacgacctgctggtggtgctgcacaccctgatcgagagcggcgacctgagctaccaggagagcctgcactgcgtgcagaccgccttccacatcctgagcggccagggcgacgtgctgaacatcgaccccctgaagttctacacccacctgtacaagaccctgttcaagctgcacgccggcgccaccaacgagggcgtggagatcgtgctgcagtgcctggacgtgatgctgaccaagagaagaaagcaggtgagccagcagagagccctggccttcatcaagagactgtgcaccctggccctgcacgtgctgcccaacagcagcatcggcatcctggccaccaccagaatcctgatgcacaccttccccaagaccgacctgctgctggacagcgagagccagggcagcggcgtgttcctgcccgagctggacgagcccgagtactgcaacgcccagaacaccgccctgtgggagctgcacgccctgagaagacactaccaccccatcgtgcagagattcgccgcccacctgatcgccggcgcccccagcgagggcagcggcgccctgaagcccgagctgagcagaagaagcgccaccgagctgttcgaggcctacagcatggccgagatgaccttcaacccccccgtggagagcagcaaccccaagatcaaggtgaccaccaagggctag

SEQ ID NO: 212156 - protein, 414 aa, Artificial Sequence [sequence omitted]

SEQ ID NO: 212157 - DNA, 1245 bp, Artificial Sequence
  derived and/or modified sequence
atgagcagccccgacgccggctacgccagcgacgaccagagccagacccagagcgccctgcccgccgtgatggccggcctgggcccctgcccctgggccgagagcctgagccccatcggcgacatgaaggtgaagggcgaggcccccgccaacagcggcgcccccgccggcgccgccggcagagccaagggcgagagcagaatcagaagacccatgaacgccttcatggtgtgggccaaggacgagagaaagagactggcccagcagaaccccgacctgcacaacgccgagctgagcaagatgctgggcaagagctggaaggccctgaccctggccgagaagagacccttcgtggaggaggccgagagactgagagtgcagcacatgcaggaccaccccaactacaagtacagacccagaagaagaaagcaggtgaagagactgaagagagtggagggcggcttcctgcacggcctggccgagccccaggccgccgccctgggccccgagggcggcagagtggccatggacggcctgggcctgcagttccccgagcagggcttccccgccggcccccccctgctgcccccccacatgggcggccactacagagactgccagagcctgggcgccccccccctggacggctaccccctgcccacccccgacaccagccccctggacggcgtggaccccgaccccgccttcttcgccgcccccatgcccggcgactgccccgccgccggcacctacagctacgcccaggtgagcgactacgccggcccccccgagccccccgccggccccatgcaccccagactgggccccgagcccgccggccccagcatccccggcctgctggccccccccagcgccctgcacgtgtactacggcgccatgggcagccccggcgccggcggcggcagaggcttccagatgcagccccagcaccagcaccagcaccagcaccagcaccacccccccggccccggccagcccagccccccccccgaggccctgccctgcagagacggcaccgaccccagccagcccgccgagctgctgggcgaggtggacagaaccgagttcgagcagtacctgcacttcgtgtgcaagcccgagatgggcctgccctaccagggccacgacagcggcgtgaacctgcccgacagccacggcgccatcagcagcgtggtgagcgacgccagcagcgccgtgtactactgcaactaccccgacgtgtag

SEQ ID NO: 212158 - DNA, 1245 bp, Artificial Sequence
  derived and/or modified sequence
atgagtagcccagacgccggctacgccagcgatgaccagagccaaacacagtctgcactacctgcagtgatggctggactgggcccctgcccttgggccgagtcactctcccctataggtgatatgaaggtaaagggagaggcacccgccaactcgggtgcgccagcaggggccgccggccgagccaagggagagtcaaggattcgccgccccatgaatgctttcatggtgtgggccaaagacgagaggaaacgattggctcaacagaaccccgacctgcacaatgcagagcttagtaagatgttgggaaagagttggaaggctctgaccctggccgagaaaagacctttcgttgaggaagccgaacgccttcgggttcagcatatgcaggatcatccgaactacaaatatcgaccaagaaggagaaaacaagtaaagcgtctgaagagagtcgaaggggggtttttacatgggcttgccgaaccacaggcagcagccctgggacctgaaggcggacgcgttgctatggatgggctgggcctgcagtttccagaacaggggtttcccgccgggccaccgcttctgcctccccacatgggtggacactatcgtgattgccagtcattgggcgcgcctccactcgatggctaccctctcccaacccctgacacatcaccgcttgacggagtggatcccgaccctgcctttttcgccgcacctatgcccggtgattgccccgccgcaggaacgtattcttacgcccaggtctcagattatgctggccctcctgagcctccggccggtcctatgcatcctaggctgggcccagagccagccgggcctagtatcccagggcttctagcacctccttcagcattgcacgtgtactatggtgcaatgggaagcccaggagccggcggcggcagaggtttccagatgcagccacagcaccagcaccaacatcagcatcaacatcacccccccggcccaggccagccttcgcccccccccgaagccttaccatgccgagacgggactgatccatctcagcccgctgagctccttggagaggtggatcgtaccgaattcgagcagtatcttcatttcgtctgcaagcccgagatgggccttccataccaggggcacgactctggggtgaacctcccggatagccacggcgcgatttctagcgtcgtgtccgatgcctcctccgctgtgtactactgtaattatcctgatgtatag

SEQ ID NO: 212159 - DNA, 1245 bp, Artificial Sequence
  derived and/or modified sequence
atgagcagcccagatgctggctacgccagtgatgaccagagccagacccagagcgccctgcctgctgtgatggccggcctgggcccctgcccctgggccgagagcctgagccccatcggggacatgaaggtgaagggggaggccccagccaacagcggggccccagctggagctgctggccgggccaagggggagagccgcatcagaagacccatgaatgccttcatggtgtgggccaaggatgagaggaagaggctggcccagcagaacccagacctgcacaatgctgagctgagcaagatgctgggcaagtcctggaaggccctgaccctggccgagaagaggccctttgtggaggaggccgagcggctgcgggtgcagcacatgcaggaccaccccaactacaagtaccggcccaggaggaggaagcaggtgaagaggctgaagagggtggagggcggcttcctgcacggcctggccgagccccaggccgccgccctgggccctgagggcggccgggtggccatggatggcctgggcctgcagtttcctgagcagggcttccctgctggcccccccctgctgcccccccacatgggcggccactacagagactgccagagcctgggcgccccacccctggatggctaccccctgcccaccccagacaccagccccctggatggagtggaccctgaccctgccttctttgctgcccccatgcctggggactgcccagctgctggcacctacagctatgcccaggtgtctgactatgccggccccccagagcccccagctggccccatgcacccccggctgggccctgagcctgctggccccagcatccctggcctgctggcccctccttctgccctgcacgtgtactatggagccatgggcagccctggagctgggggcggccggggcttccagatgcagccccagcaccagcaccagcaccagcaccagcaccaccccccaggccctggccagcccagccccccacctgaggccctgccctgcagagatggaacagaccccagccagcctgctgagctgctgggggaggtggacagaacagaatttgagcagtacctgcactttgtgtgcaagccagagatgggcctgccctaccagggccatgacagcggcgtgaacctgcctgacagccacggggccatcagctctgtggtgtctgatgccagcagcgctgtgtactactgcaactacccagatgtgtag

SEQ ID NO: 212160 - DNA, 1245 bp, Artificial Sequence
  derived and/or modified sequence
atgagcagccccgacgccggctacgccagcgacgaccagagccagacccagagtgcactgcccgcagtgatggcaggactcggaccctgtccatgggcagaatcactgagtcctatcggcgacatgaaggtgaaaggagaggcaccggcaaattcaggcgcacctgcaggggcagcaggccgcgccaagggcgaaagccggatcaggcggccgatgaacgctttcatggtctgggccaaggacgagaggaagaggctagcacagcagaatcccgatctgcataacgcagaactgagcaaaatgctgggcaagtcctggaaagcactgaccttggcagaaaagcgccccttcgtggaggaggcagaacgcctgagggtgcagcacatgcaggatcatcctaattacaagtatcgcccaagaaggagaaagcaagtgaagcggctgaagagggtagaaggcgggttcctgcacggactcgcagagccacaggccgctgccctcggccccgaaggggggcgggtggccatggatggtctcggcttgcagttccccgagcaggggtttcctgcagggccccccttgttaccgccacacatgggtggccactatcgcgattgccagagcctgggcgcccctcccctagacgggtatccgttgcctacacccgacacctcccccctcgacggagttgaccctgatccggcatttttcgcggctcctatgcccggggattgccctgccgcaggaacctattcatacgcccaggtgtccgattacgcggggccccctgagccacccgccgggcctatgcacccacgcttgggccctgagcccgctggccccagcatccctggtctgctggcccccccttctgccctgcatgtttactacggcgccatgggctcacctggcgccgggggaggacgcgggtttcagatgcagccccagcaccagcaccagcaccagcaccagcaccatccaccggggcccggacagccgtcgcctccaccagaagcactaccatgtagagacgggactgacccttctcagccagctgaactgctcggcgaagtggataggactgagtttgagcagtacttacacttcgtgtgtaaacccgagatgggccttccttatcaggggcacgattccggtgtgaacctgcctgattcccacggcgctatcagttctgtggtttccgacgcgtcttcggccgtctactactgcaactacccagacgtttag

SEQ ID NO: 212161 - DNA, 1245 bp, Artificial Sequence
  derived and/or modified sequence
atgtcttctcccgatgcaggctacgctagcgatgatcagtcacagactcaatcagccctccctgcggttatggctggacttggaccctgtccttgggcagagtccctgtcaccaatcggtgatatgaaggtcaaaggcgaggcacccgcaaatagcggtgcaccagccggtgctgccggaagagctaagggagaatccaggataagacgccctatgaacgcctttatggtgtgggccaaggacgaacggaagagactcgctcagcagaaccctgacctgcataatgcggaattgagcaagatgttgggaaaatcctggaaagccctcacactcgcagagaagaggccatttgttgaggaagcagagagactgagggtgcagcatatgcaggaccaccctaactataagtatcgcccaagaagaaggaagcaggtgaaacgtctgaaaagagttgaaggaggctttctccacggtcttgctgagccccaggcagctgccctggggccagagggcggaagagtggcgatggacggcctcggccttcagttcccagagcaaggcttcccggcagggcctccactcttgccaccgcacatgggtgggcactacagggattgccagagcttgggcgcaccccctttggacggctaccctttgcccactcccgacacaagcccgctcgatggagttgacccggacccggctttctttgccgctcccatgccaggtgattgccccgcagcgggaacctacagttatgcccaggtgtcagattatgcgggacctcctgagccaccggcaggtccaatgcatccacgtctcggacctgagccggctggaccatccatccccggtctactagcccctccctcagccctgcacgtgtactacggagccatgggctcacctggggctgggggtggtcgcggttttcagatgcagccccagcatcagcaccagcaccaacaccagcatcatccaccaggtccaggccagcctagtcctccccctgaggcactgccttgtagggatggcactgatccaagccagcctgcagagttgctgggagaggttgacaggactgaatttgagcagtatctccattttgtgtgcaaaccggagatgggactgccataccaaggtcacgattctggggtgaaccttcccgatagccacggcgctataagtagcgtagtgagcgatgcatcctctgcggtgtattactgtaattacccagatgtgtag

SEQ ID NO: 212162 - DNA, 2342 bp, Artificial Sequence
  derived and/or modified sequence
gcagtgtcactaggccggctgggggccctgggtacgctgtagaccagaccgcgacaggccagaacacgggcggcggcttcgggccgggagacccgcgcagccctcggggcatctcagtgcctcactccccaccccctcccccgggtcgggggaggcggcgcgtccggcggagggttgaggggagcggggcaggcctggagcgccatgagcagcccggatgcgggatacgccagtgacgaccagagccagacccagagcgcgctgcccgcggtgatggccgggctgggcccctgcccctgggccgagtcgctgagccccatcggggacatgaaggtgaagggcgaggcgccggcgaacagcggagcaccggccggggccgcgggccgagccaagggcgagtcccgtatccggcggccgatgaacgctttcatggtgtgggctaaggacgagcgcaagcggctggcgcagcagaatccagacctgcacaacgccgagttgagcaagatgctgggcaagtcgtggaaggcgctgacgctggcggagaagcggcccttcgtggaggaggcagagcggctgcgcgtgcagcacatgcaggaccaccccaactacaagtaccggccgcggcggcgcaagcaggtgaagcggctgaagcgggtggagggcggcttcctgcacggcctggctgagccgcaggcggccgcgctgggccccgagggcggccgcgtggccatggacggcctgggcctccagttccccgagcagggcttccccgccggcccgccgctgctgcctccgcacatgggcggccactaccgcgactgccagagtctgggcgcgcctccgctcgacggctacccgttgcccacgcccgacacgtccccgctggacggcgtggaccccgacccggctttcttcgccgccccgatgcccggggactgcccggcggccggcacctacagctacgcgcaggtctcggactacgctggccccccggagcctcccgccggtcccatgcacccccgactcggcccagagcccgcgggtccctcgattccgggcctcctggcgccacccagcgcccttcacgtgtactacggcgcgatgggctcgcccggggcgggcggcgggcgcggcttccagatgcagccgcaacaccagcaccagcaccagcaccagcaccaccccccgggccccggacagccgtcgccccctccggaggcactgccctgccgggacggcacggaccccagtcagcccgccgagctcctcggggaggtggaccgcacggaatttgaacagtatctgcacttcgtgtgcaagcctgagatgggcctcccctaccaggggcatgactccggtgtgaatctccccgacagccacggggccatttcctcggtggtgtccgacgccagctccgcggtatattactgcaactatcctgacgtgtgacaggtccctgatccgccccagcctgcaggccagaagcagtgttacacacttcctggaggagctaaggaaatcctcagactcctgggtttttgttgttgctgttgttgttttttaaaaggtgtgttggcatataatttatggtaatttattttgtctgccacttgaacagtttgggggggtgaggtttcatttaaaatttgttcagagatttgtttcccatagttggattgtcaaaaccctatttccaagttcaagttaactagctttgaatgtgtcccaaaacagcttcctccatttcctgaaagtttattgatcaaagaaatgttgtcctgggtgtgttttttcaatcttctaaaaaataaaatctggaatcctgcttttttgctctactagtacctctgtcacactagtcttatcaaaaaccagttcttaagatcaatgttaagtttattagttaatgtaaatttctcatcctcgaaaagggtgaacataaatgcctttaaggagtatatctaaaaataaacattaggatatctaagtttgatgtaattgtttcaggaaggaaaaaagaaaagcattctggaatgagcctacttcaagtaatcttagtttctaaaactaacagttaatattttcaattccagtatatcactttaagtagaaggggatgtccaagtaattttggttttctaactgttgaatcataagcttgacctgcccccagaggctttttggatgtttttatctgtgttttgccatctctttacactcctcgacattcagtttaccttaatcttcacatttttacaccttgggaagtggcaagcatcgctgggtttaagataaaggagtcacaaaaactaatcaaaataaaatttgcattatgacaactt

SEQ ID NO: 212163 - protein, 731 aa, Artificial Sequence
  derived and/or modified sequence
MSGSRQAGSGSAGTSPGSSAASSVTSASSSLSSSPSPPSVAVSAAALVSGGVAQAAGSGGLGGPVRPVLVAPAVSGSGGGAVSTGLSRHSCAARPSAGVGGSSSSLGSGSRKRPLLAPLCNGLINSYEDKSNDFVCPICFDMIEEAYMTKCGHSFCYKCIHQSLEDNNRCPKCNYVVDNIDHLYPNFLVNELILKQKQRFEEKRFKLDHSVSSTNGHRWQIFQDWLGTDQDNLDLANVNLMLELLVQKKKQLEAESHAAQLQILMEFLKVARRNKREQLEQIQKELSVLEEDIKRVEEMSGLYSPVSEDSTVPQFEAPSPSHSSIIDSTEYSQPPGFSGSSQTKKQPWYNSTLASRRKRLTAHFEDLEQCYFSTRMSRISDDSRTASQLDEFQECLSKFTRYNSVRPLATLSYASDLYNGSSIVSSIEFDRDCDYFAIAGVTKKIKVYEYDTVIQDAVDIHYPENEMTCNSKISCISWSSYHKNLLASSDYEGTVILWDGFTGQRSKVYQEHEKRCWSVDFNLMDPKLLASGSDDAKVKLWSTNLDNSVASIEAKANVCCVKFSPSSRYHLAFGCADHCVHYYDLRNTKQPIMVFKGHRKAVSYAKFVSGEEIVSASTDSQLKLWNVGKPYCLRSFKGHINEKNFVGLASNGDYIACGSENNSLYLYYKGLSKTLLTFKFDTVKSVLDKDRKEDDTNEFVSAVCWRALPDGESNVLIAANSQGTIKVLELV

SEQ ID NO: 212164 - DNA, 2196 bp, Artificial Sequence
  derived and/or modified sequence
atgagcgggtccagacaagcaggctccggaagcgcagggactagcccaggctcctccgccgctagctccgtcacaagtgcctcctccagcttaagcagctctccttctccgccttctgttgcagtatcggctgctgcattggtgtccggtggcgtggctcaggccgccggttccggcgggctgggcggccctgtaagacccgttcttgtggcccctgccgtatccgggtcaggcggaggggcggtctctaccgggctgtcaaggcatagctgcgccgcccgcccttcagccggcgtgggcgggtcttcatcatcgctcggctctggctctagaaagaggccattgctcgctcccctgtgtaatgggctgataaacagttatgaggataagagtaacgatttcgtttgcccgatttgttttgacatgatcgaggaagcctatatgacgaagtgcggccactcattttgctacaagtgcatccatcagagtttggaggacaacaataggtgtcctaagtgcaattatgtggttgacaacatcgaccatctgtacccaaacttcctggtcaatgagcttattttaaaacagaagcagcgctttgaggaaaaacgcttcaaactggatcacagtgtgagttctaccaacggccatagatggcagatattccaggactggctgggaaccgaccaagacaacctggacttagcaaacgtcaacctgatgctggaactgctcgtacaaaagaagaagcagctggaggctgagtcacatgctgcgcaactccaaatcctcatggagttcttgaaggttgctcgacgaaacaagagggagcaattggaacaaatccagaaagaactatcagtgctggaagaagacattaagagagtcgaggagatgtcaggcttatactcaccggtttccgaggattctacggtgccacagttcgaggccccaagcccatcacacagctctatcatcgatagcaccgaatattcgcagcctcctggctttagcggctctagtcagactaagaagcaaccatggtacaatagtacactggcctcccgtcggaaaagactaacagcgcattttgaagaccttgagcagtgctacttcagcacccgcatgtctaggattagcgacgacagtagaaccgcctctcagctggacgagttccaggagtgcctgtccaaattcacgagatacaatagcgtgaggcctctggccactttgagctacgcaagcgatctgtacaacggctctagcattgtctcatcaatagagttcgacagagattgtgactacttcgccattgcaggggtgacgaagaaaattaaggtgtacgagtatgatacggtgattcaggatgcggtggacattcactaccccgagaatgagatgacctgcaattcaaagatctcctgtatatcgtggtcgagctaccacaagaacttgctggcgtcttcagattatgagggaacggtgatcctttgggacggattcactggacagagatctaaggtgtaccaggaacacgagaaacggtgctggagcgtggactttaacctcatggatccaaagcttctggccagcgggagcgacgacgccaaagtcaagctatggagcacgaatctggataattccgtcgcctctatcgaggccaaggcgaacgtttgttgtgtaaagttctcaccttcttctcggtaccatctggcgttcggttgtgctgatcattgcgtgcactattacgatttacgaaatactaagcaaccaatcatggtgttcaaggggcaccggaaggccgtgtcctatgccaaatttgtctccggtgaagagatcgtgtcagcctccacggacagccagttgaaactatggaatgtcggcaaaccctactgcttgcgcagcttcaagggtcatataaatgagaaaaacttcgtgggactggccagtaatggggattacatcgcttgcggtagcgagaataattccttatacctgtattacaaaggcctgagtaagaccctgctgacattcaagttcgacactgttaaatcagtgctcgataaagacaggaaagaggacgacaccaatgaattcgttagcgcagtctgctggcgcgccctgccggatggtgagtcgaacgtgttaattgcggcgaattcacagggaactatcaaggtgctggagctggtgtag

SEQ ID NO: 212165 - DNA, 2196 bp, Artificial Sequence
  derived and/or modified sequence
atgagcggcagccggcaggccggcagcggcagcgctggcaccagccctggcagcagcgctgccagctctgtgaccagcgccagcagcagcctgagcagcagccccagccccccatctgtggccgtgtctgctgctgccctggtgtctggaggagtggcccaggccgccggcagcggcggcctgggcggccctgtgcggcctgtgctggtggccccagctgtgtctggcagcggcggcggcgctgtgtccacaggcctgagccgccacagctgtgccgcccggcccagcgctggggtgggcggcagcagcagcagcctgggcagcggcagcaggaagaggcccctgctggcccccctgtgcaatggcctcatcaacagctatgaggacaagagcaatgactttgtgtgccccatctgctttgacatgattgaggaggcctacatgaccaagtgtggccacagcttctgctacaagtgcatccaccagagcctggaggacaacaaccgctgccccaagtgcaactacgtggtggacaacatcgaccacctgtaccccaacttcctggtgaatgagctgatcctgaagcagaagcagagatttgaggagaagcgcttcaagctggaccacagcgtgagcagcaccaacggccaccgctggcagatcttccaggactggctgggcacagaccaggacaacctggacctggccaacgtgaacctgatgctggagctgctggtgcagaagaagaagcagctggaggccgagagccacgccgcccagctgcagatcctgatggagttcctgaaggtggcccggaggaacaagcgggagcagctggagcagatccagaaggagctgtctgtgctggaggaggacatcaagagggtggaggagatgagcggcctgtacagccctgtgtctgaggacagcacagtgccccagtttgaggcccccagccccagccacagcagcatcatcgacagcacagagtacagccagcccccaggcttcagcggcagcagccagaccaagaagcagccctggtacaacagcaccctggccagcaggaggaagaggctgacagcccactttgaggacctggagcagtgctacttcagcaccaggatgagccgcatcagtgatgacagcaggacagccagccagctggatgagttccaggagtgcctgagcaagttcacccgctacaacagcgtgcggcccctggccaccctgtcctatgccagtgacctgtacaacggcagcagcatcgtgagcagcattgaatttgaccgggactgtgactactttgccatcgccggcgtgaccaagaagatcaaggtgtatgaatatgacaccgtcatccaggatgctgtggacatccactacccagaaaatgagatgacctgcaacagcaagatcagctgcatctcctggagcagctaccacaagaacctgctggccagcagtgactatgagggcaccgtcatcctgtgggatggcttcaccggccagaggagcaaggtgtaccaggagcacgagaagcgctgctggagcgtggacttcaacctgatggaccccaagctgctggccagcggcagtgatgatgccaaggtgaagctgtggagcaccaacctggacaacagcgtggccagcattgaggccaaggccaacgtgtgctgcgtgaagttcagccccagcagccgctaccacctggccttcggctgtgccgaccactgtgtgcactactatgacctgaggaacaccaagcagcccatcatggtgttcaagggccacaggaaggctgtgtcctatgccaagtttgtgtctggagaggagatcgtgtctgccagcacagacagccagctgaagctgtggaatgtgggcaagccctactgcctgcgctccttcaagggccacatcaatgagaagaactttgtgggcctggccagcaatggagactacatcgcctgtggcagcgagaacaacagcctgtacctgtactacaagggcctgagcaagaccctgctgaccttcaagtttgacacagtgaagtctgtgctggacaaggacagaaaagaagatgacaccaatgaatttgtgtctgctgtgtgctggagggccctgcctgatggagagagcaatgtgctgattgctgccaacagccagggcaccatcaaggtgctggagctggtgtag

SEQ ID NO: 212166 - DNA, 2196 bp, Artificial Sequence
  derived and/or modified sequence
atgagcggcagccggcaggccggcagcggcagcgccggcaccagcccaggctcaagtgccgcttccagtgtcacctctgcttctagtagcctttcctcatcccccagcccgccctcagtggccgtctcagctgcagcactcgtatccggtggagtggcacaggccgccgggtccggcgggctgggcggacctgtccgcccagtgctcgtggctccagccgtgtcagggtccggtggcggcgcagtgtccaccggcctcagccggcacagttgcgcagctaggccttcagccggcgtgggtggctcttcctcttcactgggctcagggagccgcaaacgcccacttctggcccccctctgtaacggacttattaacagttatgaagacaagagtaacgacttcgtctgtccaatttgtttcgacatgatcgaggaagcttacatgaccaaatgcgggcattctttctgttacaagtgtattcaccagtctctggaggacaacaataggtgtccgaagtgtaactacgtggtggacaatatcgatcatctgtaccccaactttcttgtcaacgagctgatcctcaaacaaaagcagagattcgaggaaaagcggtttaagttggatcattcagtgtcgagcaccaatggccataggtggcagatctttcaggattggctgggtactgatcaggacaatcttgatctggcgaacgtcaatctgatgctggagctgctggttcagaaaaagaagcaactggaagcagaaagtcacgccgctcaacttcagatcctgatggaatttctcaaagtcgcgagacgaaataagcgggaacagttagagcaaatccagaaagagttgtccgttctggaggaagacattaagagggtcgaagaaatgagtggattgtatagtccggtatctgaggattccacggttccccagttcgaagccccctctccatctcatagctccatcattgattcgacagagtatagtcagccacccggcttcagtggttcctctcagactaaaaagcagccttggtacaattccaccctggcatcccggagaaagcggctcacagctcacttcgaggacctggagcagtgctacttctcgactcgaatgagcaggatctctgacgatagtcgcaccgctagccagctggatgagttccaggaatgcctcagcaagttcactagatacaattctgtacgacctctggccactctctcgtatgcatctgacttatacaacggcagctccattgtcagtagtattgagtttgaccgcgactgcgattactttgctatcgcgggggtgacgaaaaagatcaaagtttatgagtatgatacggtgatacaggacgcagtggacatccactatccggaaaatgaaatgacttgcaactctaaaatctcctgtatttcctggtcttcatatcataagaacctcttagcctccagtgattatgaaggcaccgttatcctgtgggatggctttaccgggcagaggtccaaggtataccaggaacacgaaaagagatgttggtccgtggactttaatctgatggacccaaaactgctggccagtggtagtgacgacgccaaagtaaaactttggagcacaaatctcgacaattctgtggcctccatcgaggccaaggcaaatgtgtgctgcgttaagttctccccttcttcaagatatcacctcgcatttggatgcgctgaccactgcgtacattattatgatttgcgtaatacaaaacaacccatcatggtctttaaagggcatcggaaggctgtatcctatgctaagttcgtttccggtgaggagattgtgtctgcttcgacagactctcagctcaaactgtggaatgtgggaaaaccttactgtctgaggagttttaaagggcatatcaacgaaaaaaattttgtcggactggcctctaacggggactacattgcctgtggctccgagaataattcactgtacctgtattataagggcttaagtaagaccctgctgacctttaagtttgatacggttaagtccgtgctcgacaaagaccgtaaagaggacgacactaacgaattcgtgagcgcagtatgctggcgggctctgccggacggcgaaagcaatgttttaattgccgccaattcccagggcaccattaaagtgctcgagttggtatag

SEQ ID NO: 212167 - DNA, 2196 bp, Artificial Sequence
  derived and/or modified sequence
atgtccggatcacgacaggcgggttcggggtccgccggaaccagtcccggttcttcagctgcctcaagtgttaccagtgcttccagtagtctcagcagtagcccgtctccaccttcagtcgctgtgtccgcagccgcacttgtctccggcggtgtcgcccaagccgcaggtagcggagggctgggaggcccagtaaggccagtcttggtggctccagcggtctccgggagtggtggcggagctgtgtccacagggctgtcacgccattcctgcgctgccagaccctccgcaggggtgggtggctccagttcatcccttggctccggcagtcggaaacgccctctgctggcacccctgtgcaatgggctcatcaacagctacgaagacaagtccaacgattttgtctgcccaatttgcttcgacatgattgaggaggcgtatatgacaaagtgcggacacagcttctgttataagtgcatacaccagtcattagaggacaataaccgctgtcctaagtgtaattacgtggtggacaacattgatcacctttaccccaactttcttgtaaatgagctcatactcaaacaaaaacagcggttcgaggagaagcggtttaagctcgatcattctgtgtcctcaacaaatggtcatcgctggcagatttttcaggactggctcggcactgaccaggataacctggacctggcaaacgtgaaccttatgctggaactcctagtgcagaagaagaagcaattagaggcagagtctcatgccgctcagttacagattttgatggagtttttaaaggtggcacgccgtaacaagcgggagcagcttgagcagatccaaaaggaactgtcagttttagaggaagacatcaagcgcgtggaggagatgtccggactctattcgccagtgagcgaggactctactgtgccccagtttgaagcccctagcccttctcactccagcattatcgactctacagaatattcccaacctccgggattctccggtagtagccagaccaagaaacagccctggtacaactctaccctcgcaagccgacggaaaaggctgacagctcatttcgaggatctggagcaatgttacttcagcacccgcatgagtcgaataagcgatgactcaaggacggctagtcagctggatgaatttcaagagtgtttgtcaaagttcactcggtacaattcagtgcgccctcttgctacactttcctatgcttctgatttgtataacggatcatccattgtgtccagtatcgagtttgaccgcgattgcgactatttcgcaattgccggagtgactaaaaagatcaaggtttacgaatacgacacggtgatccaagacgccgtggacatccattatcctgagaatgaaatgacttgtaactctaagatctcatgtatttcatggagtagctatcacaagaatctactggcttcgtcagactacgaggggacagtgatcctctgggatggattcacaggccagcgctctaaggtctaccaggaacatgaaaaacggtgctggagcgtggattttaacctcatggatccaaagctattggcgtcagggagtgacgacgccaaggtgaaattgtggtcgacgaacctggacaattccgttgcgagtattgaagcaaaggctaatgtatgctgcgtcaaattctctccgtccagtcgttaccatctggccttcggctgcgcggatcattgcgtccactattatgacctgcgcaacaccaaacagcccataatggtcttcaaaggacaccgaaaagcggtcagctacgctaagtttgtgtcaggggaggagattgtgtctgcttctaccgattcacaattgaaactctggaatgtgggaaagccatactgcctcagatccttcaagggccacattaatgagaagaacttcgttggacttgcctccaatggggactacatcgcctgcggatccgaaaataattcactatacttatattacaaggggctgagtaagacactgcttacattcaaattcgacacagtcaagtccgtgctggataaagaccggaaggaggatgacaccaacgagtttgtttccgccgtgtgctggcgggcattgcccgatggagagtccaatgtcctcatagccgctaactcacaggggacaatcaaggttttggagctcgtatag

SEQ ID NO: 212168 - DNA, 2566 bp, Artificial Sequence
  derived and/or modified sequence
gggaccgcggtggcggcggcggcctcgacagcggtagtgccttctactccgcttttttagtttcctccgccccctcccgtgggacgctgttgtgtggctgccttaaaaaaaaacgcaactttattgttcctcagccccacctccggctcggcgggcgtcctcaggatgcactgaggctgaggggaggggaggcggcggagggtcgaggtcgcggtccctctcctccgagcgcccggctggaggggagggagtcacgatgtctggtagccgccaggccgggtcgggctccgctgggacaagccccgggtcctcggcggcctcctcggtgacttccgcctcctcgtctttatcctcttccccgtcgccgccttccgtggcggtttcggcggcagcgctggtgtccggcggggtggcccaggccgccggctcgggcggcctcgggggcccggtgcggcctgtgttggtggcgcccgccgtatcgggtagcggcggcggggcggtgtccacgggcctgtcccggcacagctgcgcggccaggcccagcgccggcgtaggaggcagcagctccagcctaggcagcggcagcaggaagcgacctctcctcgcccccctctgcaacgggctcatcaactcctacgaggacaaaagcaacgacttcgtatgccccatctgctttgatatgattgaagaagcatacatgacaaaatgtggccacagcttttgctacaagtgtattcatcagagtttggaggacaataatagatgtcccaagtgtaactatgttgtggacaatattgaccatctgtatcctaatttcttggtgaatgaactcattcttaaacagaagcaaagatttgaggaaaagaggttcaaattggaccactcagtgagtagcaccaatggccacaggtggcagatatttcaagattggttgggaactgaccaagataaccttgatttggccaatgtcaatcttatgttggagttactagtgcagaagaagaaacaactggaagcagaatcacatgcagcccaactacagattcttatggaattcctcaaggttgcaagaagaaataagagagagcaactggaacagatccagaaggagctaagtgttttggaagaggatattaagagagtggaagaaatgagtggcttatactctcctgtcagtgaggatagcacagtgcctcaatttgaagctccttctccatcacacagtagtattattgattccacagaatacagccaacctccaggtttcagtggcagttctcaggctggagtgcaatggcgctatcttggctcactgcaacctccacctcccaggtacaagcgattctcctgcctcaccctcccaagtagctgggattaccggcgcctgcctccacacctgacaaagaaacagccttggtataatagcacgttagcatcaagacgaaaacgacttactgctcattttgaagacttggagcagtgttacttttctacaaggatgtctcgtatctcagatgacagtcgaactgcaagccagttggatgaatttcaggaatgcttgtccaagtttactcgatataattcagtacgacctttagccacattgtcatatgctagtgatctctataatggttccagtatagtctctagtattgaatttgaccgggattgtgactattttgcgattgctggagttacaaagaagattaaagtctatgaatatgacactgtcatccaggatgcagtggatattcattaccctgagaatgaaatgacctgcaattcgaaaatcagctgtatcagttggagtagttaccataagaacctgttagctagcagtgattatgaaggcactgttattttatgggatggattcacaggacagaggtcaaaggtctatcaggagcatgagaagaggtgttggagtgttgactttaatttgatggatcctaaactcttggcttcaggttctgatgatgcaaaagtgaagctgtggtctaccaatctagacaactcagtggcaagcattgaggcaaaggctaatgtgtgctgtgttaaattcagcccctcttccagataccatttggctttcggctgtgcagatcactgtgtccactactatgatcttcgtaacactaaacagccaatcatggtattcaaaggacaccgtaaagcagtctcttatgcaaagtttgtgagtggtgaggaaattgtctctgcctcaacagacagtcagctaaaactgtggaatgtagggaaaccatactgcctacgttccttcaagggtcatatcaatgaaaaaaactttgtaggcctggcttccaatggagattatatagcttgtggaagtgaaaataactctctctacctgtactataaaggactttctaagactttgctaacttttaagtttgatacagtcaaaagtgttctcgacaaagaccgaaaagaagatgatacaaatgaatttgttagtgctgtgtgctggagggcactaccagatggggagtccaatgtgctgattgctgctaacagtcagggtacaattaaggttctcgcactgtta

SEQ ID NO: 212169 - DNA, 3033 bp, Artificial Sequence
  derived and/or modified sequence
cacctataccattcattccagtctcctcaattctttcactgtattaagacggcctgccctctggcacgttttctggaacgaaagcggcttgggacagacagactcccttcgccagggagccccgaccccgagggcgcgccctgagcgtctgagcgcagccccgctgcgtccccagttgtatcccccgccacgcccgcctcttccgccgctcgcgcgcgcgcgcacggccggccacggcgcgccggggttggctgctacagggaccgcggtggcggcggcggcctcgacagcggtagtgccttctactccgcttttttagtttcctccgccccctcccgtgggacgctgttgtgtggctgccttaaaaaaaaacgcaactttattgttcctcagccccacctccggctcggcgggcgtcctcaggatgcactgaggctgaggggaggggaggcggcggagggtcgaggtcgcggtccctctcctccgagcgcccggctggaggggagggagtcacgatgtctggtagccgccaggccgggtcgggctccgctgggacaagccccgggtcctcggcggcctcctcggtgacttccgcctcctcgtctttatcctcttccccgtcgccgccttccgtggcggtttcggcggcagcgctggtgtccggcggggtggcccaggccgccggctcgggcggcctcgggggcccggtgcggcctgtgttggtggcgcccgccgtatcgggtagcggcggcggggcggtgtccacgggcctgtcccggcacagctgcgcggccaggcccagcgccggcgtaggaggcagcagctccagcctaggcagcggcagcaggaagcgacctctcctcgcccccctctgcaacgggctcatcaactcctacgaggacaaaagcaacgacttcgtatgccccatctgctttgatatgattgaagaagcatacatgacaaaatgtggccacagcttttgctacaagtgtattcatcagagtttggaggacaataatagatgtcccaagtgtaactatgttgtggacaatattgaccatctgtatcctaatttcttggtgaatgaactcattcttaaacagaagcaaagatttgaggaaaagaggttcaaattggaccactcagtgagtagcaccaatggccacaggtggcagatatttcaagattggttgggaactgaccaagataaccttgatttggccaatgtcaatcttatgttggagttactagtgcagaagaagaaacaactggaagcagaatcacatgcagcccaactacagattcttatggaattcctcaaggttgcaagaagaaataagagagagcaactggaacagatccagaaggagctaagtgttttggaagaggatattaagagagtggaagaaatgagtggcttatactctcctgtcagtgaggatagcacagtgcctcaatttgaagctccttctccatcacacagtagtattattgattccacagaatacagccaacctccaggtttcagtggcagttctcagacaaagaaacagccttggtataatagcacgttagcatcaagacgaaaacgacttactgctcattttgaagacttggagcagtgttacttttctacaaggatgtctcgtatctcagatgacagtcgaactgcaagccagttggatgaatttcaggaatgcttgtccaagtttactcgatataattcagtacgacctttagccacattgtcatatgctagtgatctctataatggttccagtatagtctctagtattgaatttgaccgggattgtgactattttgcgattgctggagttacaaagaagattaaagtctatgaatatgacactgtcatccaggatgcagtggatattcattaccctgagaatgaaatgacctgcaattcgaaaatcagctgtatcagttggagtagttaccataagaacctgttagctagcagtgattatgaaggcactgttattttatgggatggattcacaggacagaggtcaaaggtctatcaggagcatgagaagaggtgttggagtgttgactttaatttgatggatcctaaactcttggcttcaggttctgatgatgcaaaagtgaagctgtggtctaccaatctagacaactcagtggcaagcattgaggcaaaggctaatgtgtgctgtgttaaattcagcccctcttccagataccatttggctttcggctgtgcagatcactgtgtccactactatgatcttcgtaacactaaacagccaatcatggtattcaaaggacaccgtaaagcagtctcttatgcaaagtttgtgagtggtgaggaaattgtctctgcctcaacagacagtcagctaaaactgtggaatgtagggaaaccatactgcctacgttccttcaagggtcatatcaatgaaaaaaactttgtaggcctggcttccaatggagattatatagcttgtggaagtgaaaataactctctctacctgtactataaaggactttctaagactttgctaacttttaagtttgatacagtcaaaagtgttctcgacaaagaccgaaaagaagatgatacaaatgaatttgttagtgctgtgtgctggagggcactaccagatggggagtccaatgtgctgattgctgctaacagtcagggtacaattaaggtgctagaattggtatgaagggttaactcaagtcaaattgtacttgatcctgctgaaatacatctgcagctgacaatgagagaagaaacagaaaatgtcatgtgatgtctctccccaaagtcatcatgggttttggatttgttttgaatatttttttctttttttcttttccctcctttatgacctttgggacattgggaatacccagccaactctccaccatcaatgtaactccatggacattgctgctcttggtggtgttatctaatttttgtgatagggaaacaaattcttttgaataaaaataaataacaaaacaataaaagtttattgagccaca

SEQ ID NO: 212170 - DNA, 2196 bp, Artificial Sequence
  derived and/or modified sequence
atgagcggcagcagacaggccggcagcggcagcgccggcaccagccccggcagcagcgccgccagcagcgtgaccagcgccagcagcagcctgagcagcagccccagcccccccagcgtggccgtgagcgccgccgccctggtgagcggcggcgtggcccaggccgccggcagcggcggcctgggcggccccgtgagacccgtgctggtggcccccgccgtgagcggcagcggcggcggcgccgtgagcaccggcctgagcagacacagctgcgccgccagacccagcgccggcgtgggcggcagcagcagcagcctgggcagcggcagcagaaagagacccctgctggcccccctgtgcaacggcctgatcaacagctacgaggacaagagcaacgacttcgtgtgccccatctgcttcgacatgatcgaggaggcctacatgaccaagtgcggccacagcttctgctacaagtgcatccaccagagcctggaggacaacaacagatgccccaagtgcaactacgtggtggacaacatcgaccacctgtaccccaacttcctggtgaacgagctgatcctgaagcagaagcagagattcgaggagaagagattcaagctggaccacagcgtgagcagcaccaacggccacagatggcagatcttccaggactggctgggcaccgaccaggacaacctggacctggccaacgtgaacctgatgctggagctgctggtgcagaagaagaagcagctggaggccgagagccacgccgcccagctgcagatcctgatggagttcctgaaggtggccagaagaaacaagagagagcagctggagcagatccagaaggagctgagcgtgctggaggaggacatcaagagagtggaggagatgagcggcctgtacagccccgtgagcgaggacagcaccgtgccccagttcgaggcccccagccccagccacagcagcatcatcgacagcaccgagtacagccagccccccggcttcagcggcagcagccagaccaagaagcagccctggtacaacagcaccctggccagcagaagaaagagactgaccgcccacttcgaggacctggagcagtgctacttcagcaccagaatgagcagaatcagcgacgacagcagaaccgccagccagctggacgagttccaggagtgcctgagcaagttcaccagatacaacagcgtgagacccctggccaccctgagctacgccagcgacctgtacaacggcagcagcatcgtgagcagcatcgagttcgacagagactgcgactacttcgccatcgccggcgtgaccaagaagatcaaggtgtacgagtacgacaccgtgatccaggacgccgtggacatccactaccccgagaacgagatgacctgcaacagcaagatcagctgcatcagctggagcagctaccacaagaacctgctggccagcagcgactacgagggcaccgtgatcctgtgggacggcttcaccggccagagaagcaaggtgtaccaggagcacgagaagagatgctggagcgtggacttcaacctgatggaccccaagctgctggccagcggcagcgacgacgccaaggtgaagctgtggagcaccaacctggacaacagcgtggccagcatcgaggccaaggccaacgtgtgctgcgtgaagttcagccccagcagcagataccacctggccttcggctgcgccgaccactgcgtgcactactacgacctgagaaacaccaagcagcccatcatggtgttcaagggccacagaaaggccgtgagctacgccaagttcgtgagcggcgaggagatcgtgagcgccagcaccgacagccagctgaagctgtggaacgtgggcaagccctactgcctgagaagcttcaagggccacatcaacgagaagaacttcgtgggcctggccagcaacggcgactacatcgcctgcggcagcgagaacaacagcctgtacctgtactacaagggcctgagcaagaccctgctgaccttcaagttcgacaccgtgaagagcgtgctggacaaggacagaaaggaggacgacaccaacgagttcgtgagcgccgtgtgctggagagccctgcccgacggcgagagcaacgtgctgatcgccgccaacagccagggcaccatcaaggtgctggagctggtgtag

SEQ ID NO: 212171 - protein, 490 aa, Artificial Sequence
  derived and/or modified sequence
MEGQDEVSAREQHFHSQVRESTICFLLFAILYVVSYFIITRYKRKSDEQEDEDAIVNRISLFLSTFTLAVSAGAVLLLPFSIISNEILLSFPQNYYIQWLNGSLIHGLWNLASLFSNLCLFVLMPFAFFFLESEGFAGLKKGIRARILETLVMLLLLALLILGIVWVASALIDNDAASMESLYDLWEFYLPYLYSCISLMGCLLLLLCTPVGLSRMFTVMGQLLVKPTILEDLDEQIYIITLEEEALQRRLNGLSSSVEYNIMELEQELENVKTLKTKLERRKKASAWERNLVYPAVMVLLLIETSISVLLVACNILCLLVDETAMPKGTRGPGIGNASLSTFGFVGAALEIILIFYLMVSSVVGFYSLRFFGNFTPKKDDTTMTKIIGNCVSILVLSSALPVMSRTLGITRFDLLGDFGRFNWLGNFYIVLSYNLLFAIVTTLCLVRKFTSAVREELFKALGLHKLHLPNTSRDSETAKPSVNGHQKAL

SEQ ID NO: 212172 - protein, 531 aa, Artificial Sequence
  derived and/or modified sequence
MEGQDEVSAREQHFHSQVRESTICFLLFAILYVVSYFIITRYKRKSDEQEDEDAIVNRISLFLSTFTLAVSAGAVLLLPFSIISNEILLSFPQNYYIQWLNGSLIHGLWNLASLFSNLCLFVLMPFAFFFLESEGFAGLKKGIRARILETLVMLLLLALLILGIVWVASALIDNDAASMESLYDLWEFYLPYLYSCISLMGCLLLLLCTPVGLSRMFTVMGQLLVKPTILEDLDEQIYIITLEEEALQRRLNVGMLCAGNPEVATGRQVPEEQAGQLLLGKWIQEGGDMIANPRLSSSVEYNIMELEQELENVKTLKTKLERRKKASAWERNLVYPAVMVLLLIETSISVLLVACNILCLLVDETAMPKGTRGPGIGNASLSTFGFVGAALEIILIFYLMVSSVVGFYSLRFFGNFTPKKDDTTMTKIIGNCVSILVLSSALPVMSRTLGITRFDLLGDFGRFNWLGNFYIVLSYNLLFAIVTTLCLVRKFTSAVREELFKALGLHKLHLPNTSRDSETAKPSVNGHQKAL

SEQ ID NO: 212173 - protein, 529 aa, Artificial Sequence
  derived and/or modified sequence
GQDEVSAREQHFHSQVRESTICFLLFAILYVVSYFIITRYKRKSDEQEDEDAIVNRISLFLSTFTLAVSAGAVLLLPFSIISNEILLSFPQNYYIQWLNGSLIHGLWNLASLFSNLCLFVLMPFAFFFLESEGFAGLKKGIRARILETLVMLLLLALLILGIVWVASALIDNDAASMESLYDLWEFYLPYLYSCISLMGCLLLLLCTPVGLSRMFTVMGQLLVKPTILEDLDEQIYIITLEEEALQRRLNVGMLCAGNPEVATGRQVPEEQAGQLLLGKWIQEGGDMIANPRLSSSVEYNIMELEQELENVKTLKTKLERRKKASAWERNLVYPAVMVLLLIETSISVLLVACNILCLLVDETAMPKGTRGPGIGNASLSTFGFVGAALEIILIFYLMVSSVVGFYSLRFFGNFTPKKDDTTMTKIIGNCVSILVLSSALPVMSRTLGITRFDLLGDFGRFNWLGNFYIVLSYNLLFAIVTTLCLVRKFTSAVREELFKALGLHKLHLPNTSRDSETAKPSVNGHQKAL

SEQ ID NO: 212174 - DNA, 1473 bp, Artificial Sequence
  derived and/or modified sequence
atggagggtcaagacgaggtgtccgctagggagcaacactttcacagtcaggttcgcgaaagcacaatatgcttcctgctgttcgccatcctctatgtggtgagttatttcatcataacacggtacaaacggaagtcggacgagcaggaagacgaagacgcgatcgttaatagaatctctttgtttctatcgacattcacactggcggtctccgcgggagccgtcttgctactccccttttccatcatctcgaacgagatcctgctcagcttcccccagaattactatatacaatggctcaacggcagccttattcacggtctctggaatctcgcatccttgttttcgaatctctgtctcttcgtcttgatgccctttgccttcttcttcctcgaatccgaggggttcgctgggctaaagaaaggcatacgtgcacgaattttggaaaccctggtgatgctgctcctcctagcgctgctgatcttgggcattgtgtgggtggcttcggcactgatagacaacgatgcggcttctatggagagtctctatgacctttgggagttttacctcccctacttgtacagctgcatatctctgatgggctgtcttctcctgctgctgtgcaccccagtgggtctaagccgcatgttcactgtgatgggccagctgctcgtgaagcccacaattctggaggatctggatgaacagatttatattatcaccctagaggaggaagccctccagagaaggctgaatgggctttcatctagcgtagagtacaatattatggagctcgaacaagaactcgaaaatgtcaaaacactgaaaaccaagcttgaaaggaggaaaaaggcatcggcttgggagcgtaacctcgtgtacccagccgtaatggtgctcctactgattgagaccagtataagtgtactccttgtagcctgcaacatactgtgtctgctcgtggacgagactgccatgccgaaaggtacccgggggccaggaatcgggaatgcctctctttccacgtttggcttcgtcggcgccgccctagagatcatcttgatcttttacctcatggtgagctcagttgtggggttttactccctgcgcttttttgggaattttacgccaaagaaagacgacacaaccatgacaaaaattatcgggaactgcgtctctatattggtcctctcttctgccctgcccgttatgagccgcactctggggatcacacgcttcgacctccttggggattttggccgatttaactggctgggaaatttctacatagtactctcttacaatctgttgttcgccattgtcactacactttgtctggtccgtaaattcacatccgccgtccgtgaggagttatttaaggccctaggactgcataagcttcatctgccaaacacttcccgcgacagcgaaaccgctaaacccagtgtgaatggtcaccagaaagccctgtag

SEQ ID NO: 212175 - DNA, 1596 bp, Artificial Sequence
  derived and/or modified sequence
atggagggccaggatgaggtcagtgcacgcgagcagcacttccactctcaggttagggaatccactatctgcttcctgctgttcgccatcttgtatgtggtatcttatttcataattactcgctataaaagaaaatccgatgagcaggaggacgaggacgctattgttaataggatatctctgtttttgagcactttcacccttgccgtatctgccggggctgtgctcttacttccgttctctatcatttccaatgagatcctgctctcgttcccccagaattactacattcagtggttgaacggaagccttattcatggcctgtggaacctggcgtccctgttctctaacctatgtctgtttgtcctgatgccctttgccttttttttcttagagagcgagggattcgctggactcaaaaagggaatccgcgcccgcatccttgagaccctcgtaatgttactgctgcttgccctcctaattctggggatcgtctgggtggcctctgctctcatcgacaacgacgctgcgtcaatggagagcctgtacgacctgtgggaattttacttgccatatctgtacagctgcatttctttgatgggctgcttgttgttactcctgtgtacccccgtgggactgtctaggatgttcacagtgatgggacagctgctggtgaagccaaccatcctggaggacctcgacgagcagatctacattattacactggaagaggaagcactgcagcgacgtctgaacgtcgggatgctgtgtgccggcaatcccgaggtcgccaccggcaggcaggtccccgaagaacaagctggccagctccttctcggaaagtggatccaagaaggaggagacatgatagccaatcctagactgtccagttctgtcgaatacaacatcatggagctcgaacaggaactggaaaacgtaaagacactcaaaaccaagcttgaacgacgaaaaaaggccagcgcttgggagaggaatcttgtttatccagcagtgatggtcctccttttgattgaaacaagtataagcgtcttgctcgtggcctgcaatatattgtgcctgttggtggacgagactgctatgccgaaggggaccagaggacctgggatcggtaacgcctccctctccaccttcggcttcgtgggtgcagctctggaaataattctgattttttatttgatggtatcttctgtagtgggtttttattctcttcgctttttcgggaattttacacctaaaaaggacgacactacgatgactaagatcatcggcaactgcgtgagcattctggtacttagctccgctttaccagtgatgtccagaactttgggtattaccagatttgatctgctgggcgactttgggaggttcaattggttaggaaacttctatatagtgctgtcatataacctcctgttcgccatcgtcactaccctctgcctcgtgcgcaaattcacgtccgccgtgcgcgaggagctattcaaagcgctggggctgcacaagctgcatctgcccaatacatctcgcgatagtgagacagcgaagcccagcgtgaacggccaccagaaggccctgtag

SEQ ID NO: 212176 - DNA, 1590 bp, Artificial Sequence
  derived and/or modified sequence
ggccaggatgaggttagcgccagagagcagcacttccactctcaggtgagagagtctaccatctgcttcctgctcttcgctatactttacgttgttagttattttatcatcaccaggtacaaacgcaagagcgatgagcaggaggatgaggacgctattgtgaatagaattagtttattcctctctaccttcactttggccgtcagtgccggggccgtcttactgctgccatttagtataattagcaatgagattctgttatcattccctcagaactattacattcagtggctgaatgggtcactgattcacggcctttggaatctggctagcctcttctcgaatctgtgtcttttcgtgctaatgccattcgctttctttttcctcgagtctgaaggcttcgccggcctcaagaaaggcattagagcccggatattggaaactctggtgatgctgttacttctcgccctgctgattctgggaatcgtgtgggtggccagtgcacttattgataatgatgcagccagtatggaatctctatacgacctttgggagttttatctgccatatctgtatagctgtatctccctgatgggctgtctgttgctgctgctgtgcaccccagtgggcctgagtcgcatgtttaccgttatgggacaattgctggtcaaacctacaatccttgaagaccttgatgagcagatttatatcattactctcgaagaggaggcgcttcagaggcggctgaacgtcgggatgttgtgtgccgggaacccggaggtggctaccggccgccaggtccccgaggaacaagctggccagttactacttgggaagtggatccaggagggaggcgacatgatcgcaaaccccagactgtcaagcagtgtggagtacaacattatggagttagaacaagaacttgagaatgttaagacactgaagaccaagttagagcggagaaagaaagcatcagcatgggagagaaacttagtgtaccctgctgtgatggtgctgctactcatagaaacatcaatatccgtcttgctggtggcttgtaatattctttgtctgctcgtcgacgaaacagctatgcccaagggcactaggggtcccggcattggaaacgccagcctgagcacctttggtttcgtcggggctgcactggaaatcatcttgatcttttacctgatggtgtcgtccgtggtgggcttctattctctacgattttttggtaactttacccctaaaaaagacgatactactatgactaaaattatcggtaattgcgttagtatattggtcctttcttctgccttgccagttatgtcaaggaccctcgggatcacacggttcgacctgctgggcgacttcggtcgatttaattggctgggcaacttctacatagtcctttcctataatctgctctttgcaatcgtgactactctatgtctggtgcgtaagttcactagcgccgttcgggaggaactgtttaaggccctcgggttacataaactacacctgcctaacacaagccgagattctgagaccgctaaaccatccgtgaatgggcaccagaaggcactctag

SEQ ID NO: 212177 - DNA, 1473 bp, Artificial Sequence
  derived and/or modified sequence
atggagggccaggatgaggtgtctgcccgggagcagcacttccacagccaggtgcgggagagcaccatctgcttcctgctgtttgccatcctgtatgtggtgtcctacttcatcatcacccgctacaagaggaagagtgatgagcaggaggatgaagatgccatcgtgaaccgcatcagcctcttcctgagcaccttcaccctggccgtgtctgctggagctgtgctgctgctgcccttcagcatcatcagcaatgagatcctgctgtccttcccccagaactactacatccagtggctgaatggcagcctcatccacggcctgtggaacctggccagcctcttcagcaacctgtgcctgtttgtgctgatgccctttgccttcttcttcctggagagcgagggctttgctggcctgaagaagggcatccgggcccgcatcctggagaccctggtgatgctgctgctgctggccctgctgatcctgggcatcgtgtgggtggccagcgccctgattgacaatgatgctgcctccatggagagcctgtatgacctgtgggagttctacctgccctacctgtacagctgcatcagcctgatgggctgcctgctgctgctgctgtgcacccctgtgggcctgagcaggatgttcaccgtgatgggccagctgctggtgaagcccaccatcctggaggacctggatgagcagatctacatcatcaccctggaggaggaggccctgcagaggcggctgaatggcctgagcagctctgtggagtacaacatcatggagctggagcaggagctggagaatgtgaagaccctgaagaccaagctggagaggaggaagaaggccagcgcctgggagaggaacctggtgtacccagctgtgatggtgctgctgctgattgagaccagcatctctgtgctgctggtggcctgcaacatcctgtgcctgctggtggatgaaacagccatgcccaagggcacccggggccctggcattggaaatgccagcctgagcacctttggatttgtgggcgccgccctggagatcatcctgatcttctacctgatggtgtcctctgtggtgggcttctacagcctgcgcttcttcggcaacttcacccccaagaaggatgacaccaccatgaccaagatcatcggcaactgtgtgtccatcctggtgctgagcagcgccctgcctgtgatgagcaggaccctgggcatcaccaggtttgacctgctgggggactttggccgcttcaactggctgggcaacttctacatcgtgctgagctacaacctgctgtttgccatcgtgaccaccctgtgcctggtgaggaagttcaccagcgctgtgcgggaggagctgttcaaggccctgggcctgcacaagctgcacctgcccaacaccagccgggacagcgagacagccaagcccagcgtgaatggccaccagaaggccctgtag

SEQ ID NO: 212178 - DNA, 1596 bp, Artificial Sequence
  derived and/or modified sequence
atggagggccaggatgaggtgtctgcccgggagcagcacttccacagccaggtgcgggagagcaccatctgcttcctgctgtttgccatcctgtatgtggtgtcctacttcatcatcacccgctacaagaggaagagtgatgagcaggaggatgaagatgccatcgtgaaccgcatcagcctcttcctgagcaccttcaccctggccgtgtctgctggagctgtgctgctgctgcccttcagcatcatcagcaatgagatcctgctgtccttcccccagaactactacatccagtggctgaatggcagcctcatccacggcctgtggaacctggccagcctcttcagcaacctgtgcctgtttgtgctgatgccctttgccttcttcttcctggagagcgagggctttgctggcctgaagaagggcatccgggcccgcatcctggagaccctggtgatgctgctgctgctggccctgctgatcctgggcatcgtgtgggtggccagcgccctgattgacaatgatgctgcctccatggagagcctgtatgacctgtgggagttctacctgccctacctgtacagctgcatcagcctgatgggctgcctgctgctgctgctgtgcacccctgtgggcctgagcaggatgttcaccgtgatgggccagctgctggtgaagcccaccatcctggaggacctggatgagcagatctacatcatcaccctggaggaggaggccctgcagaggcggctgaatgtgggcatgctgtgtgccggcaaccctgaggtggccaccggccggcaggtgcctgaggagcaggccggccagctgctgctgggcaagtggatccaggagggcggggacatgattgccaacccccggctgagcagctctgtggagtacaacatcatggagctggagcaggagctggagaatgtgaagaccctgaagaccaagctggagaggaggaagaaggccagcgcctgggagaggaacctggtgtacccagctgtgatggtgctgctgctgattgagaccagcatctctgtgctgctggtggcctgcaacatcctgtgcctgctggtggatgaaacagccatgcccaagggcacccggggccctggcattggaaatgccagcctgagcaccttcggctttgtgggcgccgccctggagatcatcctgatcttctacctgatggtgtcctctgtggtgggcttctacagcctgcgcttctttggaaacttcacccccaagaaggatgacaccaccatgaccaagatcatcggcaactgtgtgtccatcctggtgctgagcagcgccctgcctgtgatgagcaggaccctgggcatcaccaggtttgacctgctgggggactttggccgcttcaactggctgggcaacttctacatcgtgctgagctacaacctgctgtttgccatcgtgaccaccctgtgcctggtgaggaagttcaccagcgctgtgcgggaggagctgttcaaggccctgggcctgcacaagctgcacctgcccaacaccagccgggacagcgagacagccaagcccagcgtgaatggccaccagaaggccctgtag

SEQ ID NO: 212179 - DNA, 1590 bp, Artificial Sequence
  derived and/or modified sequence
ggccaggatgaggtgtctgcccgggagcagcacttccacagccaggtgcgggagagcaccatctgcttcctgctgtttgccatcctgtatgtggtgtcctacttcatcatcacccgctacaagaggaagagtgatgagcaggaggatgaagatgccatcgtgaaccgcatcagcctcttcctgagcaccttcaccctggccgtgtctgctggagctgtgctgctgctgcccttcagcatcatcagcaatgagatcctgctgtccttcccccagaactactacatccagtggctgaatggcagcctcatccacggcctgtggaacctggccagcctcttcagcaacctgtgcctgtttgtgctgatgccctttgccttcttcttcctggagagcgagggctttgctggcctgaagaagggcatccgggcccgcatcctggagaccctggtgatgctgctgctgctggccctgctgatcctgggcatcgtgtgggtggccagcgccctgattgacaatgatgctgcctccatggagagcctgtatgacctgtgggagttctacctgccctacctgtacagctgcatcagcctgatgggctgcctgctgctgctgctgtgcacccctgtgggcctgagcaggatgttcaccgtgatgggccagctgctggtgaagcccaccatcctggaggacctggatgagcagatctacatcatcaccctggaggaggaggccctgcagaggcggctgaatgtgggcatgctgtgtgccggcaaccctgaggtggccaccggccggcaggtgcctgaggagcaggccggccagctgctgctgggcaagtggatccaggagggcggggacatgattgccaacccccggctgagcagctctgtggagtacaacatcatggagctggagcaggagctggagaatgtgaagaccctgaagaccaagctggagaggaggaagaaggccagcgcctgggagaggaacctggtgtacccagctgtgatggtgctgctgctgattgagaccagcatctctgtgctgctggtggcctgcaacatcctgtgcctgctggtggatgaaacagccatgcccaagggcacccggggccctggcattggaaatgccagcctgagcaccttcggctttgtgggcgccgccctggagatcatcctgatcttctacctgatggtgtcctctgtggtgggcttctacagcctgcgcttctttggaaacttcacccccaagaaggatgacaccaccatgaccaagatcatcggcaactgtgtgtccatcctggtgctgagcagcgccctgcctgtgatgagcaggaccctgggcatcaccaggtttgacctgctgggggactttggccgcttcaactggctgggcaacttctacatcgtgctgagctacaacctgctgtttgccatcgtgaccaccctgtgcctggtgaggaagttcaccagcgctgtgcgggaggagctgttcaaggccctgggcctgcacaagctgcacctgcccaacaccagccgggacagcgagacagccaagcccagcgtgaatggccaccagaaggccctgtag

SEQ ID NO: 212180 - DNA, 4911 bp, Artificial Sequence
  derived and/or modified sequence
gccccgcccccgccccgcccccgactgcgcggcgcccgccctcccttagtcagagctgctcgtctgaggctgctgaggcgacggccggtgtcgtggtcgcggtacctgttccaacacggctcgcgggcccgtgccggctccggtccccggcgcggctgtccgagcccctgcggcgggcggacgatggtgtggcggagcacgcggacgcgggcggcgcggcggcgggcatgaaggaggatggaagggcaggacgaggtgtcggcgcgggagcagcacttccacagccaagtgcgggagtccacgatatgtttccttctttttgccattctctacgttgtttcctacttcatcatcacaagatacaagagaaaatcagatgaacaagaagatgaagatgccatcgtcaacaggatttcgttgtttttgagcacgttcactctcgcagtgtcagctggggctgttttgcttttacccttctcaatcatcagcaatgaaatcctgctttcttttcctcagaactactatattcagtggctaaatggctccctgattcatggtttgtggaatcttgcttcccttttttccaacctttgtttatttgtattgatgccctttgcctttttctttctggaatcagaaggctttgctggcctgaaaaagggaatccgagcccgcattttagagactttggtcatgcttcttcttcttgcgttactcattcttgggatagtgtgggtagcttcagcactcattgacaacgatgccgcaagcatggaatctttatatgatctctgggagttctatctaccctatttatattcctgtatatcattgatgggatgtttgttacttctcttgtgtacaccagttggcctttctcgtatgttcacagtgatgggtcagttgctagtgaagccaacaattcttgaagacctggatgaacaaatttatatcattaccttagaggaagaagcactccagagacgactaaatgggctgtcttcatcggtggaatacaacataatggagttggaacaagaacttgaaaatgtaaagactcttaagacaaaattagagaggcgaaaaaaggcttcagcatgggaaagaaatttggtgtatcccgctgttatggttctccttcttattgagacatccatctcggtcctcttggtggcttgtaatattctttgcctattggttgatgaaacagcaatgccaaaaggaacaagggggcctggaataggaaatgcctctctttctacgtttggttttgtgggagctgcgcttgaaatcattttgattttctatcttatggtgtcctctgttgtcggcttctatagccttcgattttttggaaactttactcccaagaaagatgacacaactatgacaaagatcattggaaattgtgtgtccatcttggttttgagctctgctctgcctgtgatgtcgagaacactgggaatcactagatttgatctacttggcgactttggaaggtttaattggctgggaaatttctatattgtattatcctacaatttgctttttgctattgtgacaacattgtgtctggtccgaaaattcacctctgcagttcgagaagaacttttcaaggccctagggcttcataaacttcacttaccaaatacttcaagggattcagaaacagccaagccttctgtaaatgggcatcagaaagcactgtgagacgcacagacggcgtcttctgccaccaagagacccgagaactccagattcacgacattcctgtcccatgtagaagcatttccattcaaccgtggcccctcttcagaacctagacctatcagtgccatttttttttcataatctacgaagaacttggctatggctgatcttttttaaatttaactttctgatggaccctgtagtttccagttaagtgcagattccttacagacatatagaacagcgcattcttctgtagacatttgctcatgttggtaaatacaatcacccatatgaaaaaattgttttcacctgatatgaaaatgttagaaaaggcaaactccgggacttctaaagatttacttaaatcccattatgtactttattcagaatgtagaagctgacttgaaaggcatccttggtactaagtgaagcttattcagaaaatgcatttttcaaatgcaatggcaactgcttgtagatatcatttttgcagtgtatgttggagctgtaatggttgcaattatgtttcttatttccttaaaagcaaaaagcgtagtttctgatttatgttatagaatgatactgattagactttgagccaaggggaaaatactaaattcttttaaacctggagccttagagagccacaggaatatcttctgttgtacagtctaataagctgtggtaggaagtatcatgtaatcacagtttaatgacagtttatgtatatatataattcagtattccctctgataacatagttgccagtgtttaatacacttgtaacttggatttttaccttataggctatatgtatactcagttttttaaagcatttttttcagagatcacttaattccccatgcttctgcaatgcatataaaaactataaatgccgagtggtagaaactcctctttcttcatagtcctcaggctttggttacatttgcatatgccatttgaagcctccagcttttaccagtttaacatccaaagttcacagcatcagcattcatggtgtaagaacagttttgcagtataacacgatctgataatcattcagttattaaattgtaaataattattgggatggtttcttggctttaagtccactgaataaaaactatgaaattgcactctgtgtcaaccatccactaggatagaataccgaaatctgtgcatgcaaaaataggagatgggcccatttgcacacaattcgtagttatgcagtctgctatataaatatgttcacatgcactgtgtgtatgaaaatagatggtctgtgttcagacaaaagtaaaacatttttttcaaattgttacatttaaaggttttctgggagaaatttatgaaacgcaggctgtgtctatttgacatcagaaatttccactttaaaccaaaataataagaaactttaatctgtatatttacaacctttgttgagtacacttcccccttatttatacgtctgcatttccttccgagcttcacatctttctaaaatgcagcttggttttaaaataaaagaacattcattttgtgattctaaacaagcttcagtaaataccaccagtatagtactggtgaatttctcagcataaaatcgacatacctaaaaagttaataaaattcagctcttttccaatttcattgttatgcctattgaagtattaattgccaggtttgatttttagtgaagcttggagtccatactttgagcagaccaagtgaagggaagaacagaaagaaactcaggagtagagtaatatcacttctcacttacaccactttcaggcacatccaaagagttcctagatacttggaaaatgtctgaaaatttttaagtaaaatactaaacttttcagtgtttagctcaactttttgttcatttggaagtttctctccatccgaggacttaagccagttttggatttgtaagccctgagtacaatacacttcctggaggcatcctcactgctgttgaagcaaaggatatgcatggggtggaaggacggcttcgaacctgggactcatatgccttgagaacaaatagattgttacagccttgggctgctgcgtaatcacggttcctcgaggctcttcctgagcacatgcccaagcatctgcctctggagagactgactccaaatgcaggtgcttccattggagctaggtcggaggctgctttatatgacgaactccagaaatggatgccagaatacggaggccaaacgttctgagtcctggtaaggacagtcgctctgggggtcctcattttactgcagttcctgcacgccagtgaaagagaggagatagaccctggaaggcagagctgcagatgctcatcatcaggtcaattctggagctacagttttgtttctgactggatagggatgcaccagtgactgtcacatcaagcagtccttttattctctctcctttagtatcgattttaaagggcattaggcactatggttccagagtttcttggggaaaacttgcagattcttattaattggttctgcaatacttaaataaattattttacaattataagttttcagattataacatttgtattaatttttactgattttccaagatacttcttagatttactatttacgtagctttatgtacattctctgtaaaaatagacctctaaatatgaggctttacatgaaatttgtacacacatacacactaatgttagctccttaaattgctgcactaaggtgctggttagtagagatggacggagcctctcgcgttttgctctcagatgtgttaaaggcgcacgtgtacctgctctcagcggcagtgcggcctccccatctgctgggtgcccatggccctccctgcagcctcagtgatgacctcgtctgccagggacacaggttttcatcatttacaggctcttatgtgctagttttgttggtagcacgttatttaatgcataaaggcagaattcttacaagtttttttttttaatgtgaacatagatgcagcaccgactttttaaacttgaaaaaactggtataatgttaacttttaaaaataacatttggacacactagtaattgatttttgtttacagattgttttgtttacaaattgttagtctttgtttctatgagatacttttagtgtgactttttaaatgtcttagaaattaaaagttgtacaaaaagtgatttc

SEQ ID NO: 212181 - DNA, 2888 bp, Artificial Sequence
  derived and/or modified sequence
gccggtgtcgtggtcgcggtacctgttccaacacggctcgcgggcccgtgccggctccggtccccggcgcggctgtccgagcccctgcggcgggcggacgatggtgtggcggagcacgcggacgcgggcggcgcggcggcgggcatgaaggaggatggaagggcaggacgaggtgtcggcgcgggagcagcacttccacagccaagtgcgggagtccacgatatgtttccttctttttgccattctctacgttgtttcctacttcatcatcacaagatacaagagaaaatcagatgaacaagaagatgaagatgccatcgtcaacaggatttcgttgtttttgagcacgttcactctcgcagtgtcagctggggctgttttgcttttacccttctcaatcatcagcaatgaaatcctgctttcttttcctcagaactactatattcagtggctaaatggctccctgattcatggtttgtggaatcttgcttcccttttttccaacctttgtttatttgtattgatgccctttgcctttttctttctggaatcagaaggctttgctggcctgaaaaagggaatccgagcccgcattttagagactttggtcatgcttcttcttcttgcgttactcattcttgggatagtgtgggtagcttcagcactcattgacaacgatgccgcaagcatggaatctttatatgatctctgggagttctatctaccctatttatattcctgtatatcattgatgggatgtttgttacttctcttgtgtacaccagttggcctttctcgtatgttcacagtgatgggtcagttgctagtgaagccaacaattcttgaagacctggatgaacaaatttatatcattaccttagaggaagaagcactccagagacgactaaatgtgggaatgctttgtgcgggaaatccagaagttgcaacaggaagacaagtgccagaagaacaagctggacagctacttttgggaaaatggattcaggagggaggagacatgatagcaaacccacggctgtcttcatcggtggaatacaacataatggagttggaacaagaacttgaaaatgtaaagactcttaagacaaaattagagaggcgaaaaaaggcttcagcatgggaaagaaatttggtgtatcccgctgttatggttctccttcttattgagacatccatctcggtcctcttggtggcttgtaatattctttgcctattggttgatgaaacagcaatgccaaaaggaacaagggggcctggaataggaaatgcctctctttctacgtttggttttgtgggagctgcgcttgaaatcattttgattttctatcttatggtgtcctctgttgtcggcttctatagccttcgattttttggaaactttactcccaagaaagatgacacaactatgacaaagatcattggaaattgtgtgtccatcttggttttgagctctgctctgcctgtgatgtcgagaacactgggaatcactagatttgatctacttggcgactttggaaggtttaattggctgggaaatttctatattgtattatcctacaatttgctttttgctattgtgacaacattgtgtctggtccgaaaattcacctctgcagttcgagaagaacttttcaaggccctagggcttcataaacttcacttaccaaatacttcaagggattcagaaacagccaagccttctgtaaatgggcatcagaaagcactgtgagacgcacagacggcgtcttctgccaccaagagacccgagaactccagattcacgacattcctgtcccatgtagaagcatttccattcaaccgtggcccctcttcagaacctagacctatcagtgccatttttttttcataatctacgaagaacttggctatggctgatcttttttaaatttaactttctgatggaccctgtagtttccagttaagtgcagattccttacagacatatagaacagcgcattcttctgtagacatttgctcatgttggtaaatacaatcacccatatgaaaaaattgttttcacctgatatgaaaatgttagaaaaggcaaactccgggacttctaaagatttacttaaatcccattatgtactttattcagaatgtagaagctgacttgaaaggcatccttggtactaagtgaagcttattcagaaaatgcatttttcaaatgcaatggcaactgcttgtagatatcatttttgcagtgtatgttggagctgtaatggttgcaattatgtttcttatttccttaaaagcaaaaagcgtagtttctgatttatgttatagaatgatactgattagactttgagccaaggggaaaatactaaattcttttaaacctggagccttagagagccacaggaatatcttctgttgtacagtctaataagctgtggtaggaagtatcatgtaatcacagtttaatgacagtttatgtatatatataattcagtattccctctgataacatagttgccagtgtttaatacacttgtaacttggatttttaccttataggctatatgtatactcagttttttaaagcatttttttcagagatcacttaattccccatgcttctgcaatgcatataaaaactataaatgccgagtggtagaaactcctctttcttcatagtcctcaggctttggttacatttgcatatgccatttgaagcctccagcttttaccagtttaacatccaaagttcacagcatcagcattcatggtgtaagaacagttttgcagtataacacgatctgataatcattcagttattaaattgtaaataattattgggatggtttcttggctttaagtccactgaataaaaactatgaaattgc

SEQ ID NO: 212182 - DNA, 3457 bp, Artificial Sequence
  derived and/or modified sequence
gggcaggacgaggtgtcggcgcgggagcagcacttccacagccaagtgcgggagtccacgatatgtttccttctttttgccattctctacgttgtttcctacttcatcatcacaagatacaagagaaaatcagatgaacaagaagatgaagatgccatcgtcaacaggatttcgttgtttttgagcacgttcactctcgcagtgtcagctggggctgttttgcttttacccttctcaatcatcagcaatgaaatcctgctttcttttcctcagaactactatattcagtggctaaatggctccctgattcatggtttgtggaatcttgcttcccttttttccaacctttgtttatttgtattgatgccctttgcctttttctttctggaatcagaaggctttgctggcctgaaaaagggaatccgagcccgcattttagagactttggtcatgcttcttcttcttgcgttactcattcttgggatagtgtgggtagcttcagcactcattgacaacgatgccgcaagcatggaatctttatatgatctctgggagttctatctaccctatttatattcctgtatatcattgatgggatgtttgttacttctcttgtgtacaccagttggcctttctcgtatgttcacagtgatgggtcagttgctagtgaagccaacaattcttgaagacctggatgaacaaatttatatcattaccttagaggaagaagcactccagagacgactaaatgtgggaatgctttgtgcgggaaatccagaagttgcaacaggaagacaagtgccagaagaacaagctggacagctacttttgggaaaatggattcaggagggaggagacatgatagcaaacccacggctgtcttcatcggtggaatacaacataatggagttggaacaagaacttgaaaatgtaaagactcttaagacaaaattagagaggcgaaaaaaggcttcagcatgggaaagaaatttggtgtatcccgctgttatggttctccttcttattgagacatccatctcggtcctcttggtggcttgtaatattctttgcctattggttgatgaaacagcaatgccaaaaggaacaagggggcctggaataggaaatgcctctctttctacgtttggttttgtgggagctgcgcttgaaatcattttgattttctatcttatggtgtcctctgttgtcggcttctatagccttcgattttttggaaactttactcccaagaaagatgacacaactatgacaaagatcattggaaattgtgtgtccatcttggttttgagctctgctctgcctgtgatgtcgagaacactgggaatcactagatttgatctacttggcgactttggaaggtttaattggctgggaaatttctatattgtattatcctacaatttgctttttgctattgtgacaacattgtgtctggtccgaaaattcacctctgcagttcgagaagaacttttcaaggccctagggcttcataaacttcacttaccaaatacttcaagggattcagaaacagccaagccttctgtaaatgggcatcagaaagcactgtgagacgcacagacggcgtcttctgccaccaagagacccgagaactccagattcacgacattcctgtcccatgtagaagcatttccattcaaccgtggcccctcttcagaacctagacctatcagtgccatttttttttcataatctacgaagaacttggctatggctgatcttttttaaatttaactttctgatggaccctgtagtttccagttaagtgcagattccttacagacatatagaacagcgcattcttctgtagacatttgctcatgttggtaaatacaatcacccatatgaaaaaattgttttcacctgatatgaaaatgttagaaaaggcaaactccgggacttctaaagatttacttaaatcccattatgtactttattcagaatgtagaagctgacttgaaaggcatccttggtactaagtgaagcttattcagaaaatgcatttttcaaatgcaatggcaactgcttgtagatatcatttttgcagtgtatgttggagctgtaatggttgcaattatgtttcttatttccttaaaagcaaaaagcgtagtttctgatttatgttatagaatgatactgattagactttgagccaaggggaaaatactaaattcttttaaacctggagccttagagagccacaggaatatcttctgttgtacagtctaataagctgtggtaggaagtatcatgtaatcacagtttaatgacagtttatgtatatatataattcagtattccctctgataacatagttgccagtgtttaatacacttgtaacttggatttttaccttataggctatatgtatactcagttttttaaagcatttttttcagagatcacttaattccccatgcttctgcaatgcatataaaaactataaatgccgagtggtagaaactcctctttcttcatagtcctcaggctttggttacatttgcatatgccatttgaagcctccagcttttaccagtttaacatccaaagttcacagcatcagcattcatggtgtaagaacagttttgcagtataacacgatctgataatcattcagttattaaattgtaaataattattgggatggtttcttggctttaagtccactgaataaaaactatgaaattgcactctgtgtcaaccatccactaggatagaataccgaaatctgtgcatgcaaaaataggagatgggcccatttgcacacaattcgtagttatgcagtctgctatataaatatgttcacatgcactgtgtgtatgaaaatagatggtctgtgttcagacaaaagtaaaacatttttttcaaattgttacatttaaaggttttctgggagaaatttatgaaacgcaggctgtgtctatttgacatcagaaatttccactttaaaccaaaataataagaaactttaatctgtatatttacaacctttgttgagtacacttcccccttatttatacgtctgcatttccttccgagcttcacatctttctaaaatgcagcttggttttaaaataaaagaacattcattttgtgattctaaacaagcttcagtaaataccaccagtatagtactggtgaatttctcagcataaaatcgacatacctaaaaagttaataaaattcagctcttttccaatttcattgttatgcctattgaagtattaattgccaggtttgatttttagtgaagcttggagtccatactttgagcagaccaagtgaagggaagaacagaaagaaactcaggagtagagtaatatcacttctcacttacaccactttcaggcacatccaaagagttcctagatacttggaaaatgtctgaaaatttttaagtaaaatactaaacttttca

SEQ ID NO: 212183 - DNA, 1473 bp, Artificial Sequence
  derived and/or modified sequence
atggagggccaggacgaggtgagcgcccgggagcagcacttccactctcaggtacgggagtctaccatctgtttcctgctgttcgccatcctgtatgtggtgtcctacttcataattacacggtacaaaagaaagagcgatgagcaagaggacgaggacgcaatcgtgaacaggattagcctgtttttgtctacgtttaccctggcggtttcagcgggagccgtccttttgctgcccttttccattatcagcaatgagatcttgctgtcatttcctcagaactactatattcagtggcttaatggtagcctgatccatggcctgtggaacctggcctcactgttttccaacttatgcctatttgtccttatgcccttcgctttcttttttttggaatccgaggggttcgccggcctgaaaaagggcatcagggccagaatattagagacattggtgatgctattactactggcattactcatcctgggaatcgtctgggttgcctccgctcttatagataacgatgccgcatctatggaatcactgtacgatctttgggagttctacctcccctatctctacagttgcataagcttgatgggatgtttgctattgctgttatgcacgcctgtggggctgtcaaggatgttcacagtgatgggccagctacttgtaaaaccgaccattctggaggacctggacgagcagatttacatcattacattggaagaagaggctctgcagcgcaggctgaacggcttgtccagctcagttgaatacaatataatggaactggaacaggagttggaaaatgtgaagactctcaaaacaaaactcgagcgccgaaaaaaggcgtccgcctgggaacgcaaccttgtttaccccgcagtaatggtgctgctgctgatcgagacctccatctccgtgttgttggttgcttgcaatatattatgtctgctggtagacgagacagctatgcccaaaggcacgaggggcccagggattggaaacgctagcctcagcacgtttggattcgtgggcgccgccctggagattatcctgatcttttacctgatggtgtctagcgtagtgggcttttatagcctgcgattcttcgggaactttacacctaaaaaagatgacaccacgatgactaaaattataggcaattgtgtgtcaatcttggtactcagttcagctctgccagtgatgtcccggaccctgggtataacgaggtttgatttgctcggtgacttcggacgattcaattggctcggcaatttctacatagttttgagctacaacctgttgttcgctatcgttaccaccctctgtctcgtgaggaagtttaccagcgcggtacgggaggaactcttcaaggcattggggctgcacaagttgcacctgccaaatacctcacgtgactctgagaccgccaaaccgagcgttaacggacatcaaaaagccttatag

SEQ ID NO: 212184 - DNA, 1596 bp, Artificial Sequence
  derived and/or modified sequence
atggagggccaggacgaggtgagcgcccgggagcagcacttccactctcaagtgagggagtccacaatctgtttccttctgttcgcgattctgtatgtcgtctcctacttcatcataactaggtataagcgtaaatctgatgagcaggaagacgaagatgccatcgtgaacaggattagcttgtttctatcgaccttcaccctggcagtgtccgcaggggcggtcctcttgctgcctttcagcatcattagcaatgagatcctgctgtctttcccacaaaactattatatccagtggctgaacggatcactcatccacgggttatggaacctggctagtttgttctctaacttgtgtctgtttgtgctgatgccttttgcctttttttttctggagtcagagggattcgccggtctcaaaaaaggcatccgcgctcgcatactggagacccttgtgatgctgctgttgcttgcgctgttgatcctcggaattgtttgggtggcctccgcactgattgacaacgatgccgcgagtatggagtctctctatgacctctgggagttttacctgccctacctgtactcctgcatcagtcttatgggatgtctcctgctcctgctttgtactcccgtaggtctttcaaggatgtttaccgtcatgggtcagcttctggtaaaacccactattcttgaggacctggacgagcagatttacattattacactcgaagaggaagctctccaacgtaggctgaatgtgggcatgctgtgcgctggcaatcctgaagttgctacaggaaggcaggtgccagaagaacaggccggacagctgcttctgggcaaatggattcaggaaggcggcgatatgattgctaacccccgcttgtcttcctctgtagagtataatataatggaactggagcaggagctggagaatgtgaagacactcaaaactaaattagaacgcagaaaaaaggcctccgcatgggagcgtaacttggtctacccagctgtcatggttttgctcctgattgagacctcaatctcggttctcctggtggcttgcaatattctctgtttgctggtggatgagacggctatgccgaaagggacccggggcccaggcatcggaaacgccagtctcagcacgtttggcttcgtgggtgccgcgctggaaatcatcctgattttttatctgatggtgtcctcagttgttggtttttacagtctccgattttttggcaatttcacacccaaaaaagacgacacaacaatgactaaaatcatcgggaattgtgtttccattctggttctatcctccgccctgcccgttatgtcacggacgctcggaataacacgttttgacttattgggtgatttcgggaggttcaattggctcggtaatttttacattgttctgtcctataatctcctgttcgcaatcgtaacaaccctgtgtctggttcggaagtttacaagtgctgtgagggaagaactgtttaaagctctggggctccacaagctccacctgcctaatacaagccgtgattcggagacagccaaacccagcgttaatgggcatcagaaggcactgtag

SEQ ID NO: 212185 - DNA, 1590 bp, Artificial Sequence
  derived and/or modified sequence
ggccaggacgaggtgagcgcccgggagcagcacttccacagccaggtacgggagtctacaatttgctttctgcttttcgcaatcctgtacgtggtttcctatttcattatcacaagatataagagaaaatctgacgagcaggaggacgaggatgcaatcgtaaataggatatccttattcctgtccacttttacccttgcagtaagtgccggggctgtactcctgttacctttttccattatctctaatgagattcttcttagcttcccacagaactactatatccagtggctgaatggcagcctcattcatgggctgtggaatcttgcctcactcttttctaatctatgtttgttcgttctgatgccatttgcattttttttcctcgagagtgagggttttgcagggctgaaaaaaggcataagagccagaatcttggagaccctggttatgctattgctattggctctacttatactggggatcgtgtgggtggccagcgccctcattgataacgacgcagcttccatggaatcgctgtacgatctgtgggaattctacctgccatacttatattcttgcattagcctgatgggatgtctgctgttattactctgtacacccgtggggctctctagaatgtttactgtgatgggccaacttctggtcaagcccacgattctggaggatttggacgaacagatttacatcataacgctcgaagaggaggctttacagcgaaggctgaatgttggtatgctgtgtgctggtaacccagaagtcgctactggacgccaagttcctgaggagcaggccgggcagcttttgctgggaaaatggatccaagagggcggggatatgattgccaaccccagactcagttcatctgtagaatacaatattatggagctggaacaggaactagagaacgtgaaaacactcaaaaccaagttggagcggcgtaaaaaggcctccgcatgggaacggaacctagtctatccggctgtaatggtgctactcctgatagaaacctctatctctgtgcttctcgttgcgtgcaacatcctgtgtctgctcgtggacgagactgctatgcctaaagggacaagaggcccagggatagggaacgcctctctctcaactttcggtttcgtcggcgccgctctggagattatcctgatattctacttaatggtgagtagtgtggtcggattctattctctccgtttttttggcaattttacacctaaaaaggatgacaccacaatgactaaaattattggaaattgcgtgagtatcctggttctttctagtgctcttccggttatgtcccgtacactgggcataactcggtttgatctgctgggggacttcggccggttcaactggctggggaacttctacatagtgctcagttataacctgctgttcgccatcgtcacgacactgtgcctcgtccggaagttcacttcggccgtgcgggaggagctattcaaggccttaggcctgcataaattgcacctccctaacacttcccgtgatagcgagacagccaagcctagcgtgaatgggcaccaaaaagccctctag

SEQ ID NO: 212186 - DNA, 1473 bp, Artificial Sequence
  derived and/or modified sequence
atggaaggtcaagatgaagtgtcagcaagggagcagcatttccattctcaagtgcgagagtctaccatctgcttcctgctgttcgctatcctttatgttgtctcctactttatcattacacggtataagagaaagtctgacgagcaggaggacgaggatgccatcgtgaataggattagtctgttcctgtccacatttacgctcgcagtgagcgcaggagcagtgctcctgctgcctttctcaattatctccaacgaaattttgctgtcattcccgcaaaactactatattcaatggctgaacgggagcctcattcatggcttatggaatctggcttccctattcagcaatctttgcctgtttgtgctgatgcctttcgcttttttcttccttgagtccgagggatttgccggtttgaaaaaaggtatcagggcaaggatcttggaaactttagttatgcttctgctgctcgcactcctgattcttggaattgtttgggttgctagcgcccttatagacaatgatgccgcaagcatggaatcactttacgatttgtgggagttttatcttccgtatttgtactcctgtatctctctgatgggatgtctattgctccttctatgcactcccgtgggcctatcccgcatgttcaccgtgatgggacagctcttggttaaaccgactatccttgaagacttagatgagcagatttatataataaccctcgaggaggaggctctccaacgccgactcaatggcctctcttcctctgtggagtataacatcatggaactggagcaggaacttgaaaatgtcaaaacattgaagacaaagctggagaggagaaagaaggcaagcgcatgggagaggaatctcgtctacccggctgtcatggtcctgctgctgattgaaacatcgatctccgtactattagtggcttgcaatattctctgtctgctggtagatgaaactgcaatgccgaaaggaactcgcggacctggcattggcaatgctagcctgtctacctttggctttgttggagccgctctggagattatcctcatcttttatctgatggtgtctagtgtcgttgggttctactccctccggtttttcggaaattttacacccaagaaagacgatacaactatgacgaagattattggcaattgcgtgtctatcctggtgctgtcgagcgctctgcccgttatgtcgcggaccctcggcatcacgcgctttgacctgttaggggatttcggtaggtttaactggctcgggaacttctatatcgtgttatcttacaatctcctctttgcaatcgtaactacgctatgcctggtgcgaaaattcacttccgctgtgcgggaagagctatttaaagcactcgggctacacaagctacacctacccaatacaagtcgggacagcgaaaccgccaaaccgagtgtgaatgggcaccagaaggccctatag

SEQ ID NO: 212187 - DNA, 1596 bp, Artificial Sequence
  derived and/or modified sequence
atggaaggtcaggacgaggtgagcgcgagagagcagcacttccattcacaggtgagagagagcacaatttgttttctcctgttcgctatactgtacgtcgtcagctacttcatcattacaagatacaagcggaagtccgatgaacaggaggacgaagatgccattgtgaaccggatcagtctgtttctgtctaccttcacattggctgtgtctgctggagcagtgctgctgctgcctttctcgatcatttcgaatgaaattctgctgtccttccctcaaaattattacatccagtggttaaacgggtctctgatccacgggctgtggaatcttgcttcgctcttttccaacctttgcctcttcgtgctaatgccttttgcctttttcttcttagaatctgaaggattcgccggattgaagaaaggaatcagagccagaattttagaaacactggtgatgttgctcctactcgccctcctaatcctcggaatcgtttgggtggcatccgccctgatagacaacgacgctgccagtatggagtcattatatgacctctgggagttttacctgccttacttgtatagttgcatctccctcatgggctgcttactgctcctgctatgcacgcccgtgggtctgagccgcatgttcaccgtcatggggcagctgttggtcaaacctactatcttggaagatctggatgagcagatctacataataacactggaagaggaggctctgcagaggagactcaatgtggggatgctgtgtgctggcaaccccgaagtcgcaacggggaggcaggtcccggaagagcaggccggtcaattgctgctcgggaagtggattcaagagggcggagatatgatagccaatccaagattgtcttcctccgtggaatacaatattatggagctggagcaggagctggaaaatgtgaagactctgaaaacaaaactggaacgcagaaaaaaggcctccgcctgggaacgaaacctggtgtacccggctgtgatggtgttattactgatcgaaacgtcaatatcagtcctacttgtggcttgcaacatcctttgtctgctggtcgatgagacagctatgccgaagggcacgcgcggaccgggaatcggcaacgcgagccttagcaccttcggcttcgtaggggcagccttagaaattattctgattttttatctgatggtgtcttctgtggtcggtttctattcccttagattttttgggaactttactcccaaaaaggacgacaccactatgaccaaaatcataggcaattgcgtcagcatattggtactgtcttccgcactgccagtgatgagtagaacgctggggatcacccgattcgatctgctcggggatttcggtcgatttaattggttgggcaacttctatatcgtcctgtcgtataatctgctctttgctatcgtgaccacactgtgcttggtcagaaagtttacgagcgccgtgagggaagaactgtttaaagccctgggcctacataagctgcatctgcccaatactagcagagattcagagactgcaaaacccagcgtgaatgggcaccaaaaggcgttgtag

SEQ ID NO: 212188 - DNA, 1590 bp, Artificial Sequence
  derived and/or modified sequence
ggccaggacgaagtcagtgctagagagcaacatttccattctcaggtgcgggagagcacaatttgctttctgcttttcgccatcctttacgtagtcagttatttcattatcaccagatacaaacgcaagagtgacgagcaagaggacgaagacgcgattgtaaacagaataagcctgttcctgagtactttcacactggccgtctcggctggcgctgtgcttttgttaccattcagcattatctctaacgagatactcctgtctttcccacagaactactacattcaatggctgaacgggtcactgatccacgggttatggaatctggcctctctcttctctaatctttgcctatttgttctgatgcccttcgcatttttttttttggagagcgaaggcttcgctggattgaagaaaggaattagggcccgaatcctagagacactcgtaatgttactcctccttgcgctgttgatactggggatcgtctgggtcgcttccgccctgatcgataatgatgccgcttctatggaatcactgtacgatctgtgggagttttatctcccctacctctacagctgtatttcactgatgggttgtctgctcctactgctgtgcacgccggtaggcttaagtcgtatgtttaccgttatgggtcagctcttggtaaagccaaccatactggaagatctcgacgaacagatctacataattacacttgaggaagaggcacttcagagacgcctcaatgttggaatgttgtgcgccggtaatccggaagttgccacaggacgccaagtccctgaagagcaggccggacaattgttgctggggaagtggatccaggaaggaggcgatatgatcgccaacccccgactgtctagctctgtggagtacaacatcatggagctggaacaagaactcgagaacgtgaagactcttaagacaaagttggagcggcgtaagaaggcctccgcctgggagcggaaccttgtgtatcccgctgtgatggtgttgcttctgatcgagaccagtatcagcgttctgctcgtggcgtgcaacatcctatgcctgctggtcgacgaaaccgccatgcccaagggcactaggggacctggcatagggaatgccagtttgtctaccttcggattcgtcggcgctgcattagagatcatactcatattttaccttatggtgtcatccgtcgtcggcttttattctctgaggttcttcggtaatttcacacccaagaaggatgatactacaatgacaaaaattatcggcaactgtgtgtccatactggtgctgagttctgcgttgcccgtgatgagtcgcacgctgggaatcactagattcgatctgctgggggactttggacggtttaattggctgggaaatttttacatcgtgctctcttacaatctcctgtttgcaatcgtcaccactctctgcctggtaaggaaatttacctctgcagtgagagaagaactgtttaaagctctcgggttgcacaaactccacctgccgaatacatctcgcgactcagagacagcgaagccttcggtgaacggccatcagaaggcgctgtag

SEQ ID NO: 212189 - DNA, 1473 bp, Artificial Sequence
  derived and/or modified sequence
atggagggccaggacgaggtgagcgccagagagcagcacttccacagccaggtgagagagagcaccatctgcttcctgctgttcgccatcctgtacgtggtgagctacttcatcatcaccagatacaagagaaagagcgacgagcaggaggacgaggacgccatcgtgaacagaatcagcctgttcctgagcaccttcaccctggccgtgagcgccggcgccgtgctgctgctgcccttcagcatcatcagcaacgagatcctgctgagcttcccccagaactactacatccagtggctgaacggcagcctgatccacggcctgtggaacctggccagcctgttcagcaacctgtgcctgttcgtgctgatgcccttcgccttcttcttcctggagagcgagggcttcgccggcctgaagaagggcatcagagccagaatcctggagaccctggtgatgctgctgctgctggccctgctgatcctgggcatcgtgtgggtggccagcgccctgatcgacaacgacgccgccagcatggagagcctgtacgacctgtgggagttctacctgccctacctgtacagctgcatcagcctgatgggctgcctgctgctgctgctgtgcacccccgtgggcctgagcagaatgttcaccgtgatgggccagctgctggtgaagcccaccatcctggaggacctggacgagcagatctacatcatcaccctggaggaggaggccctgcagagaagactgaacggcctgagcagcagcgtggagtacaacatcatggagctggagcaggagctggagaacgtgaagaccctgaagaccaagctggagagaagaaagaaggccagcgcctgggagagaaacctggtgtaccccgccgtgatggtgctgctgctgatcgagaccagcatcagcgtgctgctggtggcctgcaacatcctgtgcctgctggtggacgagaccgccatgcccaagggcaccagaggccccggcatcggcaacgccagcctgagcaccttcggcttcgtgggcgccgccctggagatcatcctgatcttctacctgatggtgagcagcgtggtgggcttctacagcctgagattcttcggcaacttcacccccaagaaggacgacaccaccatgaccaagatcatcggcaactgcgtgagcatcctggtgctgagcagcgccctgcccgtgatgagcagaaccctgggcatcaccagattcgacctgctgggcgacttcggcagattcaactggctgggcaacttctacatcgtgctgagctacaacctgctgttcgccatcgtgaccaccctgtgcctggtgagaaagttcaccagcgccgtgagagaggagctgttcaaggccctgggcctgcacaagctgcacctgcccaacaccagcagagacagcgagaccgccaagcccagcgtgaacggccaccagaaggccctgtag

SEQ ID NO: 212190 - DNA, 1596 bp, Artificial Sequence
  derived and/or modified sequence
atggagggccaggacgaggtgagcgccagagagcagcacttccacagccaggtgagagagagcaccatctgcttcctgctgttcgccatcctgtacgtggtgagctacttcatcatcaccagatacaagagaaagagcgacgagcaggaggacgaggacgccatcgtgaacagaatcagcctgttcctgagcaccttcaccctggccgtgagcgccggcgccgtgctgctgctgcccttcagcatcatcagcaacgagatcctgctgagcttcccccagaactactacatccagtggctgaacggcagcctgatccacggcctgtggaacctggccagcctgttcagcaacctgtgcctgttcgtgctgatgcccttcgccttcttcttcctggagagcgagggcttcgccggcctgaagaagggcatcagagccagaatcctggagaccctggtgatgctgctgctgctggccctgctgatcctgggcatcgtgtgggtggccagcgccctgatcgacaacgacgccgccagcatggagagcctgtacgacctgtgggagttctacctgccctacctgtacagctgcatcagcctgatgggctgcctgctgctgctgctgtgcacccccgtgggcctgagcagaatgttcaccgtgatgggccagctgctggtgaagcccaccatcctggaggacctggacgagcagatctacatcatcaccctggaggaggaggccctgcagagaagactgaacgtgggcatgctgtgcgccggcaaccccgaggtggccaccggcagacaggtgcccgaggagcaggccggccagctgctgctgggcaagtggatccaggagggcggcgacatgatcgccaaccccagactgagcagcagcgtggagtacaacatcatggagctggagcaggagctggagaacgtgaagaccctgaagaccaagctggagagaagaaagaaggccagcgcctgggagagaaacctggtgtaccccgccgtgatggtgctgctgctgatcgagaccagcatcagcgtgctgctggtggcctgcaacatcctgtgcctgctggtggacgagaccgccatgcccaagggcaccagaggccccggcatcggcaacgccagcctgagcaccttcggcttcgtgggcgccgccctggagatcatcctgatcttctacctgatggtgagcagcgtggtgggcttctacagcctgagattcttcggcaacttcacccccaagaaggacgacaccaccatgaccaagatcatcggcaactgcgtgagcatcctggtgctgagcagcgccctgcccgtgatgagcagaaccctgggcatcaccagattcgacctgctgggcgacttcggcagattcaactggctgggcaacttctacatcgtgctgagctacaacctgctgttcgccatcgtgaccaccctgtgcctggtgagaaagttcaccagcgccgtgagagaggagctgttcaaggccctgggcctgcacaagctgcacctgcccaacaccagcagagacagcgagaccgccaagcccagcgtgaacggccaccagaaggccctgtag

SEQ ID NO: 212191 - DNA, 1590 bp, Artificial Sequence
  derived and/or modified sequence
ggccaggacgaggtgagcgccagagagcagcacttccacagccaggtgagagagagcaccatctgcttcctgctgttcgccatcctgtacgtggtgagctacttcatcatcaccagatacaagagaaagagcgacgagcaggaggacgaggacgccatcgtgaacagaatcagcctgttcctgagcaccttcaccctggccgtgagcgccggcgccgtgctgctgctgcccttcagcatcatcagcaacgagatcctgctgagcttcccccagaactactacatccagtggctgaacggcagcctgatccacggcctgtggaacctggccagcctgttcagcaacctgtgcctgttcgtgctgatgcccttcgccttcttcttcctggagagcgagggcttcgccggcctgaagaagggcatcagagccagaatcctggagaccctggtgatgctgctgctgctggccctgctgatcctgggcatcgtgtgggtggccagcgccctgatcgacaacgacgccgccagcatggagagcctgtacgacctgtgggagttctacctgccctacctgtacagctgcatcagcctgatgggctgcctgctgctgctgctgtgcacccccgtgggcctgagcagaatgttcaccgtgatgggccagctgctggtgaagcccaccatcctggaggacctggacgagcagatctacatcatcaccctggaggaggaggccctgcagagaagactgaacgtgggcatgctgtgcgccggcaaccccgaggtggccaccggcagacaggtgcccgaggagcaggccggccagctgctgctgggcaagtggatccaggagggcggcgacatgatcgccaaccccagactgagcagcagcgtggagtacaacatcatggagctggagcaggagctggagaacgtgaagaccctgaagaccaagctggagagaagaaagaaggccagcgcctgggagagaaacctggtgtaccccgccgtgatggtgctgctgctgatcgagaccagcatcagcgtgctgctggtggcctgcaacatcctgtgcctgctggtggacgagaccgccatgcccaagggcaccagaggccccggcatcggcaacgccagcctgagcaccttcggcttcgtgggcgccgccctggagatcatcctgatcttctacctgatggtgagcagcgtggtgggcttctacagcctgagattcttcggcaacttcacccccaagaaggacgacaccaccatgaccaagatcatcggcaactgcgtgagcatcctggtgctgagcagcgccctgcccgtgatgagcagaaccctgggcatcaccagattcgacctgctgggcgacttcggcagattcaactggctgggcaacttctacatcgtgctgagctacaacctgctgttcgccatcgtgaccaccctgtgcctggtgagaaagttcaccagcgccgtgagagaggagctgttcaaggccctgggcctgcacaagctgcacctgcccaacaccagcagagacagcgagaccgccaagcccagcgtgaacggccaccagaaggccctgtag

SEQ ID NO: 212192 - protein, 1151 aa, Artificial Sequence
  derived and/or modified sequence
MMAAALGPPEVIAQLENAAKVLMAPPSMVNNEQRQHAEHIFLSFRKSKSPFAVCKHILETSKVDYVLFQAATAIMEAVVREWILLEKGSIESLRTFLLTYVLQRPNLQKYVREQILLAVAVIVKRGSLDKSIDCKSIFHEVSQLISSGNPTVQTLACSILTALLSEFSSSSKTSNIGLSMEFHGNCKRVFQEEDLRQIFMLTVEVLQEFSRRENLNAQMSSVFQRYLALANQVLSWNFLPPNLGRHYIAMFESSQNVLLKPTESWRETLLDSRVMELFFTVHRKIREDSDMAQDSLQCLAQLASLHGPIFPDEGSQVDYLAHFIEGLLNTINGIEIEDSEAVGISSIISNLITVFPRNVLTAIPSELFSSFVNCLTHLTCSFGRSAALEEVLDKDDMVYMEAYDKLLESWLTLVQDDKHFHKGFFTQHAVQVFNSYIQCHLAAPDGTRNLTANGVASREEEEISELQEDDRDQFSDQLASVGMLGRIAAEHCIPLLTSLLEERVTRLHGQLQRHQQQLLASPGSSTVDNKMLDDLYEDIHWLILVTGYLLADDTQGETPLIPPEIMEYSIKHSSEVDINTTLQILGSPGEKASSIPGYNRTDSVIRLLSAILRVSEVESRAIRADLTHLLSPQMGKDIVWFLKRWAKTYLLVDEKLYDQISLPFSTAFGADTEGSQWIIGYLLQKVISNLSVWSSEQDLANDTVQLLVTLVERRERANLVIQCENWWNLAKQFASRSPPLNFLSSPVQRTLMKALVLGGFAHMDTETKQQYWTEVLQPLQQRFLRVINQENFQQMCQQEEVKQEITATLEALCGIAEATQIDNVAILFNFLMDFLTNCIGLMEVYKNTPETVNLIIEVFVEVAHKQICYLGESKAMNLYEACLTLLQVYSKNNLGRQRIDVTAEEEQYQDLLLIMELLTNLLSKEFIDFSDTDEVFRGHEPGQAANRSVSAADVVLYGVNLILPLMSQDLLKFPTLCNQYYKLITFICEIFPEKIPQLPEDLFKSLMYSLELGMTSMSSEVCQLCLEALTPLAEQCAKAQETDSPLFLATRHFLKLVFDMLVLQKHNTEMTTAAGEAFYTLVCLHQAEYSELVETLLSSQQDPVIYQRLADAFNKLTASSTPPTLDRKQKMAFLKSLEEFMANVGGLLCVK

SEQ ID NO: 212193 - protein, 1151 aa, Artificial Sequence [sequence omitted]

SEQ ID NO: 212194 - DNA, 3456 bp, Artificial Sequence
  derived and/or modified sequence
atgatggccgccgccctgggcccccccgaggtgatcgcccagctggagaacgccgccaaggtgctgatggccccccccagcatggtgaacaacgagcagagacagcacgccgagcacatcttcctgagcttcagaaagagcaagagccccttcgccgtgtgcaagcacatcctggagaccagcaaggtggactacgtgctgttccaggccgccaccgccatcatggaggccgtggtgagagagtggatcctgctggagaagggcagcatcgagagcctgagaaccttcctgctgacctacgtgctgcagagacccaacctgcagaagtacgtgagagagcagatcctgctggccgtggccgtgatcgtgaagagaggcagcctggacaagagcatcgactgcaagagcatcttccacgaggtgagccagctgatcagcagcggcaaccccaccgtgcagaccctggcctgcagcatcctgaccgccctgctgagcgagttcagcagcagcagcaagaccagcaacatcggcctgagcatggagttccacggcaactgcaagagagtgttccaggaggaggacctgagacagatcttcatgctgaccgtggaggtgctgcaggagttcagcagaagagagaacctgaacgcccagatgagcagcgtgttccagagatacctggccctggccaaccaggtgctgagctggaacttcctgccccccaagctgggcagacactacatcgccatgttcgagagcagccagaacgtgctgctgaagcccaccgagagctggagagagaccctgctggacagcagagtgatggagctgttcttcaccgtgcacagaaagatcagagaggacagcgacatggcccaggacagcctgcagtgcctggcccagctggccagcctgcacggccccatcttccccgacgagggcagccaggtggactacctggcccacttcatcgagggcctgctgaacaccatcaacggcatcgagatcgaggacagcgaggccgtgggcatcagcagcatcatcagcaacctgatcaccgtgttccccagaaacgtgctgaccgccatccccagcgagctgttcagcagcttcgtgaactgcctgacccacctgacctgcagcttcggcagaagcgccgccctggaggaggtgctggacaaggacgacatggtgtacatggaggcctacgacaagctgctggagagctggctgaccctggtgcaggacgacaagcacttccacaagggcttcttcacccagcacgccgtgcaggtgttcaacagctacatccagtgccacctggccgcccccgacggcaccagaaacctgaccgccaacggcgtggccagcagagaggaggaggagatcagcgagctgcaggaggacgacagagaccagttcagcgaccagctggccagcgtgggcatgctgggcagaatcgccgccgagcactgcatccccctgctgaccagcctgctggaggagagagtgaccagactgcacggccagctgcagagacaccagcagcagctgctggccagccccggcagcagcaccgtggacaacaagatgctggacgacctgtacgaggacatccactggctgatcctggtgaccggctacctgctggccgacgacacccagggcgagacccccctgatcccccccgagatcatggagtacagcatcaagcacagcagcgaggtggacatcaacaccaccctgcagatcctgggcagccccggcgagaaggccagcagcatccccggctacaacagaaccgacagcgtgatcagactgctgagcgccatcctgagagtgagcgaggtggagagcagagccatcagagccgacctgacccacctgctgagcccccagatgggcaaggacatcgtgtggttcctgaagagatgggccaagacctacctgctggtggacgagaagctgtacgaccagatcagcctgcccttcagcaccgccttcggcgccgacaccgagggcagccagtggatcatcggctacctgctgcagaaggtgatcagcaacctgagcgtgtggagcagcgagcaggacctggccaacgacaccgtgcagctgctggtgaccctggtggagagaagagagagagccaacctggtgatccagtgcgagaactggtggaacctggccaagcagttcgccagcagaagcccccccctgaacttcctgagcagccccgtgcagagaaccctgatgaaggccctggtgctgggcggcttcgcccacatggacaccgagaccaagcagcagtactggaccgaggtgctgcagcccctgcagcagagattcctgagagtgatcaaccaggagaacttccagcagatgtgccagcaggaggaggtgaagcaggagatcaccgccaccctggaggccctgtgcggcatcgccgaggccacccagatcgacaacgtggccatcctgttcaacttcctgatggacttcctgaccaactgcatcggcctgatggaggtgtacaagaacacccccgagaccgtgaacctgatcatcgaggtgttcgtggaggtggcccacaagcagatctgctacctgggcgagagcaaggccatgaacctgtacgaggcctgcctgaccctgctgcaggtgtacagcaagaacaacctgggcagacagagaatcgacgtgaccgccgaggaggagcagtaccaggacctgctgctgatcatggagctgctgaccaacctgctgagcaaggagttcatcgacttcagcgacaccgacgaggtgttcagaggccacgagcccggccaggccgccaacagaagcgtgagcgccgccgacgtggtgctgtacggcgtgaacctgatcctgcccctgatgagccaggacctgctgaagttccccaccctgtgcaaccagtactacaagctgatcaccttcatctgcgagatcttccccgagaagatcccccagctgcccgaggacctgttcaagagcctgatgtacagcctggagctgggcatgaccagcatgagcagcgaggtgtgccagctgtgcctggaggccctgacccccctggccgagcagtgcgccaaggcccaggagaccgacagccccctgttcctggccaccagacacttcctgaagctggtgttcgacatgctggtgctgcagaagcacaacaccgagatgaccaccgccgccggcgaggccttctacaccctggtgtgcctgcaccaggccgagtacagcgagctggtggagaccctgctgagcagccagcaggaccccgtgatctaccagagactggccgacgccttcaacaagctgaccgccagcagcaccccccccaccctggacagaaagcagaagatggccttcctgaagagcctggaggagttcatggccaacgtgggcggcctgctgtgcgtgaagtag

SEQ ID NO: 212195 - DNA, 2511 bp, Artificial Sequence
  derived and/or modified sequence
atggccgccgccctgggcccccccgaggtgatcgcccagctggagaacgccgccaaggtgctgatgcagaccctggcctgcagcatcctgaccgccctgctgagcgagttcagcagcagcagcaagaccagcaacatcggcctgagcatggagttccacggcaactgcaagagagtgttccaggaggaggacctgagacagatcttcatgctgaccgtggaggtgctgcaggagttcagcagaagagagaacctgaacgcccagatgagcagcgtgttccagagatacctggccctggccaaccaggtgctgagctggaacttcctgccccccaagctgggcagacactacatcgccatgttcgagagcagccagaacgtgctgctgaagcccaccgagagctggagagagaccctgctggacagcagagtgatggagctgttcttcaccgtgcacagaaagatcagagaggacagcgacatggcccaggacagcctgcagtgcctggcccagctggccagcctgcacggccccatcttccccgacgagggcagccaggtggactacctggcccacttcatcgagggcctgctgaacaccatcaacggcatcgagatcgaggacagcgaggccgtgggcatcagcagcatcatcagcaacctgatcaccgtgttccccagaaacgtgctgaccgccatccccagcgagctgttcagcagcttcgtgaactgcctgacccacctgacctgcagcttcggcagaagcgccgccctggaggaggtgctggacaaggacgacatggtgtacatggaggcctacgacaagctgctggagagctggctgaccctggtgcaggacgacaagcacttccacaagggcttcttcacccagcacgccgtgcaggtgttcaacagctacatccagtgccacctggccgcccccgacggcaccagaaacctgaccgccaacggcgtggccagcagagaggaggaggagatcagcgagctgcaggaggacgacagagaccagttcagcgaccagctggccagcgtgggcatgctgggcagaatcgccgccgagcactgcatccccctgctgaccagcctgctggaggagagagtgaccagactgcacggccagctgcagagacaccagcagcagctgctggccagccccggcagcagcaccgtggacaacaagatgctggacgacctgtacgaggacatccactggctgatcctggtgaccggctacctgctggccgacgacacccagggcgagacccccctgatcccccccgagatcatggagtacagcatcaagcacagcagcgaggtggacatcaacaccaccctgcagatcctgggcagccccggcgagaaggccagcagcatccccggctacaacagaaccgacagcgtgatcagactgctgagcgccatcctgagagtgagcgaggtggagagcagagccatcagagccgacctgacccacctgctgagcccccagatgggcaaggacatcgtgtggttcctgaagagatgggccaagacctacctgctggtggacgagaagctgtacgaccagatcagcctgcccttcagcaccgccttcggcgccgacaccgagggcagccagtggatcatcggctacctgctgcagaaggtgatcagcaacctgagcgtgtggagcagcgagcaggacctggccaacgacaccgtgcagctgctggtgaccctggtggagagaagagagagagccaacctggtgatccagtgcgagaactggtggaacctggccaagcagttcgccagcagaagcccccccctgaacttcctgagcagccccgtgcagagaaccctgatgaaggccctggtgctgggcggcttcgcccacatggacaccgagaccaagcagcagtactggaccgaggtgctgcagcccctgcagcagagattcctgagagtgatcaaccaggagaacttccagcagatgtgccagcaggaggaggtgaagcaggagatcaccgccaccctggaggccctgtgcggcatcgccgaggccacccagatcgacaacgtggccatcctgttcaacttcctgatggacttcctgaccaactgcatcggcctgatggaggtgtacaagaacacccccgagaccgtgaacctgatcatcgaggtgttcgtggaggtggcccacaagcagatctgctacctgggcgagagcaaggccatgaacctgtacgaggcctgcctgaccctgctgcaggtgtacagcaagaacaacctgggcagacagagaatcgacgtgaccgccgaggaggagcagtaccaggacctgctgctgatcatggagctgctgaccaacctgctgagcaaggagttcatcgacttcagcgacaccgacgaggtgttcagaggccacgagcccggccaggccgccaacagaagcgtgagcgccgccgacgtggtgctgtacggcgtgaacctgatcctgcccctgatgtag

SEQ ID NO: 212196 - DNA, 3456 bp, Artificial Sequence
  derived and/or modified sequence
atgatggcagcagctctgggcccacccgaagtgattgcccagttggagaacgccgcaaaggtgctcatggctccaccctcaatggtgaacaatgaacagcgccagcacgcggaacacatctttctctcgtttagaaaatctaagtcgccttttgccgtgtgcaaacacatccttgagacttcgaaggtcgattacgtactcttccaggcggcaacagccatcatggaggccgtcgtgcgcgagtggattctgttagaaaagggctctatagaaagcttgcgcacattcctactcacttacgttttgcaacggccgaacctgcaaaagtatgtgagggaacagatcctcctggctgtggccgtcatcgtcaagagaggctccctcgacaagtcaatcgactgcaagtcaatttttcatgaggtgtctcaactgatttcaagcggcaacccaactgtgcagacactggcctgctccattcttaccgcactcctgtctgaattctccagctcttcaaaaacaagcaacattggactttccatggagttccatggcaactgcaaaagggtgttccaagaagaagatctcagacagatctttatgttaacggttgaggtgctgcaggaattttcccggcgggagaaccttaatgcccaaatgtccagcgtgtttcagcgctacctggcacttgctaaccaggtcctgtcatggaatttccttccgcccaatctcggacgacactacatagcgatgttcgaaagctcccagaacgtcctgctgaaacctacagagtcctggcgcgagaccctcctcgacagtcgggtgatggaactgttttttactgtccatcgcaaaataagggaggactctgacatggcgcaggattccctgcaatgcctcgcacaattggccagccttcacggaccgatctttccagacgagggcagccaagtcgactatctggctcattttatagaaggcttgcttaatacaatcaacggcatcgaaatagaggactccgaagcagttggcatcagttctattatctcaaatctgatcaccgtatttccaaggaacgtcctcaccgccattcctagcgagctgttctcgtcatttgtgaactgccttacacatctgacttgttcatttggcaggtctgcagcactggaagaggtgctggacaaggacgacatggtctacatggaggcctacgataagctactggagtcttggttaactctcgtacaggatgacaagcactttcataaaggattctttacccagcatgctgtacaggtctttaactcctacatccaatgccatctggcagccccggacggcactaggaatctgacagctaacggcgttgcctctagagaagaggaggagatctcagagctgcaagaggatgaccgggaccagttttccgaccagctggcaagtgttggcatgctcggccgaatcgccgccgagcactgcatcccactgctcaccagccttcttgaagagcgggtcacacgccttcacggtcagctgcagcggcaccagcagcagcttttagcgtctccggggagttcaaccgtcgataacaagatgttggatgacctatatgaagacattcactggctgatcctggtgacaggttacctgttggcagacgacacccaaggagagactcccctcattcccccagagataatggaatattcgataaaacactcttcagaagttgacattaataccaccctgcagatcctggggtcgcccggtgagaaggcctcctctataccggggtataacaggaccgattcagtaatcaggctgttaagcgctatcttacgggtatcggaagtcgagtctagggcgattagagccgatcttactcatctgctttcgccacaaatggggaaggacatcgtgtggtttctcaaacggtgggctaagacttacctgcttgtggatgaaaagctgtacgatcagatatcactgccattttccacagcgttcggcgcggacacggaaggttcccaatggatcatcggatatttactccagaaggtcatcagcaacttatcggtgtggtctagcgagcaggacctggccaacgacactgtgcagctcctggtcactctagtagagcgaagagagagggcaaacctggttatccaatgtgaaaactggtggaatctagctaaacagttcgcctcaagaagcccaccactgaacttcctctctagccctgtgcagcggaccctcatgaaagcgttagtgctggggggatttgcccacatggataccgaaacaaagcaacagtattggacggaagttctgcagccactacagcaaaggtttctcagggtgatcaatcaggagaacttccagcagatgtgccagcaagaagaggtgaaacaggaaataacagcgaccttagaggccctttgcgggattgcggaggcaactcagatcgataatgtagcgattctcttcaattttctgatggactttctcaccaattgtattgggcttatggaggtttataaaaacacgcctgagacggtgaatctgataatagaggtgtttgtggaggtggcccataagcaaatttgctacctgggtgaaagtaaggccatgaacctttacgaagcatgtctaacactgctccaggtctattcaaagaacaatttgggtcgacagaggattgacgtgacggcagaggaggagcagtaccaggacctgctgctgataatggaactgctaactaatctactgtcaaaggaatttattgacttcagcgatacagatgaggtttttcgtggccatgaaccaggtcaagccgccaatcgatccgtcagcgcagctgacgtggtcctctacggagtaaatctcatccttcctctgatgagtcaggacctattgaagtttccaaccctatgtaaccagtactacaagctcattactttcatatgtgagatcttcccggagaaaatacctcagttgcccgaggatctcttcaaatctttaatgtactcactggagctaggtatgacctccatgagctccgaggtttgccagctctgtctggaagcccttacccctctcgccgaacagtgcgcaaaggctcaagagactgactccccactgtttctcgcgacacgacatttccttaaactggtttttgacatgctagtgctgcaaaaacacaataccgaaatgaccaccgctgctggcgaagccttctataccctggtatgccttcatcaagccgaatatagcgagctcgtggagactctcctgagcagccagcaggatccagtaatatatcaaaggctggccgacgccttcaataagttgacggctagcagtactccccctaccctcgacaggaagcagaagatggcctttcttaaatccctggaagaatttatggctaatgtcgggggacttctgtgcgtgaaatag

SEQ ID NO: 212197 - DNA, 3456 bp, Artificial Sequence
  derived and/or modified sequence
atgatggccgcggccctcggcccccccgaagtcatcgcacagcttgagaatgctgcgaaggtgctaatggctcccccatcgatggttaataatgagcagcgccagcacgctgaacatatcttcctgtccttccgcaaaagtaagagcccattcgctgtttgtaagcatatcctggagaccagcaaagttgactacgtgctgttccaggctgcgaccgctatcatggaagccgtggttagagagtggattcttttggaaaagggttctatagaatcactgcgcacatttctccttacctatgtactccagagacctaatctgcagaagtacgttagggaacaaatcttgcttgcagtagctgtcatcgtgaagaggggcagtttggacaagtccatcgattgtaagtcaatttttcatgaagtgtcgcagttgatatcctccggaaacccaaccgtacaaaccctggcctgtagcattctcactgcccttttaagtgagtttagttcttctagcaagacctccaacataggactgagtatggagtttcacgggaattgtaagcgggtgtttcaggaggaagacttacgtcaaatcttcatgctgacagtggaagtactccaggagtttagcagacgggagaatctgaacgctcagatgagcagtgtattccaacgctatctggcccttgccaatcaggtgctgagttggaattttctcccccccaaactgggccgccattacatcgcgatgttcgaatcgtcccagaatgtcttgctaaaaccaactgagtcctggagagaaaccctcctggattcaagagtgatggagctcttctttactgtgcaccgcaagataagggaagacagtgatatggcacaggatagtctacagtgcttggcgcagttggcctccctgcatggacccatctttcctgatgaagggagtcaggtcgactacctggctcacttcatcgaagggttgctcaataccattaacgggattgagatcgaggactcggaggccgttgggatatcaagtattatcagcaatttgatcacagtcttccctcggaacgttctgaccgccataccttccgaattattttcttcctttgtgaattgcctaacgcacctgacctgttctttcggccgctctgccgccctggaggaggtgctggataaagacgacatggtctatatggaagcttacgataaattacttgaaagttggttaactctagtccaagacgataagcattttcacaaaggctttttcacccagcatgctgtacaagtttttaactcatatattcagtgtcacttggccgcccctgatggaactagaaacctgacagctaacggcgtcgcatcaagagaggaggaagagattagtgagctccaggaagacgaccgggatcagttctccgaccagctggctagtgtcggcatgttaggcaggatcgcagccgaacattgcatcccactgttgacatcactgctcgaggaacgcgtcactagattacacggccagctccagagacaccaacagcagctgcttgcatctccggggtctagcaccgtggacaataaaatgctggacgatctctatgaagacatacactggctgattctcgttacaggataccttttggccgacgacacacagggggaaacgcctttaattcctccagaaattatggaatactccatcaaacactctagcgaggtggatatcaatacgacattgcagattttgggaagcccgggggagaaggccagcagcattccggggtataatcggactgactctgtgatcaggctgctttcagccattttgagggtttcggaggtggaatccagggcaattcgggcagacctaacgcacctcctgtcaccacaaatgggaaaagacatcgtctggttcctgaaaaggtgggccaagacgtacctcttagtcgacgagaagctgtatgaccaaatctccctgcccttttccaccgcattcggggccgacactgaaggatcccaatggatcataggatatcttcttcagaaggtgatctccaatctgtccgtgtggtcttcagagcaggatctagctaacgacaccgttcagctgctggtaacactcgtcgagcgtcgggagcgggccaatctggttattcagtgcgaaaattggtggaacttggccaagcagtttgcttcccgctccccccctttgaacttcctttcttcgcctgtacagaggacgctgatgaaggcactcgtcctgggagggttcgcccatatggatactgagacgaaacagcagtactggacagaggtgttgcagcctctacaacaacggttcttgagagtgattaatcaggaaaacttccagcagatgtgccaacaggaagaagtgaagcaggagattacagccacgctcgaagccttatgcgggatcgccgaggctacccaaattgataacgttgcgatcttattcaatttcctgatggacttcctaactaattgcattggactgatggaagtgtacaagaacacacccgaaaccgtgaatctgataatagaggttttcgtggaagtggcccacaagcagatatgttacctcggagagtcaaaggccatgaatctctacgaagcctgcctcaccctgctgcaggtatactctaagaataacctcggccgacagcggatcgatgttactgcggaggaagagcagtaccaggacttgttactcatcatggagctgctcacaaatcttctgtcaaaggaattcatcgatttttccgacaccgacgaagtgttcaggggtcatgagccagggcaagcagctaacaggagtgtctcagctgcagatgttgtgctatatggtgtaaacctcattctgcctttgatgtcccaggacctgctcaaatttccaactctgtgtaatcagtactacaaacttattacttttatttgtgagatctttcctgagaagatcccacagcttccggaggatctattcaagagcctgatgtactccctcgagctcggtatgacttctatgtcgtccgaagtgtgccagttgtgtttggaagccctgacacccttggcagagcagtgtgctaaggctcaggaaacggacagcccgttattcctggcaacccgtcattttttaaaacttgtctttgatatgttggttcttcagaaacacaacacagaaatgacaaccgctgcaggggaagcattttacaccttagtgtgtctccaccaggccgagtattccgaactcgtggagaccctccttagctctcagcaggatcccgtgatttaccagaggctggctgatgcttttaataagctcactgcatcttctacccccccaaccttggacaggaagcagaaaatggccttcctgaagtcactcgaggagtttatggcgaacgtgggcggactgctgtgtgttaagtag

SEQ ID NO: 212198 - DNA, 2511 bp, Artificial Sequence
  derived and/or modified sequence
atggcagctgccctgggcccgcctgaagtaatagcccagctcgagaacgccgcgaaagttttaatgcagactttggcatgttccatcctgaccgccctgttgtccgaattctctagctcttcaaaaacctccaatattggactgtcaatggagttccatggaaattgcaaacgggtcttccaggaagaagatttgcggcagattttcatgctgaccgttgaagtgctgcaggagttcagccgaagggagaacttgaatgctcaaatgtcttccgtgttccaaagatacctggccctggcaaatcaggtgctaagctggaatttcctcccccctaaactcggcaggcattacattgcaatgttcgagagcagccagaatgtgctcttaaagccgactgaatcctggcgtgaaaccctgcttgattctagagttatggagctgtttttcactgtgcatagaaaaattcgggaggattctgatatggcccaggatagtttgcagtgcctcgcccagctcgctagtttacatggccctatctttccggacgaaggtagccaggtggactatctggctcactttatcgaaggccttctcaatacaattaacggaattgaaattgaggacagcgaggctgtgggtatctcttcgattatttcaaatctgattaccgtcttcccccgtaatgtattaacggccatcccttctgaactgttctctagttttgtgaactgtttaacccacctaacatgtagcttcggacgatcagcagccctcgaagaggttctggataaggacgacatggtgtacatggaggcttacgataagttattggaaagctggctgactctggtgcaagacgacaagcattttcataaagggttcttcacccagcatgccgtccaggtttttaactcctatattcagtgtcacctcgccgccccggacgggacgcgaaacctaaccgctaacggcgttgcttcgcgggaggaggaagagatttcggaattgcaagaagacgacagggaccagttcagcgatcagttagcctcagttggtatgttagggcgcatcgccgcagaacactgcattccccttctgactagcctcctcgaggagagggtaactagactacacgggcaactccaacggcatcaacagcagcttctggcatccccgggcagttccactgtagacaacaagatgctggatgacctttacgaggatatccactggctgatcctcgtcacaggttatctactggccgacgacacccagggtgagacacctctaattccccctgagatcatggagtatagcataaaacactcttctgaagtggatatcaatacaactttgcaaattttgggaagtcccggtgaaaaggcctcctctatccctggctacaacaggactgacagtgtgatcaggctcctgtcggcaatcttacgcgtgtcagaagttgagagccgcgccataagagcggatctgacccacctgctgtccccccagatggggaaggacatagtgtggttcctcaagcgctgggccaagacatatctcctcgtggatgaaaagctgtacgatcagataagcttgccgttctccactgccttcggcgctgataccgaggggtcccaatggattatcggctacctgctgcagaaagttatctcaaacctctcagtgtggagctctgagcaggacttggcaaacgacaccgttcagcttcttgtgacactggttgagagaagggagcgcgccaatcttgtcattcaatgtgagaattggtggaacttagctaagcagtttgcctccagaagtccacctctaaatttcctctcctcacccgtgcagagaacactaatgaaggctctggtcctgggcgggttcgcccacatggacaccgagaccaagcagcagtattggacggaagttcttcaaccactccaacagagatttctgagggtcattaatcaggaaaactttcaacagatgtgtcaacaggaggaagtgaaacaggagatcactgctacactggaagccctgtgtggtatcgctgaagccacccaaatcgataatgtggccatcttgtttaatttcctgatggactttctgaccaactgcatcggattaatggaagtatacaaaaacacccccgagactgtcaacctgatcatagaggtctttgttgaagtggcccacaaacaaatctgctatctgggcgaatctaaggcgatgaacctgtacgaggcttgtctgacactactccaagtctactctaaaaacaatttaggccgccaacgcatcgatgtgaccgcagaagaggagcagtaccaagacctgctgttgatcatggagctactgacaaatcttctgtcaaaggaattcatcgattttagtgataccgatgaggtgtttcgggggcacgaacccggacaggcggccaatcgttctgttagtgcagctgacgttgtactctatggagtgaaccttatcttgccactaatgtag

SEQ ID NO: 212199 - DNA, 3456 bp, Artificial Sequence
  derived and/or modified sequence
atgatggccgccgccctgggccccccagaggtgattgcccagctggagaatgctgccaaggtgctgatggcccctccttccatggtgaacaatgagcagaggcagcacgccgagcacatcttcctgtccttcaggaagagcaagagcccctttgctgtgtgcaagcacatcctggagaccagcaaggtggactatgtgctcttccaggccgccacagccatcatggaggccgtggtgcgggagtggatcctgctggagaagggcagcattgagagcctgcggaccttcctgctgacctacgtgctgcagaggcccaacctgcagaagtatgtgcgggagcagatcctgctggccgtggccgtcatcgtgaagaggggcagcctggacaagagcattgactgcaagagcatcttccacgaggtgtcccagctgatcagcagcggcaaccccaccgtgcagaccctggcctgcagcatcctgacagccctgctgtctgagttcagcagcagcagcaagaccagcaacatcggcctgtccatggagttccacggcaactgcaagagggtcttccaggaggaggacctgcggcagatcttcatgctgactgtggaggtgctgcaggagttcagcagaagagagaacctgaatgcccagatgagctctgtgttccagcgctacctggccctggccaaccaggtgctgtcctggaacttcctgccccccaacctgggccgccactacatcgccatgtttgagagcagccagaatgtgctgctgaagcccacagagagctggagggagaccctgctggacagccgggtgatggagctgttcttcaccgtgcacaggaagatcagagaagattctgacatggcccaggacagcctgcagtgcctggcccagctggccagcctgcacggccccatcttcccagatgagggcagccaggtggactacctggcccacttcatcgagggcctgctgaacaccatcaatggcatcgagattgaagattctgaggccgtgggcatcagcagcatcatcagcaacctgatcaccgtcttccccagaaatgtgctgacagccatccccagcgagctgttcagcagctttgtgaactgcctgacccacctgacctgcagctttggccgctctgctgccctggaggaggtgctggacaaggatgacatggtgtacatggaggcctatgacaagctgctggagagctggctgaccctggtgcaggatgacaagcacttccacaagggcttcttcacccagcacgctgtgcaggtgttcaacagctacatccagtgccacctggccgccccagatggcaccaggaacctgacagccaatggagtggccagccgggaggaggaggagatcagcgagctgcaggaggatgaccgggaccagttcagtgaccagctggcctctgtgggcatgctgggcagaattgctgctgagcactgcatccccctgctgaccagcctgctggaggagcgggtgacccggctgcacggccagctgcagaggcaccagcagcagctgctggccagccctggcagcagcacagtggacaacaagatgctggatgacctgtatgaggacatccactggctgatcctggtgacaggctacctgctggctgatgacacccagggcgagacccccctcatccccccagagatcatggagtacagcatcaagcacagcagcgaggtggacatcaacaccaccctgcagatcctgggcagccctggagagaaggccagcagcatccctggctacaacagaacagattctgtcatccggctgctgagcgccatcctgcgggtgtctgaggtggagagccgggccatccgggctgacctgacccacctgctgagcccccagatgggcaaggacatcgtgtggttcctgaagcgctgggccaagacctacctgctggtggatgagaagctgtatgaccagatcagcctgcccttcagcacagccttcggggctgacacagagggcagccagtggatcatcggctacctgctgcagaaggtgatcagcaacctgtctgtgtggagcagcgagcaggacctggccaatgacacagtgcagctgctggtgaccctggtggagcggcgggagcgggccaacctggtgatccagtgtgagaactggtggaacctggccaagcagtttgccagccgcagcccccccctgaacttcctgagcagccctgtgcagaggaccctgatgaaggccctggtgctgggcggctttgcccacatggacacagagaccaagcagcagtactggacagaggtgctgcagcccctgcagcagcgcttcctgcgggtcatcaaccaggagaacttccagcagatgtgccagcaggaggaggtgaagcaggagatcacagccaccctggaggccctgtgtggcattgctgaggccacccagattgacaacgtggccatcctcttcaacttcctgatggacttcctgaccaactgcatcggcctgatggaggtgtacaagaacaccccagagaccgtgaacctgatcatcgaggtgtttgtggaggtggcccacaagcagatctgctacctgggggagagcaaggccatgaacctgtatgaggcctgcctgaccctgctgcaggtgtacagcaagaacaacctgggccggcagagaattgatgtgacagctgaggaggagcagtaccaggacctgctgctgatcatggagctgctgaccaacctgctgagcaaggagttcatcgacttcagtgacacagatgaggtgttccggggccacgagcccggccaggccgccaacagatctgtgtctgctgctgatgtggtgctgtatggagtgaacctgatcctgcccctgatgagccaggacctgctgaagttccccaccctgtgcaaccagtactacaagctgatcaccttcatctgtgagatcttccctgagaagatcccccagctgcctgaggacctcttcaagagcctgatgtacagcctggagctgggcatgacctccatgagcagcgaggtgtgccagctgtgcctggaggccctgacccccctggccgagcagtgtgccaaggcccaggagacagacagccccctcttcctggccaccaggcacttcctgaagctggtgtttgacatgctggtgctgcagaagcacaacacagagatgaccacagctgctggggaggccttctacaccctggtgtgcctgcaccaggccgagtacagcgagctggtggagaccctgctgagcagccagcaggaccctgtgatctaccagaggctggctgatgccttcaacaagctgacagccagcagcaccccacccaccctggacaggaagcagaagatggccttcctgaagagcctggaggagttcatggccaacgtgggcggcctgctgtgtgtgaagtag

SEQ ID NO: 212200 - DNA, 3456 bp, Artificial Sequence
  derived and/or modified sequence
atgatggccgccgccctgggccccccagaggtgattgcccagctggagaatgctgccaaggtgctgatggcccctccttccatggtgaacaatgagcagaggcagcacgccgagcacatcttcctgtccttcaggaagagcaagagcccctttgctgtgtgcaagcacatcctggagaccagcaaggtggactatgtgctcttccaggccgccacagccatcatggaggccgtggtgcgggagtggatcctgctggagaagggcagcattgagagcctgcggaccttcctgctgacctacgtgctgcagaggcccaacctgcagaagtatgtgcgggagcagatcctgctggccgtggccgtcatcgtgaagaggggcagcctggacaagagcattgactgcaagagcatcttccacgaggtgtcccagctgatcagcagcggcaaccccaccgtgcagaccctggcctgcagcatcctgacagccctgctgtctgagttcagcagcagcagcaagaccagcaacatcggcctgtccatggagttccacggcaactgcaagagggtcttccaggaggaggacctgcggcagatcttcatgctgactgtggaggtgctgcaggagttcagcagaagagagaacctgaatgcccagatgagctctgtgttccagcgctacctggccctggccaaccaggtgctgtcctggaacttcctgccccccaagctgggccgccactacatcgccatgtttgagagcagccagaatgtgctgctgaagcccacagagagctggagggagaccctgctggacagccgggtgatggagctgttcttcaccgtgcacaggaagatcagagaagattctgacatggcccaggacagcctgcagtgcctggcccagctggccagcctgcacggccccatcttcccagatgagggcagccaggtggactacctggcccacttcatcgagggcctgctgaacaccatcaatggcatcgagattgaagattctgaggccgtgggcatcagcagcatcatcagcaacctgatcaccgtcttccccagaaatgtgctgacagccatccccagcgagctgttcagcagctttgtgaactgcctgacccacctgacctgcagctttggccgctctgctgccctggaggaggtgctggacaaggatgacatggtgtacatggaggcctatgacaagctgctggagagctggctgaccctggtgcaggatgacaagcacttccacaagggcttcttcacccagcacgctgtgcaggtgttcaacagctacatccagtgccacctggccgccccagatggcaccaggaacctgacagccaatggagtggccagccgggaggaggaggagatcagcgagctgcaggaggatgaccgggaccagttcagtgaccagctggcctctgtgggcatgctgggcagaattgctgctgagcactgcatccccctgctgaccagcctgctggaggagcgggtgacccggctgcacggccagctgcagaggcaccagcagcagctgctggccagccctggcagcagcacagtggacaacaagatgctggatgacctgtatgaggacatccactggctgatcctggtgacaggctacctgctggctgatgacacccagggcgagacccccctcatccccccagagatcatggagtacagcatcaagcacagcagcgaggtggacatcaacaccaccctgcagatcctgggcagccctggagagaaggccagcagcatccctggctacaacagaacagattctgtcatccggctgctgagcgccatcctgcgggtgtctgaggtggagagccgggccatccgggctgacctgacccacctgctgagcccccagatgggcaaggacatcgtgtggttcctgaagcgctgggccaagacctacctgctggtggatgagaagctgtatgaccagatcagcctgcccttcagcacagccttcggggctgacacagagggcagccagtggatcatcggctacctgctgcagaaggtgatcagcaacctgtctgtgtggagcagcgagcaggacctggccaatgacacagtgcagctgctggtgaccctggtggagcggcgggagcgggccaacctggtgatccagtgtgagaactggtggaacctggccaagcagtttgccagccgcagcccccccctgaacttcctgagcagccctgtgcagaggaccctgatgaaggccctggtgctgggcggctttgcccacatggacacagagaccaagcagcagtactggacagaggtgctgcagcccctgcagcagcgcttcctgcgggtcatcaaccaggagaacttccagcagatgtgccagcaggaggaggtgaagcaggagatcacagccaccctggaggccctgtgtggcattgctgaggccacccagattgacaacgtggccatcctcttcaacttcctgatggacttcctgaccaactgcatcggcctgatggaggtgtacaagaacaccccagagaccgtgaacctgatcatcgaggtgtttgtggaggtggcccacaagcagatctgctacctgggggagagcaaggccatgaacctgtatgaggcctgcctgaccctgctgcaggtgtacagcaagaacaacctgggccggcagagaattgatgtgacagctgaggaggagcagtaccaggacctgctgctgatcatggagctgctgaccaacctgctgagcaaggagttcatcgacttcagtgacacagatgaggtgttccggggccacgagcccggccaggccgccaacagatctgtgtctgctgctgatgtggtgctgtatggagtgaacctgatcctgcccctgatgagccaggacctgctgaagttccccaccctgtgcaaccagtactacaagctgatcaccttcatctgtgagatcttccctgagaagatcccccagctgcctgaggacctcttcaagagcctgatgtacagcctggagctgggcatgacctccatgagcagcgaggtgtgccagctgtgcctggaggccctgacccccctggccgagcagtgtgccaaggcccaggagacagacagccccctcttcctggccaccaggcacttcctgaagctggtgtttgacatgctggtgctgcagaagcacaacacagagatgaccacagctgctggggaggccttctacaccctggtgtgcctgcaccaggccgagtacagcgagctggtggagaccctgctgagcagccagcaggaccctgtgatctaccagaggctggctgatgccttcaacaagctgacagccagcagcaccccacccaccctggacaggaagcagaagatggccttcctgaagagcctggaggagttcatggccaacgtgggcggcctgctgtgtgtgaagtag

SEQ ID NO: 212201 - DNA, 2511 bp, Artificial Sequence
  derived and/or modified sequence
atggctgctgccctgggccccccagaggtgattgcccagctggagaatgctgccaaggtgctgatgcagaccctggcctgcagcatcctgacagccctgctgtctgagttcagcagcagcagcaagaccagcaacatcggcctgtccatggagttccacggcaactgcaagagggtcttccaggaggaggacctgcggcagatcttcatgctgactgtggaggtgctgcaggagttcagcagaagagagaacctgaatgcccagatgagctctgtgttccagcgctacctggccctggccaaccaggtgctgtcctggaacttcctgccccccaagctgggccgccactacatcgccatgtttgagagcagccagaatgtgctgctgaagcccacagagagctggagggagaccctgctggacagccgggtgatggagctgttcttcaccgtgcacaggaagatcagagaagattctgacatggcccaggacagcctgcagtgcctggcccagctggccagcctgcacggccccatcttcccagatgagggcagccaggtggactacctggcccacttcatcgagggcctgctgaacaccatcaatggcatcgagattgaagattctgaggccgtgggcatcagcagcatcatcagcaacctgatcaccgtcttccccagaaatgtgctgacagccatccccagcgagctgttcagcagctttgtgaactgcctgacccacctgacctgcagctttggccgctctgctgccctggaggaggtgctggacaaggatgacatggtgtacatggaggcctatgacaagctgctggagagctggctgaccctggtgcaggatgacaagcacttccacaagggcttcttcacccagcacgctgtgcaggtgttcaacagctacatccagtgccacctggccgccccagatggcaccaggaacctgacagccaatggagtggccagccgggaggaggaggagatcagcgagctgcaggaggatgaccgggaccagttcagtgaccagctggcctctgtgggcatgctgggcagaattgctgctgagcactgcatccccctgctgaccagcctgctggaggagcgggtgacccggctgcacggccagctgcagaggcaccagcagcagctgctggccagccctggcagcagcacagtggacaacaagatgctggatgacctgtatgaggacatccactggctgatcctggtgacaggctacctgctggctgatgacacccagggcgagacccccctcatccccccagagatcatggagtacagcatcaagcacagcagcgaggtggacatcaacaccaccctgcagatcctgggcagccctggagagaaggccagcagcatccctggctacaacagaacagattctgtcatccggctgctgagcgccatcctgcgggtgtctgaggtggagagccgggccatccgggctgacctgacccacctgctgagcccccagatgggcaaggacatcgtgtggttcctgaagcgctgggccaagacctacctgctggtggatgagaagctgtatgaccagatcagcctgcccttcagcacagccttcggggctgacacagagggcagccagtggatcatcggctacctgctgcagaaggtgatcagcaacctgtctgtgtggagcagcgagcaggacctggccaatgacacagtgcagctgctggtgaccctggtggagcggcgggagcgggccaacctggtgatccagtgtgagaactggtggaacctggccaagcagtttgccagccgcagcccccccctgaacttcctgagcagccctgtgcagaggaccctgatgaaggccctggtgctgggcggctttgcccacatggacacagagaccaagcagcagtactggacagaggtgctgcagcccctgcagcagcgcttcctgcgggtcatcaaccaggagaacttccagcagatgtgccagcaggaggaggtgaagcaggagatcacagccaccctggaggccctgtgtggcattgctgaggccacccagattgacaacgtggccatcctcttcaacttcctgatggacttcctgaccaactgcatcggcctgatggaggtgtacaagaacaccccagagaccgtgaacctgatcatcgaggtgtttgtggaggtggcccacaagcagatctgctacctgggggagagcaaggccatgaacctgtatgaggcctgcctgaccctgctgcaggtgtacagcaagaacaacctgggccggcagagaattgatgtgacagctgaggaggagcagtaccaggacctgctgctgatcatggagctgctgaccaacctgctgagcaaggagttcatcgacttcagtgacacagatgaggtgttccggggccacgagcccggccaggccgccaacagatctgtgtctgctgctgatgtggtgctgtatggagtgaacctgatcctgcccctgatgtag

SEQ ID NO: 212202 - DNA, 3456 bp, Artificial Sequence
  derived and/or modified sequence
atgatggccgccgccctgggcccccccgaggtgatcgcccagctggagaatgccgcaaaagtgctgatggcgccgccatccatggtaaacaacgagcagaggcaacatgcagagcatatcttcttgtcgtttagaaaaagtaagtcgccttttgcagtgtgcaagcacatcctggaaaccagcaaggtggactacgtcctgttccaggccgctacagctatcatggaggcagtggttcgtgagtggattctgctcgagaaaggctctatcgagtctctgcgcaccttcctgcttacttacgtcctgcagagaccaaacctccagaagtacgtccgggagcagattctcctggccgttgcagtgatcgtaaaacgggggtcgctggacaagtctatcgattgtaaatctatcttccacgaggtgtcacagttaatcagtagcggcaaccccactgtccagacactagcctgtagcatcctgactgccctgctatccgaattttcctccagctcaaaaacaagcaatatcggcctcagcatggagtttcacggaaactgcaaacgagtgttccaggaagaagacctgagacagatttttatgcttactgtggaagtccttcaagaattcagccgaagggagaacctcaacgctcagatgtcaagcgtgttccagcggtacctagctctcgccaaccaggtcctcagctggaacttcctgccaccgaatctgggccgtcactacattgccatgttcgagagctctcagaacgttctgttaaagccaacggaatcgtggagggagaccttgctcgactctcgcgtcatggagttattcttcacagtgcatcgtaagataagggaagattctgatatggcccaggactcactgcagtgtttggctcagttagcaagcctgcacggccctatctttcccgatgagggcagtcaggtggactaccttgcgcacttcatcgaaggcttgctgaatacaattaacgggatcgagattgaggatagtgaagccgttggcatatcctccatcatctcaaatctcataacagtgttcccaagaaacgtattgaccgccataccctcagaacttttttctagtttcgtgaattgtctcacccatctcacatgcagctttggtaggagcgcggctctcgaggaagttctggacaaggacgatatggtgtacatggaagcatatgataaactgcttgaaagttggctgaccttagtccaagatgacaagcacttccacaaagggttcttcacccagcacgctgtccaggtgtttaattcctacatacagtgtcatttggccgccccggatggaacccgcaaccttacggcaaatggggtggccagcagagaagaggaggagatttccgaactgcaagaggatgatagggaccaattctctgaccaactcgcctccgttggaatgctgggacgcatcgccgccgagcactgtatcccactgctcacctcccttttggaggagcgggtgaccagactccatggacagctccagagacatcagcagcagcttcttgccagtcccggctcgtcgacagttgataacaaaatgttggacgatctctacgaggatatccattggctgatcttggtcactgggtatctgcttgccgacgatacccagggtgagacacctctcattcccccggaaattatggaatactccataaagcacagctctgaagttgatattaacaccacgctacagattctgggctcaccaggggaaaaagctagcagcatcccagggtacaatcggacagactccgtaatccggctgttgtccgccatcctgagagtgtccgaagtggagtcacgcgccatcagagcggatctgactcatctattgagcccccaaatgggcaaagatatagtctggttcctgaagagatgggccaaaacatacctgttagtggacgagaagctatatgaccagattagcctgcctttttcgacggctttcggtgctgacaccgagggatctcagtggatcatagggtacctcctgcagaaagtgatcagcaacctatccgtctggtcctcagagcaagacctggcaaacgatacggtacagctcctcgttactttggtggaacgacgcgagcgcgccaatctggtcatacagtgtgaaaactggtggaatctggcaaagcagtttgcgagtaggagcccgccgcttaacttcctaagttcccccgtgcaacgcaccctaatgaaagcccttgtactgggcggcttcgcccatatggataccgagaccaagcagcagtattggacggaggtgctacaacctctccagcagcggttcctccgggtcatcaaccaagagaatttccaacagatgtgccaacaagaggaggtgaaacaggagattactgccacccttgaagccctgtgcggtatcgcggaggcgacccagatagataacgtggcgatcctcttcaacttcttgatggacttcctgacaaactgcatcggtctgatggaggtatataagaacacaccagagacagtgaatctgataattgaagtctttgtggaggtggcacataagcagatttgctacctgggggagagtaaggcaatgaacctgtacgaagcatgcttaacccttcttcaagtctatagtaaaaataacctaggccgccaacggatcgatgtcaccgctgaagaggagcagtaccaggacctgcttctcattatggaacttttaacaaacctgctcagcaaggaatttatagatttttctgatacagacgaggtctttcgtgggcatgaacccggacaagcagcgaatcggtcagtctccgctgccgacgtagtactgtatggggtcaacctgatacttccgctgatgtcgcaagacttgctgaagttccctacgctgtgtaaccaatattacaaactgatcactttcatttgcgagatttttcctgagaagatcccacagctgcccgaggacttgtttaaaagcctgatgtacagcttagagctcgggatgacgtccatgtcttccgaggtctgtcagctttgtctggaagccctgacacctctcgcggaacagtgcgccaaggctcaggagaccgattccccactgttcttggccacgagacactttctaaagttggtgtttgatatgctggtgttacagaagcataacactgagatgacaacagcagccggtgaggctttttacactcttgtttgtcttcatcaggcagaatactctgaactggtggagacgctgctgtcgagccagcaggatccggtgatttatcagagacttgccgacgctttcaacaagctgactgcttcttccactccccccaccttagaccgaaagcagaagatggccttcttgaagagtctcgaggagttcatggctaatgtcggcggcctattgtgtgtgaaatag

SEQ ID NO: 212203 - DNA, 3456 bp, Artificial Sequence
  derived and/or modified sequence
atgatggccgccgccctgggcccccccgaggtgatcgcccagctggaaaatgcggctaaggtgctgatggctccgccgtctatggtgaataacgagcagcgccagcatgctgaacacatattcctgtcgtttcgaaaatccaaatcaccgtttgcagtttgcaaacatattctcgagacaagcaaggtcgattacgtgctgtttcaggcagcaacagcaattatggaagcagtagttagggaatggattctgttagagaaaggctccatcgagagccttcgaacgtttctcttaacgtatgtgctgcagagacctaatcttcaaaaatatgtgcgcgagcagatactactagctgtggcagtcatcgtgaaacgcggctctctagacaaatctattgactgcaagtccatattccacgaggtatctcagctcatatcatccggcaacccaaccgtacagactctcgcttgcagcattctcaccgctcttttgagtgagttttcatcttcgagcaaaacatccaacatcggactgagcatggagtttcacggcaactgcaagcgcgtttttcaagaagaggatctcaggcagatttttatgctcacggtggaggtccttcaggaatttagtagacgcgagaacctgaacgcccagatgagtagcgtcttccagcgctacctcgcactggctaaccaggtcctcagttggaacttcctgcctcctaagctgggacgacattacatcgcgatgttcgagtcaagtcagaacgtcctgctcaaaccaacagagagctggcgtgaaacacttcttgatagtcgcgtgatggagctattttttacagtgcacaggaaaatacgggaagattccgacatggctcaggacagcctgcaatgcttggctcaattggcgagcttacacgggccaatatttcctgatgagggatcgcaggtggactatttggcccacttcatcgagggcctgctcaacactatcaatggtatcgaaattgaggacagcgaggccgtcggcatctcttccatcatttccaacctgatcaccgtgtttcctaggaatgtgctaaccgctatcccttctgagcttttctcatcatttgtgaattgcctcacccaccttacgtgctcattcgggaggagtgccgctctcgaagaggtgctcgataaagacgatatggtttatatggaagcctatgacaagctgctggaatcatggctgacactggtccaggacgataagcacttccataaagggtttttcacacaacacgccgtgcaggtgtttaattcatatatacaatgccatctggcagcaccagacggtacacggaatttaacggcaaatggggtcgctagccgagaagaagaggagatttcagagctgcaagaggatgacagggaccagttcagcgatcagctcgcatcagtcgggatgctcggaagaatcgctgccgagcactgcatcccactgcttacatccttgttggaggagagagtcaccagactccatggacagttgcagcgacaccaacagcagttacttgcttcccctggatcctctaccgtcgacaataagatgctggacgatctgtacgaggacatccattggttaattcttgtcaccggctacctgctggccgatgacacacagggcgagaccccgctgataccaccagagataatggaatatagtataaaacactccagcgaggtcgatatcaataccacactgcaaatacttggctcccccggcgagaaagcttcgtctattccaggctacaacaggacggacagtgtgattcggctactttctgcaatactgcgggtgtctgaagtcgagagcagggccatacgcgcagatctgacacaccttttgagcccccagatgggcaaggacatcgtctggtttctgaagcggtgggctaaaacttacttactggtggatgaaaagctgtatgaccagatttcgctgccattttctaccgctttcggtgcagacacagaggggagccagtggataattggctacctccttcagaaagtcatctctaatttatctgtgtggagttccgagcaggatctggcaaacgacacggtgcaactgctggtcaccctcgtggagcggcgggaacgagccaacctggttattcagtgtgagaactggtggaacctggcaaaacagtttgcaagcagatcaccacccctgaactttctgtccagcccagtgcagcgaaccctgatgaaagctctagtcttgggtggtttcgctcatatggacacagaaacaaagcagcaatactggaccgaggttctgcagccccttcagcagcgttttcttagggtgataaaccaggaaaattttcagcagatgtgtcagcaagaagaggtgaagcaggagatcacagccacgctggaggctctgtgtggaattgccgaggcaacacagatcgataacgtcgcaatattattcaactttttgatggacttcctgacaaactgcatcgggttaatggaggtgtataaaaacactccggagaccgtgaacctcattatcgaggttttcgtggaggttgcccataaacagatctgttatctgggggagagcaaggccatgaacctatacgaggcctgcttgaccctcctgcaggtttatagtaaaaacaatctgggacgtcagaggattgatgtgacagctgaggaggaacagtaccaagatcttctgctcattatggaactactcacaaatctgttgtctaaggagtttattgacttttccgacacagatgaggtattccgtggacatgaacccgggcaggctgccaatcgatcagtgtcagccgcagacgtagtgctctacggtgtcaacctgatcctgccgctcatgagccaggacttactgaagtttccgacgctctgtaaccaatattacaagttaataacctttatctgtgaaatatttccagaaaagatcccccaactgccagaagatctcttcaaaagcttgatgtactcactcgagctcggtatgacatccatgtcatccgaggtgtgtcagctgtgtttggaggccctgacacctctggcagagcagtgtgcaaaagctcaagagactgactcacccttatttctcgctacaaggcacttcctcaaactcgtcttcgacatgctggttctgcagaagcacaacactgaaatgactaccgccgctggagaagcattttacaccctagtgtgtctccaccaggcggagtatagcgaattggtcgaaactctcttgtcttcacagcaggatccagtaatctaccaacgcttggcagatgcttttaacaagctgaccgcttcgtccactccccccaccttagacaggaaacagaaaatggcctttttgaagtccctcgaggaatttatggcaaatgttggtgggctcctgtgcgtcaagtag

SEQ ID NO: 212204 - DNA, 9884 bp, Artificial Sequence
  derived and/or modified sequence
agaatgcagcgcatggcgcgtcattgaagagagaccatgatggcggcggcgctggggcccccagaagtgatcgctcagctggagaacgcggctaaagttctgatggcaccaccttccatggtcaataatgaacaacgccagcatgcagagcacatattcttatcatttaggaaatcaaaatcaccatttgcagtttgcaagcatattttggaaactagtaaagtggactatgtcctctttcaagctgccacagccataatggaagcagttgtccgagagtggattctcttggaaaaaggtagcatcgagtctctgcgaacattccttttaacctatgtcttacaaaggcccaaccttcaaaagtatgttcgggaacagattctactagcagtagcagtaattgtaaaaagaggatcattagataaatcaattgactgcaaaagcatttttcatgaagtcagccagttgattagtagtggcaatcccactgtgcaaactctggcctgttctattctgactgcgctattgagtgaattttcaagttcaagtaaaactagcaacattggattgagcatggaattccatggtaactgcaaaagagtttttcaggaagaagaccttcgtcagatcttcatgttaactgttgaagttctgcaggagttcagcaggcgggaaaacctcaatgctcagatgtcttcagtatttcagcgttaccttgcactcgccaatcaagtcttgagctggaactttcttcctccaaaactgggcagacattatatagctatgtttgaatcctcgcaaaatgtgctgttgaagccaacagagtcctggcgggagactcttctggacagcagagttatggagcttttcttcacagtacatcgaaaaatcagagaagattcagatatggcacaagattctctgcagtgccttgcccagttagcttctcttcatggacccatcttcccagatgaaggatcacaagttgattatctagcacacttcattgagggattactgaatactatcaatggaattgaaatagaagattctgaagctgtggggatctccagcattatcagcaacctgataaccgtgttcccacgaaatgttttaactgccattccaagtgaacttttctcctcctttgttaactgcctcacacacctcacttgttcttttgggcgaagtgctgcattggaagaagtgcttgataaagatgacatggtatacatggaagcatatgataaattgttggagtcctggttaactttggttcaagatgacaaacatttccataaaggcttttttacccaacatgcagttcaagttttcaattcctatattcagtgccacctagctgctccagatggcacaagaaatttgactgccaatggtgtggcctctcgtgaggaggaagaaataagtgaacttcaagaggatgatcgagaccagttttctgatcaactggccagtgtaggaatgctaggaagaattgctgcagaacactgtatacctcttctgacaagtttattagaagaaagagtaacaagactccatggtcagttacaacgacatcagcaacagttacttgcttcaccgggttcaagcactgttgacaacaaaatgcttgatgatctctatgaagatattcactggcttattttagttacaggctacctcttagctgatgatactcagggagagactccgctaatacctccagaaataatggaatattccattaagcattcatctgaagttgacattaatacaacacttcaaattttgggatctccaggagaaaaggcttcttccatcccagggtacaacagaacagattctgtgattaggctgttgtctgccattctcagagtttcagaagttgaatctcgagcaataagagcagatctcactcatctactaagtccccagatgggcaaagatattgtttggtttttaaaacgctgggcaaagacttatctcctggtggatgaaaaactgtatgatcagataagtctgccattcagtacagcgttcggagcagatacagagggttctcagtggataattggctacctcttacaaaaagtcatcagtaacctctcagtctggagtagtgagcaggaccttgcaaatgacactgtgcagctccttgtcactttggtggaaagaagagaaagggcaaacttagtaattcaatgtgagaactggtggaatttagctaagcagtttgcaagccgaagcccacctcttaatttcttgtcaagtcctgtgcagaggacattgatgaaggctctagtcttaggaggttttgcacatatggacacagaaaccaaacagcagtattggacagaggttcttcagccacttcagcagcgattcttaagagtgataaaccaagaaaacttccagcagatgtgtcagcaagaggaagtcaagcaggaaatcactgccacactagaggccctgtgtggcattgctgaggctacccagattgacaacgtagcaatcctgtttaattttttaatggacttccttaccaattgcattggattgatggaagtttacaagaataccccagagactgtcaatctcattatagaagtttttgttgaagttgcacataaacagatatgctatcttggagagtccaaagctatgaacttatatgaagcctgccttactttgttgcaagtgtattctaagaataatttagggcggcaaagaatagatgttacagcagaagaagagcaataccaagacctgcttctcattatggaacttcttactaacctgctgtcaaaagaattcatagatttcagtgatacagatgaagtgtttagaggacatgagccaggtcaagcagcaaacagatctgtgtcagcagcggatgttgtgttgtatggagtaaacctaattctgcccttgatgtcacaggatctcttgaagtttccaaccctttgtaatcagtactacaaattaatcacatttatctgtgagatttttcctgaaaaaataccacagcttcctgaggatctgtttaaaagtctgatgtactccctagaattaggaatgacatcaatgagttcggaggtttgccagctttgcctggaggccttgacaccgttagctgaacagtgtgcaaaagcacaagaaacagactcaccactttttctagcaacacggcactttcttaagctggtttttgatatgctggttttgcaaaagcacaacacagagatgaccactgcggctggcgaagctttctacacgttggtgtgtttgcaccaggctgaatattctgaactggtcgaaacattactatcaagtcagcaagacccagttatttaccagagattagcagatgccttcaacaagctcactgcaagcagcactcctcctacgctggatcggaagcagaagatggccttcttaaagagtttagaagaatttatggcaaatgttggtggtctcctttgtgtaaaataaacaacagaactttatgcttaatttagatcctttctgcaaagtgcactgaattgctgaaagttgacttgagtcttgtcctattcctcagttcatttggccattttggattttggagagcctgaaactttgatatgtatgtaatacagtgaaacaggagaggtcaacttggcatcagcttctgctgttaagtgttagccacaatctgtcatatatatgtcttttagattctgaatggtgatttaaaattttcaaaatgaaattccatatatgtgcaaacagatatgggcaccacgaaatacatatgcagtgccttttttccttttaacataggtggctagccaaagtttagaatttttgtcattaaatatgaaatggatatatgctaggcagtgtttctcaaaatctccatagatcgcctgcatcacttgaggagctggtgaaaaggcagattcttaggcccaactgtagaccttcagagtcagaatgtctggttgttgggcccaggagtcttcatgttaataagcttctccctttcgtcaccccaaaagttttgaatcaatgaaagagacattgaaaactcttaagaggttttgtgctttctagcttttcctccctttgatgattgggttttataattcagcaggaaggggaaacatcaccaggggtttgttggctttttcttagcttgctttcttgcttgcttgctttcttgcttttcttgctttctgtctctctctttcttttctctctctctctcacatcaacccagtgctgcaggttttgtgtaatacaagtcactaatcatactctgatgcctgaacttgaggaggaaaatacatgtatatttttgttccgtaaaaataaccttaggaactgtagccatttcattgccttaattttaagaggaaaatacaaaaacagctgatttgttttagtaagaaaccacgtcttgatgcttcagagttggtttagggtgttagctgctatgaacctgttgcccctttcgatcgtgtatttatgtaggtttatcagtgaaatgaaaggcttgtttccgtctagtctaactttttgagtgtgtttctatccagccacatagcccatatctactctaaatggcttgcttaagcaataattattttaaaggatgtgaatcactgattcacacagactattgcacgttggggcattaggggcaataattcttatccagacatgggagccagtgaatttaatttcagagattaaaaattcactttagatcctctagtttgatctcttaatcaggatttttatacagctgccaggctcccctaattcagtgtgccagcttacaatgtggaaatgaaagctaatttatacacagcaggcatatgaaactccactcattgcagtactttcacagcacagtgacaggtagaggactctggcacaggtgcactcatgaaactctgcttccaccatgttcctgacacctatctattaaaccattctgcaaatacggtttttctacctgattgcatatagcatatgtgtcattacatgtgatgctgtgcaaaactttgtataattctgtgttattaacagttaacaaaactggagcatctgaattacatccaacctgtgcatgtgatgttaggtagatgtgaatgcagggccttgggccataacttacatttctctcaatttgattagctttgagtcacaattaaggggaagcaaaaacatcttgaaaagactgctaggaaggaaattaatatcagtcatccagaagtacacgtttctgtattttaaaaaatactttgatgcatttatttttaggtgttttttttttccccttaaaaaacttgaagtgatatgcagcagtaatctatttgttttgcattgttcttggtgttttgtgtttcccagatccctcaagctttctcagctgttgtgaattatgtgtatctgtgtgtgtgctaagtacagtctctttaccaaagggcactgaaacacacaattgactggacaggtccacgcgccatgacaaaactataatcaagttattaaaactaaagaggagtgggaaaggaatgccttggtaagtaaaaaggcatctatatttaataacttttatccagatggcaacatatttgcaaaatttgcccagatcctattacaatactaaaaatagaaaatttcacctccatattcctgaggtgtaatttcattagactagttttagtttaaaaagaccttcttcagattggaccaaataatacttataagatcagcagaatgttgaatattagctcactggggtggggagaagccactaccattttttaggtgatggggatgccactgagttgcaacggctagaccttttcagggtggttgtgtccatgtttgcctgattggatgcttattcactttgtgttttcttttgttttattttgtccaattttgtctttagctgtgtttattaacttctccggtcttgttttgttttaatgctcttggcccagtgggtgtcaagaacactggcttaattcaagtcagttgattttttttctattaaaactgttgttaaaatattttttaaaacaaaaacattatttgtgccctcttttatatatgtcaaagggacactgtcaagtatttcatttttagatttttgttttataaaatttctgttgttcatatagtatcctttaacctctagttttccatacatcctttgtttgtttctcattttattttccttgacccatttatttcccaaggcacaatcactaaagactttgtactttcacagtctgttaatgtggtagcacctgtaactgtgttcttgttctgttaaaaggattgatttgcttttatagtccttgtgctggatgagtggctgcctcagtagcaaaactacctgacagtatttgacagtgtcctttccagcaccattatttgggtctttcagggtggccatctctgttagaagacagtagcatgttaacatcactgcattgagtttttgtctggtgtaaagtatgacttttaatgtaaacaaactgcaggtttttttcaaactaattttaagaatttagtcttatttcgttgtaaactgtgtatctaattatattacattactctgttcagatgggatggttactaccacttgtccatgattttcatttgaaaagcaagtatctatatcatttccccccagtcagcattatttaacactccccttaactgtctttgaactttctcttttaacaaaaatgtcaagtctttatagttgtaatatcaccatgtttcccatttctgttaatacttctatgaacccctaaagtattgaagggaactagctgtcagtttcaaggattacaagtttgagtctcctagtattcaacatcattctgaaccctgaaataatatttttctctgttaaacaatttttatctgtttgccacctctgttgttagaggtggttgtcaattgaccttactaagttagctgtctttgatgaggaattattgttattggttcctgaataaaacattaaccttttaagtcagaaggaacctcggtacttcttaaggtttgtttgtgttttctaaaaccagagaataaggaactgatttggctatgaggtttaacattataattttctgtaagctttcccacaaaaaaacattgttgatttgaggatataataatgttttaatctttttaaaatataagtggttattctctgacttggtaactatgttctgaaaacactgcatttaagaatttttaaaaattggttttctaaaattaaaatgtccaaattaggcatattgctgagctcaaattgatgtgaaatgccatggttccagttgaattttaagcatattttcatttagatataaaatatatgaagtatgctttgttgattatagtgagaacccatgacatagttaaccaaagaatatgtttggttcaaataaaaatagaagcttaatactgggcattcatactttttaaagagaatgaatgaagaaatcggtttcctgctgtagttctctatgggtaagtcttagtaaagacgagaatgctgaagtcggccgtggcgattccctcctaggaactgggaggtgtggcttgcccattacccgcttgaagctcacatctttaccctcctctcccactgtggtttgatcttcacctattcccaggccctcccagcaattggagaggtgtctttttttttggttttggttttttttctccccgtctgcattcttaggcctcttagctattaggaactgtcagatacatactagtagctaattttcctagcctgaaattatatactgcatctgcactatgtacctactagggatctgacctcaagtgttttctgagcccaggcttcctggtgtggtgtcttttaccacataaaattattacaaattgcaaatgttggtattgtgatttgattatctgtacaaagaaagaagctctatgcagtgagtttgtggtttaatggtcacaaaaatgttagcactgctaccactcagcacgtgtaaaattttttaaatttataaatattaaaattttaaacttacactaagacttttcagttttatttaaagacccagggatgagtgtactgtttaaatatttacctctattaacataactaatgaaggtataaaattgcatttagtttttcagaagatgctgcaatatgattttaggaaataaggctatgtattgagccagttataggctgaatatcaggttgataaaattttatttgtatttttaaaattcataaatgggagttaaaatgtgtcttttcactaaatatttttattacatttttgttttgaccatgtgtgatttgttcatgggtatttagctagactcttttatgaaatgcattgaaatggtgctagtttgtttaccattataggaagattgacactggggacattacacggtcctaaaataattttaaatttaaaaaaatgaagacatctgtacagataaaaatcaagatttgcatcaccttctgggagaacccgtggtactcacagaatatccagtattagaaatataaaaattttgtctatattttataatatttatctcagcccacagtcttagaaacagtttcacagttactagttaagtcattatctttggtgcatatttagtaaatacttttagcaagtcattctttttggcctttcagggaaagtggtgaattaccatattactgtgtgctagatagatccaccctttgcccagtgttaaatcttgtaaacatatgaagtgaaaagttaatttttaaagaaaatgcatctttaaaatgttcatttttaacctgaatttgctttgaatattctttgatttgtaatgttgttatttagcttatattgagatttattccactccaaaggtggataaagaaaagttgtttaagaaaaccaattagagtgtattttgaatttttgtttctttcattaccaagtgtggggccatacacacaggctaatcatctgtcatttgagacccacagatgatttcaaaggtcccaaataaatacacatctataactgttttttaaaagacatctttaatggtgctctccaaaaatacaattcggttgcttatgagtgatgcctttgacaggctgattagattataaaacagttttgtttttttaaacatagggtctcagattgagtcttgtgcattctatgtaatctcaaatggcagttcagtttgactttcttttaaaactaagtggaaatggtatatttggtgaaactaatgaaagaatcttttgctgggaaattccatacagcacccccagcagcatcctgtctcagtctggcgtataattcaacctcctactgagtgtccctgtaaattatttttaatatatagcatgagagtgaactgaggtaagtcattgatgtttcccagagatgatgaatgaacaaaagcaaataggatctgctaaacatttttattcccacagtagtgagcagttttgttcttgttttgataatgttcatttctgcctaatcttaggcttcaaatacacctttaagaaagcccaagatgtattgagtagtagaacttcttatttgtacacctgtttataactgcactgccctggatgttatggttatttctaaggactgacctggtaaagctacttgaactggtagactgcagggtagaggcagacctagattcaatgtctaactaagctgcttagggcttacattaatttccacaggtctgttatccatatcatgagtttataagtgttcctcccaaagaaaaaatttaaaagtgatggatgaaatataatagtagatgctcaataaattccattgtatttaaagatt

SEQ ID NO: 212205 - DNA, 2511 bp, Artificial Sequence
  derived and/or modified sequence
atggccgccgccctgggcccccccgaggtgatcgcccagctggagaacgccgcaaaagttctgatgcaaacccttgcttgttctattctgacggcactcctgtcagagttcagctcttctagtaagaccagtaacatcggtctgtctatggaatttcacggtaattgcaaaagggtgttccaagaagaggatctccgccagatttttatgcttacggttgaggtcctccaggaattttcgcggagggagaatctcaacgcgcagatgtcctccgtctttcagagatatcttgccttggccaatcaggtcttgtcctggaattttctgcccccgaagcttggacgtcactatatcgctatgttcgagagcagccagaatgtactgttgaaacccacggaaagctggcgtgaaactcttctggattcacgagtgatggaattgttttttacggtgcatcggaagattcgagaagattccgatatggcgcaggacagtttgcagtgcctggcacagctagctagcctccacggtccaatcttccccgacgaagggagccaagtcgactatctggcacattttatagaggggttgttgaacaccattaacgggatcgaaatagaagactccgaagccgtcggcatctcatctattatcagcaatctgataacagtgtttccccgcaatgtgctcactgccattccttccgagctcttctcatcgtttgtgaactgtctcacacacctgacctgtagctttggccgcagcgcggccctggaagaagtgctagacaaagatgacatggtgtacatggaagcctacgataagctgctggagagctggctgactctggttcaggacgataaacatttccataagggcttcttcactcagcacgctgtgcaggtgttcaattcttacatacagtgccacttggctgcacccgacggaaccagaaaccttaccgcgaacggggtggcttctagagaggaggaagaaatttcagaactacaggaagacgacagggatcagtttagcgatcagcttgccagcgtcggtatgctcggtcggatcgccgctgaacattgtatccctctgttgacctctttgctcgaggaacgggtgacaagactgcacggccagctacagcggcaccagcagcagttgctggcaagccccggctcatcaaccgttgacaacaagatgctagatgacctttatgaggatatccattggctgattctcgtgaccgggtatcttctcgccgacgatactcagggtgagactcctcttattccacccgaaatcatggaatactccatcaaacattccagcgaggtcgatatcaacactactctgcagatactggggagtccgggagaaaaggcctcaagtatccctggctacaataggacagactcagtcatccgcctattatcagccatattaagggtctctgaagtggagtctcgcgccatcagggccgatttaacacaccttctctcaccccagatgggtaaggatatcgtgtggtttcttaaaagatgggcaaagacttatcttctggtagacgagaagctgtacgatcagatctccctgccattttctactgctttcggcgccgatacggagggcagtcagtggattatcggttacctgctgcagaaagttatcagtaacttgtcagtgtggagttctgagcaagacttggccaacgataccgtgcagttgctcgtgacactggtcgaacgcagggagcgagccaatttagtgatccagtgtgaaaactggtggaacctggctaaacagtttgcctcccgaagccctcccctcaacttcttaagcagtcctgtgcagaggacactgatgaaggcactggtgcttggtggatttgcacacatggacacagagacaaagcagcagtactggaccgaggttctacaacccctgcagcaaagatttcttagagtcattaatcaggagaactttcaacagatgtgccagcaggaagaagtaaaacaggaaataactgcaacactggaggctttgtgtgggatagcggaagctacacagattgataatgtcgctatcctttttaatttcttaatggactttctgaccaattgtattggacttatggaggtttataagaataccccggagactgtgaacctgataatcgaggtgttcgtggaagtagcccacaaacagatatgctatcttggggagtctaaggctatgaatctttacgaagcttgtctgactctcctacaggtctacagcaaaaacaacctcggtcgccagagaatagacgtgactgctgaagaggaacagtaccaggatctgttgctcatcatggaactccttaccaatctcctcagtaaggagttcatcgactttagcgatacagacgaagtctttagagggcacgaacccggccaagccgccaataggtcagtgtctgccgcagatgtggtgctgtatggggtgaacctgattctgcctctgatgtag

SEQ ID NO: 212206 - DNA, 3456 bp, Artificial Sequence
  derived and/or modified sequence
atgatggccgctgccttggggccacccgaagtgatcgcacagttggaaaacgctgctaaggtgttaatggccccacctagcatggtgaataatgagcaaaggcagcacgccgagcacattttcctgtctttcaggaagtccaaaagtccattcgccgtctgtaaacatattctggagacctccaaagtggactacgtgctgtttcaagccgcaactgctatcatggaggcagtcgtgcgtgagtggatactactggagaaaggctctattgaatccttaagaacttttttgctgacctatgtgctgcagcgcccaaatctacagaagtacgtcagggagcagatcctgctcgccgtggctgtgattgtcaagagggggagcctcgataagagtattgattgcaagtctatatttcacgaggtgtcccagttaatatcgagcgggaatcctaccgtgcagacgctcgcctgctctattctcactgccttactctccgaattttcatcttcgtccaagacatctaacatagggctctcgatggagttccacggtaactgtaaacgggtattccaggaagaagatctgagacagatcttcatgctgacagtggaggtgctgcaggaattttctaggagggagaacttaaacgcacagatgtcgtccgtgtttcagcgatatcttgcactggccaatcaagtactgagttggaattttctgccacccaatttgggccgtcattatattgccatgttcgagtcctcccagaacgtgctgttgaaaccaactgaatcttggcgtgagactctgctggacagtcgggttatggaactgttctttacggtgcaccggaagattcgcgaggattctgatatggctcaggattcgctccagtgtttggcacagctggccagcctgcatggcccaatatttcccgacgagggatcccaggttgactacttagcgcactttattgaaggcctgctaaacaccattaacggcattgagattgaagactccgaggccgtgggtatctcctccatcattagtaatttgataactgtgttcccacgaaatgtcttgaccgctattccctctgagctcttctcatcttttgtaaactgtctcacacacctcacctgttcctttgggcgaagtgccgctctggaggaggtactggacaaggatgatatggtgtacatggaggcatacgacaaacttctggaatcctggctcacgttggttcaggatgataagcattttcacaaggggttcttcacgcagcatgccgtgcaggttttcaacagttatatacagtgtcacctcgcggctcctgatggaacccgcaatctcacagccaacggagtcgcttcccgcgaagaggaggagattagtgaactccaagaggacgatagggaccagttcagcgaccagctggccagcgtgggtatgttgggaagaattgcagccgagcattgcattccattgctgacatccctactggaggagagagtcaccagactacatggccagctccagcggcaccagcagcagttgctggcatcccctggcagctccaccgtcgataataagatgctcgacgatctgtacgaggacattcattggttgattctggttactggctatttgctcgcagatgacacccagggagagactccgttaatccctccagagataatggagtactcgatcaagcattcctccgaagtcgatatcaacacaaccctgcagatcctcggaagccccggtgagaaggcgagttccattcccggatataataggactgattcagtcattaggttgttgagtgccattctgcgggtgtcagaagtagagagccgcgctattcgagctgatcttacacatctgttgtctccacaaatgggtaaagatatcgtctggttccttaagagatgggccaagacctacctactcgttgatgagaagctatatgaccaaatatctctcccattcagcaccgcatttggtgcagacaccgagggcagccaatggatcatcgggtatctcctccaaaaagtcattagcaatctgtcagtctggagtagcgagcaggatctggctaacgataccgtccagctgcttgtgaccctggtggagcgaagagaacgggcaaatctggtcatccaatgcgagaattggtggaatctcgctaagcaattcgcttcccggtccccaccactcaatttcctcagctcccccgtccagaggactctcatgaaggctctggtgctcgggggatttgctcatatggatactgaaaccaagcagcagtattggaccgaagtgctccaacctctccaacagcgcttcctgcgggtcattaaccaagagaacttccagcagatgtgccagcaagaggaggtgaagcaagagatcactgcaaccctggaggcgctctgtgggatcgctgaagcgacccagatcgataacgtcgccatcctcttcaattttcttatggacttccttaccaactgtataggcctgatggaggtttataaaaatacaccagagaccgtgaatctgataattgaagtgtttgtggaggtggcccataaacaaatctgttacctgggggagtctaaagccatgaatctttacgaggcttgcctcaccttgctgcaagtgtatagcaagaacaaccttgggaggcagagaatcgacgtgacagcagaggaggagcagtaccaggacctcctcctgattatggagctcctcaccaatctacttagcaaagaattcatcgacttctcagacacagacgaggtgttccgcggacacgagcctggccaggctgctaatcggagtgtcagcgccgctgacgtggtgctatatggtgtgaatctgatacttcctctgatgtctcaagatttgctgaagtttcctaccttgtgcaatcagtattacaagcttatcacctttatctgcgagattttcccggagaaaatccctcagctccccgaagacctctttaagagtctcatgtacagcttggagctcggaatgacatctatgtccagtgaagtctgccagctatgtttggaagccctcaccccactggccgaacagtgtgccaaggcgcaggaaactgactcacctctttttctggcaacccgtcattttctaaagttggtctttgacatgttagtgctgcagaagcacaatacagaaatgaccacagcagccggagaagccttttacactttggtgtgcctgcaccaggctgaatactcagagctggtcgagaccctgctgtcgtcgcaacaggaccccgtgatataccagcggctggcggatgccttcaataagctgacagcaagtagtaccccgcctacactggacagaaagcagaagatggctttcctgaaaagcctggaagagttcatggccaacgttgggggtctgctatgtgtgaagtag

SEQ ID NO: 212207 - DNA, 3456 bp, Artificial Sequence
  derived and/or modified sequence
atgatggccgcagcgctgggacccccagaagtgatagcacagctagagaacgcagctaaggtgctgatggctcctccatcaatggtgaataatgaacagcggcagcacgccgagcatattttcctgtccttcaggaagagcaagtctccattcgctgtgtgtaagcatatcttggaaacttcgaaagtcgactatgtactgtttcaggccgcaaccgccatcatggaagcagtcgtcagagaatggattcttcttgaaaagggctcaattgagtctctgcggacctttctgcttacctatgttctgcagcgcccaaacctgcagaagtatgtacgggaacagattctgctggccgtggcagtgattgttaagagagggagcctggataagagtatagattgcaaaagtatttttcatgaagttagccaactgatcagctctgggaatcctaccgttcagacgcttgcgtgcagcattctgactgcgttactctcagagtttagttccagttccaaaacatctaatattggattgtccatggagttccacggaaattgcaaacgggtcttccaggaagaggacctgcgtcagatttttatgttgacagtggaagtcctgcaggaattctcaagacgtgagaacctaaacgctcagatgtcctccgtcttccaacgctacctggcactggccaaccaggtgctctcgtggaacttcctacctcccaaattgggtcggcattatatcgctatgttcgagtcctcccagaatgtcctgctgaagcccactgagtcttggcgtgaaactttgctggactctcgggttatggaattgttcttcactgtgcataggaagattagagaagattctgacatggctcaggactcactccaatgcctcgcacagctggcctctctccacggtccgatctttcctgacgaaggttctcaggtggactatctggcacatttcatcgaaggcctgttgaacaccataaacggcatcgaaatagaggactccgaggccgtgggcatttcttcaatcatctccaatctcataactgtgttcccgcgaaatgtgttgaccgccattccctccgaactcttttcctccttcgtcaactgccttacccacttgacttgcagttttggacggtcagccgctttagaagaagtgttggacaaggatgatatggtatatatggaagcttacgataaactgctcgaatcctggctcacacttgtccaggatgacaagcatttccataaagggttttttactcagcacgccgtacaggtttttaactcttacattcagtgtcacctcgcagcaccagacggcactcggaacctgacagctaacggcgtggcctcccgcgaagaggaggaaatctcggaattacaggaagacgaccgggaccagttcagcgaccagctcgctagtgtaggaatgttaggcaggattgctgccgagcattgcattccattattgacgtcactcctcgaagagagagtgacaagactccacggacagctccagaggcaccagcagcaactcctggcatccccaggctcatccactgtggataataaaatgctggatgacctttatgaagatattcattggctgattcttgtcacagggtacctgcttgccgacgatacccagggcgaaacccccctcatcccgccagaaataatggagtattcgatcaagcactccagcgaggtggacatcaacaccacactgcagatcctcggcagcccgggagaaaaagccagctctattcctggttataaccggactgactctgtaattcgactgctctcggctattctgcgggtttctgaagtggagtctcgcgcaatacgggcagatctgactcatctcttatcaccccaaatgggaaaggatattgtttggttcctgaaacgatgggcgaagacctacctgcttgtggatgaaaagctttatgaccagattagtctgcccttttcaaccgctttcggcgcagatactgaaggatctcagtggattattggttacctgctacagaaggtcatttcaaacctgtcagtatggagctctgagcaggacctcgcgaatgacactgtacagttacttgtcacgctggtcgagcgtcgggagagggcgaacctggtgatacagtgcgaaaactggtggaatctcgctaagcagttcgcctcccgctctccaccactcaactttctttctagccctgtgcagaggaccctcatgaaagctctggtcctcggaggtttcgcccacatggataccgaaactaaacaacagtattggacagaggtgctccaacccctccagcaaagatttctgagggtcattaatcaggaaaacttccaacagatgtgccaacaagaagaagttaaacaggagatcacggccacacttgaggcattatgcggcatagctgaggcaacccaaatagacaacgtcgccatcctcttcaacttcctcatggacttcctgacaaattgcattggactgatggaggtgtacaagaatacacctgagaccgttaatctgatcatagaggtgttcgtcgaagtggctcacaagcagatctgttacctgggagagtccaaggcaatgaacctatatgaagcgtgcctcaccctgctgcaggtatactctaaaaataaccttgggcgacagcgcatcgacgttacagctgaggaggagcaataccaggacctactgctgatcatggagctcctgaccaatttgctgtcgaaggaattcatcgactttagcgatacagacgaggtgtttcgcggtcatgaacctgggcaagccgcaaatagaagcgtctccgcagctgacgtcgtgctgtatggcgtgaatctgattctgccccttatgagtcaggatttactcaaattcccaaccctgtgtaatcaatattataagctgatcactttcatctgtgagatcttccccgagaagataccccagctgccagaagaccttttcaagagtctgatgtacagtctcgaactcggaatgacctctatgtcttctgaggtttgccagttgtgcctcgaagccctcacacctctcgctgaacagtgtgcgaaagcgcaagagactgactctccactgtttctcgctacacgtcattttctgaaacttgtcttcgatatgctggtgctgcagaaacacaacacagagatgacgacagccgctggagaagctttttacaccctggtgtgcctgcaccaagccgaatatagtgagctggttgagactctgctttccagccagcaggatcccgtgatttatcaaagactcgcagacgcatttaacaagttgaccgcctcctcaaccccccctacactggacaggaagcagaagatggcgtttcttaagtcgcttgaagagtttatggctaacgtgggcggactgctgtgcgtcaagtag

SEQ ID NO: 212208 - DNA, 2511 bp, Artificial Sequence
  derived and/or modified sequence
atggccgctgctctggggccaccagaggtgattgcccagctggagaacgccgcaaaggtgctcatgcaaaccctcgcctgctcaattctgactgccctgctgagcgaattctcttcatcatccaagacctccaatatagggctcagtatggagttccacggcaactgtaaacgagtgttccaggaggaagatttaaggcaaatttttatgctcaccgtggaggtactgcaggaatttagtcgaagagaaaacctcaatgcgcaaatgtcatctgtatttcagcggtacttggccctggccaaccaagtcctgagctggaacttcttacctcctaagttagggaggcattatatagccatgttcgaatccagccagaatgtccttttaaaacctaccgagagctggcgagagacactgttagattcgagggtgatggagcttttctttacggtccaccggaagattagggaagattccgacatggcccaagattccctgcaatgcctcgcacagctggcgtctttacatggaccgatcttcccagacgaggggtcccaagttgactacttggcacatttcatcgagggactgttaaataccatcaacggcatagaaattgaggattcagaggccgtcggcatcagctcgatcattagtaacttaatcacagtgttcccccgaaatgtcttgactgctataccttccgagctgtttagctcctttgttaattgcttgacccatctcacctgttcattcgggaggtctgccgctctggaggaagttttggataaagacgatatggtgtacatggaggcgtacgataagctgctggagtcctggttgaccctggtgcaggatgataaacactttcataaggggttttttactcagcacgcagtgcaggtgtttaatagctatatccagtgtcacttagctgcgcctgatggcaccaggaacctgaccgcaaatggagtcgcctctcgagaggaagaggaaatcagcgagctgcaggaggacgaccgagatcagttttccgaccagctggcttcagtggggatgctagggaggatcgctgctgagcactgtatccctctgctgacgtcattgcttgaggaacgtgtcacacggctgcacggccagctccaaagacatcagcagcaattgctagccagtcccggaagttcaacagtggataataaaatgcttgacgatctctacgaagatatccattggctcattctggtgacgggctacttgctcgcagacgatacacagggcgaaacacctcttatcccaccagagatcatggagtactcaatcaagcactctagtgaggtggacattaatactacactgcaaatccttggttctccaggcgagaaggcttctagcatacccggttacaaccgcaccgacagcgtgattaggctgctgtcggctatcctgcgggtgtctgaagtggaaagccgagctattcgcgctgatctgactcatctgctaagtccacagatgggaaaggatattgtgtggttccttaaaagatgggccaagacttatctgcttgtagatgaaaagctgtacgaccagatcagcctgccattttcgacagccttcggagctgacaccgagggctcccagtggattatcggttatctcctccaaaaggtgatctccaacttgtcagtctggagcagcgaacaggatctggctaacgacacggtacagctgttggttaccctcgtggaaaggcgcgaaagagcaaatttggttattcagtgcgagaactggtggaatctggccaaacaatttgctagtagaagccctcccctgaactttctcagttctcccgttcagagaacccttatgaaagctctagtgcttgggggtttcgcccacatggacaccgagaccaaacagcagtactggacagaggtcctgcagcccctgcagcagcggtttcttagggtgataaatcaggaaaactttcaacaaatgtgtcagcaggaggaagtgaagcaggagatcaccgcaacattggaggctctgtgcggaatagccgaagccactcagattgacaatgtcgctatcctattcaattttctaatggatttcctgaccaattgcattggacttatggaagtgtacaaaaatacgccggagacggtgaatctgatcattgaagtgttcgtggaggtggcccataagcaaatctgctatctgggagagagtaaagcaatgaatctgtatgaggcttgcctgacactgctgcaggtctacagcaaaaataatcttggtcggcagcggatagatgttacagctgaagaggagcagtaccaagacctgttgctgattatggagttgttgaccaacctcctttcgaaagaatttattgacttttctgatactgacgaggtttttcgaggacacgagcccggacaagccgctaatcgcagtgtcagcgcagctgacgtggtgttgtacggcgtcaacctcatactcccgctcatgtag

SEQ ID NO: 212209 - DNA, 8375 bp, Artificial Sequence
  derived and/or modified sequence
cgcggcggcgattggccggccgcggcgcccgctcccagaatgcagcgcatggcgcgtcattgaagagagaccatgatggcggcggcgctggggcccccagaagtgatcgctcagctggagaacgcggctaaagttctgatggcaccaccttccatggtcaataatgaacaacgccagcatgcagagcacatattcttatcatttaggaaatcaaaatcaccatttgcagtttgcaagcatattttggaaactagtaaagtggactatgtcctctttcaagctgccacagccataatggaagcagttgtccgagagtggattctcttggaaaaaggtagcatcgagtctctgcgaacattccttttaacctatgtcttacaaaggcccaaccttcaaaagtatgttcgggaacagattctactagcagtagcagtaattgtaaaaagaggatcattagataaatcaattgactgcaaaagcatttttcatgaagtcagccagttgattagtagtggcaatcccactgtgcaaactctggcctgttctattctgactgcgctattgagtgaattttcaagttcaagtaaaactagcaacattggattgagcatggaattccatggtaactgcaaaagagtttttcaggaagaagaccttcgtcagatcttcatgttaactgttgaagttctgcaggagttcagcaggcgggaaaacctcaatgctcagatgtcttcagtatttcagcgttaccttgcactcgccaatcaagtcttgagctggaactttcttcctccaaatttgggcagacattatatagctatgtttgaatcctcgcaaaatgtgctgttgaagccaacagagtcctggcgggagactcttctggacagcagagttatggagcttttcttcacagtacatcgaaaaatcagagaagattcagatatggcacaagattctctgcagtgccttgcccagttagcttctcttcatggacccatcttcccagatgaaggatcacaagttgattatctagcacacttcattgagggattactgaatactatcaatggaattgaaatagaagattctgaagctgtggggatctccagcattatcagcaacctgataaccgtgttcccacgaaatgttttaactgccattccaagtgaacttttctcctcctttgttaactgcctcacacacctcacttgttcttttgggcgaagtgctgcattggaagaagtgcttgataaagatgacatggtatacatggaagcatatgataaattgttggagtcctggttaactttggttcaagatgacaaacatttccataaaggcttttttacccaacatgcagttcaagttttcaattcctatattcagtgccacctagctgctccagatggcacaagaaatttgactgccaatggtgtggcctctcgtgaggaggaagaaataagtgaacttcaagaggatgatcgagaccagttttctgatcaactggccagtgtaggaatgctaggaagaattgctgcagaacactgtatacctcttctgacaagtttattagaagaaagagtaacaagactccatggtcagttacaacgacatcagcaacagttacttgcttcaccgggttcaagcactgttgacaacaaaatgcttgatgatctctatgaagatattcactggcttattttagttacaggctacctcttagctgatgatactcagggagagactccgctaatacctccagaaataatggaatattccattaagcattcatctgaagttgacattaatacaacacttcaaattttgggatctccaggagaaaaggcttcttccatcccagggtacaacagaacagattctgtgattaggctgttgtctgccattctcagagtttcagaagttgaatctcgagcaataagagcagatctcactcatctactaagtccccagatgggcaaagatattgtttggtttttaaaacgctgggcaaagacttatctcctggtggatgaaaaactgtatgatcagataagtctgccattcagtacagcgttcggagcagatacagagggttctcagtggataattggctacctcttacaaaaagtcatcagtaacctctcagtctggagtagtgagcaggaccttgcaaatgacactgtgcagctccttgtcactttggtggaaagaagagaaagggcaaacttagtaattcaatgtgagaactggtggaatttagctaagcagtttgcaagccgaagcccacctcttaatttcttgtcaagtcctgtgcagaggacattgatgaaggctctagtcttaggaggttttgcacatatggacacagaaaccaaacagcagtattggacagaggttcttcagccacttcagcagcgattcttaagagtgataaaccaagaaaacttccagcagatgtgtcagcaagaggaagtcaagcaggaaatcactgccacactagaggccctgtgtggcattgctgaggctacccagattgacaacgtagcaatcctgtttaattttttaatggacttccttaccaattgcattggattgatggaagtttacaagaataccccagagactgtcaatctcattatagaagtttttgttgaagttgcacataaacagatatgctatcttggagagtccaaagctatgaacttatatgaagcctgccttactttgttgcaagtgtattctaagaataatttagggcggcaaagaatagatgttacagcagaagaagagcaataccaagacctgcttctcattatggaacttcttactaacctgctgtcaaaagaattcatagatttcagtgatacagatgaagtgtttagaggacatgagccaggtcaagcagcaaacagatctgtgtcagcagcggatgttgtgttgtatggagtaaacctaattctgcccttgatgtcacaggatctcttgaagtttccaaccctttgtaatcagtactacaaattaatcacatttatctgtgagatttttcctgaaaaaataccacagcttcctgaggatctgtttaaaagtctgatgtactccctagaattaggaatgacatcaatgagttcggaggtttgccagctttgcctggaggccttgacaccgttagctgaacagtgtgcaaaagcacaagaaacagactcaccactttttctagcaacacggcactttcttaagctggtttttgatatgctggttttgcaaaagcacaacacagagatgaccactgcggctggcgaagctttctacacgttggtgtgtttgcaccaggctgaatattctgaactggtcgaaacattactatcaagtcagcaagacccagttatttaccagagattagcagatgccttcaacaagctcactgcaagcagcactcctcctacgctggatcggaagcagaagatggccttcttaaagagtttagaagaatttatggcaaatgttggtggtctcctttgtgtaaaataaacaacagaactttatgcttaatttagatcctttctgcaaagtgcactgaattgctgaaagttgacttgagtcttgtcctattcctcagttcatttggccattttggattttggagagcctgaaactttgatatgtatgtaatacagtgaaacaggagaggtcaacttggcatcagcttctgctgttaagtgttagccacaatctgtcatatatatgtcttttagattctgaatggtgatttaaaattttcaaaatgaaattccatatatgtgcaaacagatatgggcaccacgaaatacatatgcagtgccttttttccttttaacataggtggctagccaaagtttagaatttttgtcattaaatatgaaatggatatatgctaggcagtgtttctcaaaatctccatagatcgcctgcatcacttgaggagctggtgaaaaggcagattcttaggcccaactgtagaccttcagagtcagaatgtctggttgttgggcccaggagtcttcatgttaataagcttctccctttcgtcaccccaaaagttttgaatcaatgaaagagacattgaaaactcttaagaggttttgtgctttctagcttttcctccctttgatgattgggttttataattcagcaggaaggggaaacatcaccaggggtttgttggctttttcttagcttgctttcttgcttgcttgctttcttgcttttcttgctttctgtctctctctttcttttctctctctctctcacatcaacccagtgctgcaggttttgtgtaatacaagtcactaatcatactctgatgcctgaacttgaggaggaaaatacatgtatatttttgttccgtaaaaataaccttaggaactgtagccatttcattgccttaattttaagaggaaaatacaaaaacagctgatttgttttagtaagaaaccacgtcttgatgcttcagagttggtttagggtgttagctgctatgaacctgttgcccctttcgatcgtgtatttatgtaggtttatcagtgaaatgaaaggcttgtttccgtctagtctaactttttgagtgtgtttctatccagccacatagcccatatctactctaaatggcttgcttaagcaataattattttaaaggatgtgaatcactgattcacacagactattgcacgttggggcattaggggcaataattcttatccagacatgggagccagtgaatttaatttcagagattaaaaattcactttagatcctctagtttgatctcttaatcaggatttttatacagctgccaggctcccctaattcagtgtgccagcttacaatgtggaaatgaaagctaatttatacacagcaggcatatgaaactccactcattgcagtactttcacagcacagtgacaggtagaggactctggcacaggtgcactcatgaaactctgcttccaccatgttcctgacacctatctattaaaccattctgcaaatacggtttttctacctgattgcatatagcatatgtgtcattacatgtgatgctgtgcaaaactttgtataattctgtgttattaacagttaacaaaactggagcatctgaattacatccaacctgtgcatgtgatgttaggtagatgtgaatgcagggccttgggccataacttacatttctctcaatttgattagctttgagtcacaattaaggggaagcaaaaacatcttgaaaagactgctaggaaggaaattaatatcagtcatccagaagtacacgtttctgtattttaaaaaatactttgatgcatttatttttaggtgttttttttttccccttaaaaaacttgaagtgatatgcagcagtaatctatttgttttgcattgttcttggtgttttgtgtttcccagatccctcaagctttctcagctgttgtgaattatgtgtatctgtgtgtgtgctaagtacagtctctttaccaaagggcactgaaacacacaattgactggacaggtccacgcgccatgacaaaactataatcaagttattaaaactaaagaggagtgggaaaggaatgccttggtaagtaaaaaggcatctatatttaataacttttatccagatggcaacatatttgcaaaatttgcccagatcctattacaatactaaaaatagaaaatttcacctccatattcctgaggtgtaatttcattagactagttttagtttaaaaagaccttcttcagattggaccaaataatacttataagatcagcagaatgttgaatattagctcactggggtggggagaagccactaccattttttaggtgatggggatgccactgagttgcaacggctagaccttttcagggtggttgtgtccatgtttgcctgattggatgcttattcactttgtgttttcttttgttttattttgtccaattttgtctttagctgtgtttattaacttctccggtcttgttttgttttaatgctcttggcccagtgggtgtcaagaacactggcttaattcaagtcagttgattttttttctattaaaactgttgttaaaatattttttaaaacaaaaacattatttgtgccctcttttatatatgtcaaagggacactgtcaagtatttcatttttagatttttgttttataaaatttctgttgttcatatagtatcctttaacctctagttttccatacatcctttgtttgtttctcattttattttccttgacccatttatttcccaaggcacaatcactaaagactttgtactttcacagtctgttaatgtggtagcacctgtaactgtgttcttgttctgttaaaaggattgatttgcttttatagtccttgtgctggatgagtggctgcctcagtagcaaaactacctgacagtatttgacagtgtcctttccagcaccattatttgggtctttcagggtggccatctctgttagaagacagtagcatgttaacatcactgcattgagtttttgtctggtgtaaagtatgacttttaatgtaaacaaactgcaggtttttttcaaactaattttaagaatttagtcttatttcgttgtaaactgtgtatctaattatattacattactctgttcagatgggatggttactaccacttgtccatgattttcatttgaaaagcaagtatctatatcatttccccccagtcagcattatttaacactccccttaactgtctttgaactttctcttttaacaaaaatgtcaagtctttatagttgtaatatcaccatgtttcccatttctgttaatacttctatgaacccctaaagtattgaagggaactagctgtcagtttcaaggattacaagtttgagtctcctagtattcaacatcattctgaaccctgaaataatatttttctctgttaaacaatttttatctgtttgccacctctgttgttagaggtggttgtcaattgaccttactaagttagctgtctttgatgaggaattattgttattggttcctgaataaaacattaaccttttaagtcagaaggaacctcggtacttcttaaggtttgtttgtgttttctaaaaccagagaataaggaactgatttggctatgaggtttaacattataattttctgtaagctttcccacaaaaaaacattgttgatttgaggatataataatgttttaatctttttaaaatataagtggttattctctgacttggtaactatgttctgaaaacactgcatttaagaatttttaaaaattggttttctaaaattaaaatgtccaaattaggcatattgctgagctcaaattgatgtgaaatgccatggttccagttgaattttaagcatattttcatttagatataaaatatatgaagtatgctttgttgattatagtgagaacccatgacatagttaaccaaagaatatgtttggttcaaataaaaatagaagcttaatactgggcattcatactttttaaagagaatgaatgaagaaatcggtttcctgctgtagttctctatgggtaagtcttagtaaagacgagaatgctgaagtcggccgtggcgattccctcctaggaactgggaggtgtggcttgcccattacccgcttgaagctcacatctttaccctcctctcccactgtggtttgatcttcacctattcccaggccctcccagcaattggagaggtgtctttttttttggttttggttttttttctccccgtctgcattcttaggcctcttagctattaggaactgtcagatacatactagtagctaattttcctagcctgaaattatatactgcatctgcactatgtacctactagggatctgacctcaagtgttttctgagcccaggcttcctggtgtggtgtcttttaccacataaaattattacaaattgcaaatgttggtattgtgatttgattatctgtacaaagaaagaagctctatgcagtgagtttgtggtttaatggtcacaaaaatgttagcactgctaccactcagcacgtgtaaaattttttaaatttataaatattaaaattttaaacttacactaagacttttcagttttatttaaagacccagggatgagtgtactgtttaaatatttacctctattaacataactaatgaaggtataaaattgcatttagtttttcagaagatgctgcaatatgattttaggaaataaggctatgtattgagccagttataggctgaatatcaggttgataaaattttatttgtatttttaaaattcataaatgggagttaaaatgtgtcttttcactaaatatttttattaca

SEQ ID NO: 212210 - DNA, 9497 bp, Artificial Sequence
  derived and/or modified sequence
agaatgcagcgcatggcgcgtcattgaagagagaccatgatggcggcggcgctggggcccccagaagtgatcgctcagctggagaacgcggctaaagttctgatgcaaactctggcctgttctattctgactgcgctattgagtgaattttcaagttcaagtaaaactagcaacattggattgagcatggaattccatggtaactgcaaaagagtttttcaggaagaagaccttcgtcagatcttcatgttaactgttgaagttctgcaggagttcagcaggcgggaaaacctcaatgctcagatgtcttcagtatttcagcgttaccttgcactcgccaatcaagtcttgagctggaactttcttcctccaaaactgggcagacattatatagctatgtttgaatcctcgcaaaatgtgctgttgaagccaacagagtcctggcgggagactcttctggacagcagagttatggagcttttcttcacagtacatcgaaaaatcagagaagattcagatatggcacaagattctctgcagtgccttgcccagttagcttctcttcatggacccatcttcccagatgaaggatcacaagttgattatctagcacacttcattgagggattactgaatactatcaatggaattgaaatagaagattctgaagctgtggggatctccagcattatcagcaacctgataaccgtgttcccacgaaatgttttaactgccattccaagtgaacttttctcctcctttgttaactgcctcacacacctcacttgttcttttgggcgaagtgctgcattggaagaagtgcttgataaagatgacatggtatacatggaagcatatgataaattgttggagtcctggttaactttggttcaagatgacaaacatttccataaaggcttttttacccaacatgcagttcaagttttcaattcctatattcagtgccacctagctgctccagatggcacaagaaatttgactgccaatggtgtggcctctcgtgaggaggaagaaataagtgaacttcaagaggatgatcgagaccagttttctgatcaactggccagtgtaggaatgctaggaagaattgctgcagaacactgtatacctcttctgacaagtttattagaagaaagagtaacaagactccatggtcagttacaacgacatcagcaacagttacttgcttcaccgggttcaagcactgttgacaacaaaatgcttgatgatctctatgaagatattcactggcttattttagttacaggctacctcttagctgatgatactcagggagagactccgctaatacctccagaaataatggaatattccattaagcattcatctgaagttgacattaatacaacacttcaaattttgggatctccaggagaaaaggcttcttccatcccagggtacaacagaacagattctgtgattaggctgttgtctgccattctcagagtttcagaagttgaatctcgagcaataagagcagatctcactcatctactaagtccccagatgggcaaagatattgtttggtttttaaaacgctgggcaaagacttatctcctggtggatgaaaaactgtatgatcagataagtctgccattcagtacagcgttcggagcagatacagagggttctcagtggataattggctacctcttacaaaaagtcatcagtaacctctcagtctggagtagtgagcaggaccttgcaaatgacactgtgcagctccttgtcactttggtggaaagaagagaaagggcaaacttagtaattcaatgtgagaactggtggaatttagctaagcagtttgcaagccgaagcccacctcttaatttcttgtcaagtcctgtgcagaggacattgatgaaggctctagtcttaggaggttttgcacatatggacacagaaaccaaacagcagtattggacagaggttcttcagccacttcagcagcgattcttaagagtgataaaccaagaaaacttccagcagatgtgtcagcaagaggaagtcaagcaggaaatcactgccacactagaggccctgtgtggcattgctgaggctacccagattgacaacgtagcaatcctgtttaattttttaatggacttccttaccaattgcattggattgatggaagtttacaagaataccccagagactgtcaatctcattatagaagtttttgttgaagttgcacataaacagatatgctatcttggagagtccaaagctatgaacttatatgaagcctgccttactttgttgcaagtgtattctaagaataatttagggcggcaaagaatagatgttacagcagaagaagagcaataccaagacctgcttctcattatggaacttcttactaacctgctgtcaaaagaattcatagatttcagtgatacagatgaagtgtttagaggacatgagccaggtcaagcagcaaacagatctgtgtcagcagcggatgttgtgttgtatggagtaaacctaattctgcccttgatgtcacaggatctcttgaagtttccaaccctttgtaatcagtactacaaattaatcacatttatctgtgagatttttcctgaaaaaataccacagcttcctgaggatctgtttaaaagtctgatgtactccctagaattaggaatgacatcaatgagttcggaggtttgccagctttgcctggaggccttgacaccgttagctgaacagtgtgcaaaagcacaagaaacagactcaccactttttctagcaacacggcactttcttaagctggtttttgatatgctggttttgcaaaagcacaacacagagatgaccactgcggctggcgaagctttctacacgttggtgtgtttgcaccaggctgaatattctgaactggtcgaaacattactatcaagtcagcaagacccagttatttaccagagattagcagatgccttcaacaagctcactgcaagcagcactcctcctacgctggatcggaagcagaagatggccttcttaaagagtttagaagaatttatggcaaatgttggtggtctcctttgtgtaaaataaacaacagaactttatgcttaatttagatcctttctgcaaagtgcactgaattgctgaaagttgacttgagtcttgtcctattcctcagttcatttggccattttggattttggagagcctgaaactttgatatgtatgtaatacagtgaaacaggagaggtcaacttggcatcagcttctgctgttaagtgttagccacaatctgtcatatatatgtcttttagattctgaatggtgatttaaaattttcaaaatgaaattccatatatgtgcaaacagatatgggcaccacgaaatacatatgcagtgccttttttccttttaacataggtggctagccaaagtttagaatttttgtcattaaatatgaaatggatatatgctaggcagtgtttctcaaaatctccatagatcgcctgcatcacttgaggagctggtgaaaaggcagattcttaggcccaactgtagaccttcagagtcagaatgtctggttgttgggcccaggagtcttcatgttaataagcttctccctttcgtcaccccaaaagttttgaatcaatgaaagagacattgaaaactcttaagaggttttgtgctttctagcttttcctccctttgatgattgggttttataattcagcaggaaggggaaacatcaccaggggtttgttggctttttcttagcttgctttcttgcttgcttgctttcttgcttttcttgctttctgtctctctctttcttttctctctctctctcacatcaacccagtgctgcaggttttgtgtaatacaagtcactaatcatactctgatgcctgaacttgaggaggaaaatacatgtatatttttgttccgtaaaaataaccttaggaactgtagccatttcattgccttaattttaagaggaaaatacaaaaacagctgatttgttttagtaagaaaccacgtcttgatgcttcagagttggtttagggtgttagctgctatgaacctgttgcccctttcgatcgtgtatttatgtaggtttatcagtgaaatgaaaggcttgtttccgtctagtctaactttttgagtgtgtttctatccagccacatagcccatatctactctaaatggcttgcttaagcaataattattttaaaggatgtgaatcactgattcacacagactattgcacgttggggcattaggggcaataattcttatccagacatgggagccagtgaatttaatttcagagattaaaaattcactttagatcctctagtttgatctcttaatcaggatttttatacagctgccaggctcccctaattcagtgtgccagcttacaatgtggaaatgaaagctaatttatacacagcaggcatatgaaactccactcattgcagtactttcacagcacagtgacaggtagaggactctggcacaggtgcactcatgaaactctgcttccaccatgttcctgacacctatctattaaaccattctgcaaatacggtttttctacctgattgcatatagcatatgtgtcattacatgtgatgctgtgcaaaactttgtataattctgtgttattaacagttaacaaaactggagcatctgaattacatccaacctgtgcatgtgatgttaggtagatgtgaatgcagggccttgggccataacttacatttctctcaatttgattagctttgagtcacaattaaggggaagcaaaaacatcttgaaaagactgctaggaaggaaattaatatcagtcatccagaagtacacgtttctgtattttaaaaaatactttgatgcatttatttttaggtgttttttttttccccttaaaaaacttgaagtgatatgcagcagtaatctatttgttttgcattgttcttggtgttttgtgtttcccagatccctcaagctttctcagctgttgtgaattatgtgtatctgtgtgtgtgctaagtacagtctctttaccaaagggcactgaaacacacaattgactggacaggtccacgcgccatgacaaaactataatcaagttattaaaactaaagaggagtgggaaaggaatgccttggtaagtaaaaaggcatctatatttaataacttttatccagatggcaacatatttgcaaaatttgcccagatcctattacaatactaaaaatagaaaatttcacctccatattcctgaggtgtaatttcattagactagttttagtttaaaaagaccttcttcagattggaccaaataatacttataagatcagcagaatgttgaatattagctcactggggtggggagaagccactaccattttttaggtgatggggatgccactgagttgcaacggctagaccttttcagggtggttgtgtccatgtttgcctgattggatgcttattcactttgtgttttcttttgttttattttgtccaattttgtctttagctgtgtttattaacttctccggtcttgttttgttttaatgctcttggcccagtgggtgtcaagaacactggcttaattcaagtcagttgattttttttctattaaaactgttgttaaaatattttttaaaacaaaaacattatttgtgccctcttttatatatgtcaaagggacactgtcaagtatttcatttttagatttttgttttataaaatttctgttgttcatatagtatcctttaacctctagttttccatacatcctttgtttgtttctcattttattttccttgacccatttatttcccaaggcacaatcactaaagactttgtactttcacagtctgttaatgtggtagcacctgtaactgtgttcttgttctgttaaaaggattgatttgcttttatagtccttgtgctggatgagtggctgcctcagtagcaaaactacctgacagtatttgacagtgtcctttccagcaccattatttgggtctttcagggtggccatctctgttagaagacagtagcatgttaacatcactgcattgagtttttgtctggtgtaaagtatgacttttaatgtaaacaaactgcaggtttttttcaaactaattttaagaatttagtcttatttcgttgtaaactgtgtatctaattatattacattactctgttcagatgggatggttactaccacttgtccatgattttcatttgaaaagcaagtatctatatcatttccccccagtcagcattatttaacactccccttaactgtctttgaactttctcttttaacaaaaatgtcaagtctttatagttgtaatatcaccatgtttcccatttctgttaatacttctatgaacccctaaagtattgaagggaactagctgtcagtttcaaggattacaagtttgagtctcctagtattcaacatcattctgaaccctgaaataatatttttctctgttaaacaatttttatctgtttgccacctctgttgttagaggtggttgtcaattgaccttactaagttagctgtctttgatgaggaattattgttattggttcctgaataaaacattaaccttttaagtcagaaggaacctcggtacttcttaaggtttgtttgtgttttctaaaaccagagaataaggaactgatttggctatgaggtttaacattataattttctgtaagctttcccacaaaaaaacattgttgatttgaggatataataatgttttaatctttttaaaatataagtggttattctctgacttggtaactatgttctgaaaacactgcatttaagaatttttaaaaattggttttctaaaattaaaatgtccaaattaggcatattgctgagctcaaattgatgtgaaatgccatggttccagttgaattttaagcatattttcatttagatataaaatatatgaagtatgctttgttgattatagtgagaacccatgacatagttaaccaaagaatatgtttggttcaaataaaaatagaagcttaatactgggcattcatactttttaaagagaatgaatgaagaaatcggtttcctgctgtagttctctatgggtaagtcttagtaaagacgagaatgctgaagtcggccgtggcgattccctcctaggaactgggaggtgtggcttgcccattacccgcttgaagctcacatctttaccctcctctcccactgtggtttgatcttcacctattcccaggccctcccagcaattggagaggtgtctttttttttggttttggttttttttctccccgtctgcattcttaggcctcttagctattaggaactgtcagatacatactagtagctaattttcctagcctgaaattatatactgcatctgcactatgtacctactagggatctgacctcaagtgttttctgagcccaggcttcctggtgtggtgtcttttaccacataaaattattacaaattgcaaatgttggtattgtgatttgattatctgtacaaagaaagaagctctatgcagtgagtttgtggtttaatggtcacaaaaatgttagcactgctaccactcagcacgtgtaaaattttttaaatttataaatattaaaattttaaacttacactaagacttttcagttttatttaaagacccagggatgagtgtactgtttaaatatttacctctattaacataactaatgaaggtataaaattgcatttagtttttcagaagatgctgcaatatgattttaggaaataaggctatgtattgagccagttataggctgaatatcaggttgataaaattttatttgtatttttaaaattcataaatgggagttaaaatgtgtcttttcactaaatatttttattacatttttgttttgaccatgtgtgatttgttcatgggtatttagctagactcttttatgaaatgcattgaaatggtgctagtttgtttaccattataggaagattgacactggggacattacacggtcctaaaataattttaaatttaaaaaaatgaagacatctgtacagataaaaatcaagatttgcatcaccttctgggagaacccgtggtactcacagaatatccagtattagaaatataaaaattttgtctatattttataatatttatctcagcccacagtcttagaaacagtttcacagttactagttaagtcattatctttggtgcatatttagtaaatacttttagcaagtcattctttttggcctttcagggaaagtggtgaattaccatattactgtgtgctagatagatccaccctttgcccagtgttaaatcttgtaaacatatgaagtgaaaagttaatttttaaagaaaatgcatctttaaaatgttcatttttaacctgaatttgctttgaatattctttgatttgtaatgttgttatttagcttatattgagatttattccactccaaaggtggataaagaaaagttgtttaagaaaaccaattagagtgtattttgaatttttgtttctttcattaccaagtgtggggccatacacacaggctaatcatctgtcatttgagacccacagatgatttcaaaggtcccaaataaatacacatctataactgttttttaaaagacatctttaatggtgctctccaaaaatacaattcggttgcttatgagtgatgcctttgacaggctgattagattataaaacagttttgtttttttaaacatagggtctcagattgagtcttgtgcattctatgtaatctcaaatggcagttcagtttgactttcttttaaaactaagtggaaatggtatatttggtgaaactaatgaaagaatcttttgctgggaaattccatacagcacccccagcagcatcctgtctcagtctggcgtataattcaacctcctactgagtgtccctgtaaattatttttaatatatagcatgagagtgaactgaggtaagtcattgatgtttcccagagatgatgaatgaacaaaagcaaataggatctgctaaacatttttattcccacagtagtgagcagttttgttcttgttttgataatgttcatttctgcctaatcttaggcttcaaatacacctttaagaaagcccaagatgtattgagtagtagaacttcttatttgtacacctgtttataactgcactgccctggatgttatggttatttctaaggactgacctggtaaagctacttgaactggtagactgcagggtagaggcagacctagattcaatgtctaactaagctgcttagggcttacattaatttccacaggtctgttatccatatcatgagtttataagtgttcctcccaaagaaaaaatttaaaagtgatggatgaaatataatagtagatgctcaataaattccattgtatttaaagatt

SEQ ID NO: 212211 - DNA, 3456 bp, Artificial Sequence
  derived and/or modified sequence
atgatggccgccgccctgggcccccccgaggtgatcgcccagctggagaacgccgccaaggtgctgatggccccccccagcatggtgaacaacgagcagagacagcacgccgagcacatcttcctgagcttcagaaagagcaagagccccttcgccgtgtgcaagcacatcctggagaccagcaaggtggactacgtgctgttccaggccgccaccgccatcatggaggccgtggtgagagagtggatcctgctggagaagggcagcatcgagagcctgagaaccttcctgctgacctacgtgctgcagagacccaacctgcagaagtacgtgagagagcagatcctgctggccgtggccgtgatcgtgaagagaggcagcctggacaagagcatcgactgcaagagcatcttccacgaggtgagccagctgatcagcagcggcaaccccaccgtgcagaccctggcctgcagcatcctgaccgccctgctgagcgagttcagcagcagcagcaagaccagcaacatcggcctgagcatggagttccacggcaactgcaagagagtgttccaggaggaggacctgagacagatcttcatgctgaccgtggaggtgctgcaggagttcagcagaagagagaacctgaacgcccagatgagcagcgtgttccagagatacctggccctggccaaccaggtgctgagctggaacttcctgccccccaacctgggcagacactacatcgccatgttcgagagcagccagaacgtgctgctgaagcccaccgagagctggagagagaccctgctggacagcagagtgatggagctgttcttcaccgtgcacagaaagatcagagaggacagcgacatggcccaggacagcctgcagtgcctggcccagctggccagcctgcacggccccatcttccccgacgagggcagccaggtggactacctggcccacttcatcgagggcctgctgaacaccatcaacggcatcgagatcgaggacagcgaggccgtgggcatcagcagcatcatcagcaacctgatcaccgtgttccccagaaacgtgctgaccgccatccccagcgagctgttcagcagcttcgtgaactgcctgacccacctgacctgcagcttcggcagaagcgccgccctggaggaggtgctggacaaggacgacatggtgtacatggaggcctacgacaagctgctggagagctggctgaccctggtgcaggacgacaagcacttccacaagggcttcttcacccagcacgccgtgcaggtgttcaacagctacatccagtgccacctggccgcccccgacggcaccagaaacctgaccgccaacggcgtggccagcagagaggaggaggagatcagcgagctgcaggaggacgacagagaccagttcagcgaccagctggccagcgtgggcatgctgggcagaatcgccgccgagcactgcatccccctgctgaccagcctgctggaggagagagtgaccagactgcacggccagctgcagagacaccagcagcagctgctggccagccccggcagcagcaccgtggacaacaagatgctggacgacctgtacgaggacatccactggctgatcctggtgaccggctacctgctggccgacgacacccagggcgagacccccctgatcccccccgagatcatggagtacagcatcaagcacagcagcgaggtggacatcaacaccaccctgcagatcctgggcagccccggcgagaaggccagcagcatccccggctacaacagaaccgacagcgtgatcagactgctgagcgccatcctgagagtgagcgaggtggagagcagagccatcagagccgacctgacccacctgctgagcccccagatgggcaaggacatcgtgtggttcctgaagagatgggccaagacctacctgctggtggacgagaagctgtacgaccagatcagcctgcccttcagcaccgccttcggcgccgacaccgagggcagccagtggatcatcggctacctgctgcagaaggtgatcagcaacctgagcgtgtggagcagcgagcaggacctggccaacgacaccgtgcagctgctggtgaccctggtggagagaagagagagagccaacctggtgatccagtgcgagaactggtggaacctggccaagcagttcgccagcagaagcccccccctgaacttcctgagcagccccgtgcagagaaccctgatgaaggccctggtgctgggcggcttcgcccacatggacaccgagaccaagcagcagtactggaccgaggtgctgcagcccctgcagcagagattcctgagagtgatcaaccaggagaacttccagcagatgtgccagcaggaggaggtgaagcaggagatcaccgccaccctggaggccctgtgcggcatcgccgaggccacccagatcgacaacgtggccatcctgttcaacttcctgatggacttcctgaccaactgcatcggcctgatggaggtgtacaagaacacccccgagaccgtgaacctgatcatcgaggtgttcgtggaggtggcccacaagcagatctgctacctgggcgagagcaaggccatgaacctgtacgaggcctgcctgaccctgctgcaggtgtacagcaagaacaacctgggcagacagagaatcgacgtgaccgccgaggaggagcagtaccaggacctgctgctgatcatggagctgctgaccaacctgctgagcaaggagttcatcgacttcagcgacaccgacgaggtgttcagaggccacgagcccggccaggccgccaacagaagcgtgagcgccgccgacgtggtgctgtacggcgtgaacctgatcctgcccctgatgagccaggacctgctgaagttccccaccctgtgcaaccagtactacaagctgatcaccttcatctgcgagatcttccccgagaagatcccccagctgcccgaggacctgttcaagagcctgatgtacagcctggagctgggcatgaccagcatgagcagcgaggtgtgccagctgtgcctggaggccctgacccccctggccgagcagtgcgccaaggcccaggagaccgacagccccctgttcctggccaccagacacttcctgaagctggtgttcgacatgctggtgctgcagaagcacaacaccgagatgaccaccgccgccggcgaggccttctacaccctggtgtgcctgcaccaggccgagtacagcgagctggtggagaccctgctgagcagccagcaggaccccgtgatctaccagagactggccgacgccttcaacaagctgaccgccagcagcaccccccccaccctggacagaaagcagaagatggccttcctgaagagcctggaggagttcatggccaacgtgggcggcctgctgtgcgtgaagtag

SEQ ID NO: 212212 - protein, 392 aa, Artificial Sequence
  derived and/or modified sequence
MQSPAVLVTSRRLQNAHTGLDLTVPQHQEVRGKMMSGHVEYQILVVTRLAAFKSAKHRPEDVVQFLVSKKYSEIEEFYQKLSSRYAAASLPPLPRKVLFVGESDIRERRAVFNEILRCVSKDAELAGSPELLEFLGTRSPGAAGLTSRDSSVLDGTDSQTGNDEEAFDFFEEQDQVAEEGPPVQSLKGEDAEESLEEEEALDPLGIMRSKKPKKHPKVAVKAKPSPRLTIFDEEVDPDEGLFGPGRKLSPQDPSEDVSSVDPLKLFDDPDLGGAIPLGDSLLLPAACESGGPTPSLSHRDASKELFRVEEDLDQILNLGAEPKPKPQLKPKPPVAAKPVIPRKPAVPPKAGPAEAVAGQQKPQEQIQAMDEMDILQYIQDHDTPAQAAPSLF

SEQ ID NO: 212213 - DNA, 1179 bp, Artificial Sequence
  derived and/or modified sequence
atgcaaagcccagcagtgctggtcacttcacggcgacttcaaaacgcccacactggactcgaccttactgtcccacagcaccaggaagtgagggggaaaatgatgtcggggcatgttgagtatcagattcttgtggtgactaggttggctgcctttaaaagtgccaaacaccgcccagaggacgtagtccagtttttagtgagtaagaaatactctgagatcgaggagttctatcagaagctgtcatctcggtacgcggcggccagccttccgccgttgcctcgcaaggtcttgtttgtgggtgagtcagatattcgcgagcgaagggctgtgtttaacgaaattctgaggtgcgtgagcaaagacgctgagctcgctgggagtcccgaactgctcgagttcctgggcactcgctcccctggcgcagcagggttgacatctcgcgacagctcggtgctagatggtacagatagtcaaactgggaacgacgaagaggccttcgacttcttcgaggaacaggatcaggtcgcggaggagggaccaccagtccagtcattgaaaggggaagatgccgaagagagtttggaggaagaagaagccctggacccactgggcatcatgcggagcaaaaagccgaagaaacatcctaaggtggctgtcaaagccaaaccatcccctcgcctcacaatcttcgatgaggaagtggatcctgatgagggactgttcggccccggacggaaactgagccctcaggatccctctgaggatgtctcctccgtagacccccttaagctcttcgacgacccggacttaggaggggcgatccctctgggcgacagcctcctgctcccagccgcatgtgaatccggcggcccaactccctccctgtcccaccgggacgcctctaaggagttgttccgtgtagaagaggatttggatcagattctgaatttaggcgcggaacctaagcccaaacctcagctgaagcccaaaccccccgtggcggctaaacctgtgataccgcgcaagccagccgtcccccctaaggccggacccgctgaggctgtggcgggccagcaaaaaccacaggaacagatacaggcaatggacgaaatggatattctgcagtatattcaggaccacgacactccagcacaggctgcaccttccctgttctag

SEQ ID NO: 212214 - DNA, 2370 bp, Artificial Sequence
  derived and/or modified sequence
ccccgcccggagtccccgccgccgtcatgcagtccccggcggtgctcgtcacctccaggcgacttcagaatgcccacactggcctcgacctgactgtgccccagcaccaggaggtacggggcaagatgatgtctggacacgtggagtaccagatcctggtggtgacccgtctggctgcgttcaagtcggccaagcacaggcccgaggatgtcgtccagttcttggtctccaaaaagtacagcgagattgaggagttttaccagaaactgagcagtcgttatgcagcagccagcctccccccactacccaggaaggtcctgtttgttggggagtctgacatccgggagaggagagccgtgttcaatgagatcctgcgctgtgtctccaaggatgccgagttggcaggcagcccagagctgctagagttcttaggtaccagatccccaggggctgcagggctcaccagcagagattcctctgtcctggatggcacagacagtcagacagggaatgatgaagaggctttcgacttttttgaggagcaagaccaagtggcagaagagggtccgcccgtccagagcctgaagggcgaggatgctgaggaatccttggaggaggaggaggcgctggaccctctgggcattatgcgctccaagaagcccaagaaacatcccaaagtggccgtgaaagccaagccctcgccccggctcaccatctttgacgaggaggtggaccctgatgaggggctctttggcccgggcaggaagctgtctccacaggacccctcggaggacgtgtcatccgtggaccccctgaagctatttgatgatcctgacctcggcggggccatccccctgggtgactccctcctgctgccagccgcctgtgagagtggagggcccacacccagcctcagccacagggacgcctccaaggaactgttcagagttgaagaggacttggaccagattctgaacctgggagctgagcccaaacccaagccccagcttaagcccaagccaccagtggcagctaagccggtgatacccagaaaaccagctgttccccccaaagcgggcccggctgaagctgtggctgggcagcagaagccgcaggagcagatccaagccatggacgagatggacatcttgcagtacatccaggaccacgatacaccagcccaggccgcccccagcctcttctgacccttccatgctggcccctggcccagcaggcctgtctgtggggacatcggtgtgaagggaagggactgggccctgcagggtcagaacctccccacccccaggggaggccaggcagaagcctgggtcacagcacccagaactgcatggttccattttctccggggctgtggggccaaagtagaagcctgcgggctgcgggagcggctctcaccctaggagccagagcccaatgtgtcttattccccgtggacatgaaggggagggagggtgtggggatgccttgccaaccagaagcccagccccaaggatgaagcaagacatgtggggccgtagcgaggtgtcacatggggcagggaagcttcatgcccacgggttctgccagccccagcacagacccaaactggggctgggcctctatccctcctctgcctctgttcgcatagtaagaaggagtgaccggtatcctccccttcccctaccctaagctgtagcctgggtgactgactggcctgggcctggggtggggacgtccccaagccaaattactccagggcctctgctcctcgtggctgccaggggcctgcagggtctgggtgggtctcccaggagaggaatactgagtgggagatcggctgtctggagtgttctgatgcaagtctctctctcctgagcctcctcttgatgcaagctctaaagggagaagtcaggccctgcctctccagggtatagacggccctgctaggccccagttcttcctccttccccctttcccaggaaaggccagcccagtccatggccttcttgggcctctgggcacagagccaatgttcgtcattgcagctctcagcaaactgggtcatagctttccccacagctcagcctggggcctgggcagggctcccagcctgcaccgcctcccactgccagtggggcatgattctctcaggcttctgccccgaggccttcgtcgtcctcagggtctggacttggtcagtggcctttcaccagtggagctgccttcccagggagaaggagccgtgcgccagggcagggcccgtgccttagacttctcccgacccccagagcgctggtacacaggtctaggcaccacacagtgctttggaaattctcagtgaatgatgtttaataaagcaaaaaatgtcaa

SEQ ID NO: 212215 - DNA, 1179 bp, Artificial Sequence
  derived and/or modified sequence
atgcagagccctgctgtgctggtgaccagccggcggctgcagaatgcccacacaggcctggacctgactgtgccccagcaccaggaggtgcggggcaagatgatgagcggccacgtggagtaccagatcctggtggtgacccggctggccgccttcaagagcgccaagcacaggccagaagatgtggtgcagttcctggtgtccaagaagtacagcgagattgaggagttctaccagaagctgagcagccgctatgctgctgccagcctgccccccctgcccaggaaggtgctgtttgtgggggagagtgacatccgggagcggcgggctgtgttcaatgagatcctgcgctgtgtgtccaaggatgctgagctggccggcagccctgagctgctggagttcctgggcaccaggagccctggagctgctggcctgaccagccgggacagctctgtgctggatggaacagacagccagacaggaaatgatgaggaggcctttgacttctttgaggagcaggaccaggtggccgaggagggcccccctgtgcagagcctgaagggagaagatgctgaggagagcctggaggaggaggaggccctggaccccctgggcatcatgaggagcaagaagcccaagaagcaccccaaggtggccgtgaaggccaagcccagcccccggctgaccatctttgatgaggaggtggaccctgatgagggcctgtttggacctggcaggaagctgagcccccaggaccccagtgaagatgtgtcctctgtggaccccctgaagctgtttgatgatcctgacctgggcggggccatccccctgggggacagcctgctgctgcctgctgcctgtgagagcggcggccccacccccagcctgagccacagagatgccagcaaggagctgttccgggtggaggaggacctggaccagatcctgaacctgggcgctgagcccaagcccaagccccagctgaagcccaagccccctgtggccgccaagcctgtgatccccaggaagccagctgtgccccccaaggccggccctgctgaggccgtggccggccagcagaagccccaggagcagatccaggccatggatgagatggacatcctgcagtacatccaggaccatgacaccccagcccaggccgcccccagcctcttctag

SEQ ID NO: 212216 - DNA, 1179 bp, Artificial Sequence
  derived and/or modified sequence
atgcagagccccgccgtgctggtgaccagccggcggctgcagaacgcccatacaggcctcgacctcaccgttccacagcatcaagaagtcagagggaagatgatgtctggccatgtggagtaccagatactcgtggtaacccgcctagcagcctttaaatcggctaaacaccgacccgaggacgttgttcagttcctggtgagtaagaagtattcggaaattgaagagttctaccagaagctgtcctctagatacgcggcggcgagtctgccacccctgccaaggaaggtcctgttcgtgggcgagagtgacatccgcgaacgtcgcgctgtcttcaacgagatattgagatgcgtttccaaagatgccgagctagctgggagcccggaattactggagttcctgggaacaagatcaccgggtgctgccggcctgacctctcgagacagtagtgtcttggacgggactgattcccagaccggaaatgatgaggaggcctttgacttcttcgaggagcaggaccaggtagctgaggagggccccccagtgcagagtttaaagggagaagacgccgaagaatcgttagaagaggaagaggccctagatccactgggaatcatgcgcagtaagaagcctaaaaaacatcctaaagttgccgtaaaagccaagccatccccccgccttaccatcttcgatgaggaggtcgatcctgatgagggactgtttggtcctggccgcaaactgtcaccccaggatcctagcgaggacgtgtcctctgtggatccacttaaactgtttgacgacccagacttgggcggggctattccattgggcgactcattactgcttcctgctgcatgtgaatccggcggaccaactccttccctatcccatcgagatgccagtaaggaactttttcgggtggaagaggatctggaccaaatacttaacttgggagcggagcccaaaccgaagccacagttaaagcctaaaccaccagtggcggccaagcccgtgatcccccgcaaacccgctgtccctcctaaggcaggccctgctgaggccgtcgctggccaacagaaaccccaagaacaaattcaagccatggacgaaatggatattctgcagtatatccaagatcacgacacgcctgcacaggcggccccatccctgttctag

SEQ ID NO: 212217 - DNA, 1179 bp, Artificial Sequence
  derived and/or modified sequence
atgcaatcccccgctgtattggtgacctccaggagactccagaatgcccacacgggtttggacctgactgtgccccaacaccaagaagtcagggggaagatgatgtccggacacgtggagtatcagatcctggtcgtcacccgccttgcagcgtttaagagcgcaaaacaccggccagaggacgtggtgcaattcctggtatcaaagaaatatagcgagattgaagaattctatcaaaaactctcatctagatatgccgctgcctccctcccaccactgccccgaaaggttttgtttgtgggcgaatccgacatccgggaacggagagccgtgttcaacgagatcctgcgatgtgtgtcgaaagacgcggaactggcgggttctcccgagctgctagagttcctaggcactcggtcccccggagctgctggcttgacatcccgggactcttccgtgttagacggtactgactcccaaactggcaacgatgaggaggccttcgatttttttgaggaacaggaccaagtggctgaagagggtccgcctgtccagtcattaaaaggcgaggatgcagaagaatccctcgaagaagaagaggctctggacccactgggcataatgaggtctaagaaacccaaaaaacatccaaaggttgctgtgaaggcaaagccatctcccaggctaacaattttcgacgaggaggtcgatccagatgagggcctgtttggacctggcaggaagcttagccctcaggacccctctgaggacgtcagtagtgtggacccactcaaactttttgatgaccccgatctagggggtgccatacctctcggagactctcttttattgcccgctgcgtgcgagagtggcggtccaacacccagcctcagccaccgtgatgcaagcaaggagctgtttagagtggaggaggatctggaccagatcctaaatttaggggcagagcccaagcctaagccacaactaaagccaaagccgccagttgcggcaaaaccggtaatacctcgtaaacctgctgttcctcccaaggcagggcctgctgaggcagttgctggacagcagaagcctcaggagcagatccaggctatggacgagatggatatcttgcaatacatccaggaccacgacacacccgcacaggctgctccctccctgttttag

SEQ ID NO: 212218 - DNA, 1179 bp, Artificial Sequence
  derived and/or modified sequence
atgcagagccccgccgtgctggtgaccagcagaagactgcagaacgcccacaccggcctggacctgaccgtgccccagcaccaggaggtgagaggcaagatgatgagcggccacgtggagtaccagatcctggtggtgaccagactggccgccttcaagagcgccaagcacagacccgaggacgtggtgcagttcctggtgagcaagaagtacagcgagatcgaggagttctaccagaagctgagcagcagatacgccgccgccagcctgccccccctgcccagaaaggtgctgttcgtgggcgagagcgacatcagagagagaagagccgtgttcaacgagatcctgagatgcgtgagcaaggacgccgagctggccggcagccccgagctgctggagttcctgggcaccagaagccccggcgccgccggcctgaccagcagagacagcagcgtgctggacggcaccgacagccagaccggcaacgacgaggaggccttcgacttcttcgaggagcaggaccaggtggccgaggagggcccccccgtgcagagcctgaagggcgaggacgccgaggagagcctggaggaggaggaggccctggaccccctgggcatcatgagaagcaagaagcccaagaagcaccccaaggtggccgtgaaggccaagcccagccccagactgaccatcttcgacgaggaggtggaccccgacgagggcctgttcggccccggcagaaagctgagcccccaggaccccagcgaggacgtgagcagcgtggaccccctgaagctgttcgacgaccccgacctgggcggcgccatccccctgggcgacagcctgctgctgcccgccgcctgcgagagcggcggccccacccccagcctgagccacagagacgccagcaaggagctgttcagagtggaggaggacctggaccagatcctgaacctgggcgccgagcccaagcccaagccccagctgaagcccaagccccccgtggccgccaagcccgtgatccccagaaagcccgccgtgccccccaaggccggccccgccgaggccgtggccggccagcagaagccccaggagcagatccaggccatggacgagatggacatcctgcagtacatccaggaccacgacacccccgcccaggccgcccccagcctgttctag

SEQ ID NO: 212219 - DNA, 1179 bp, Artificial Sequence
  derived and/or modified sequence
atggatgcactggtggaggatgatatctgtatcctgaatcacgagaaagcacacaagagggatactgtgacaccggtatcaatctatagtggagacgagagtgtcgcctcccattttgctcttgtcaccgcttatgaggacatcaagaaaaggctgaaagatagcgagaaggagaactcactgctcaagaagcgtataaggtttcttgaggaaaaattaattgcacggtttgaggaagagacctctagcgttggccgcgaacaggtgaacaaagcctatcacgcctatagggaagtgtgcatcgaccgcgacaacctgaaatcaaagctagataagatgaataaagataactcagaatcactgaaggtcctgaatgaacagctgcagagtaaggaggtggagttactacagctgaggactgaagttgagacacagcaggtgatgcggaatcttaatcccccatctagcaactgggaagtggagaaactgtcttgcgacctcaaaatccatggccttgaacaagaactggagctcatgcgaaaagagtgctctgacctaaaaatcgagctgcagaaggccaagcagacagacccctaccaggaggacaacctgaaaagcagagatctccagaagctgagcatatcttccgataatatgcagcacgcatactgggagctcaagcgggaaatgagcaacttacacttggtgacccaggtgcaggccgaactgctaagaaaactcaaaacctcaactgccattaagaaagcgtgtgcacccgtcggctgtagcgaagacttggggagggatagcacaaaactacatctgatgaattttacagccacctatacgcgccatccaccgctgctccctaatggaaaggccttgtgccacacaaccagttccccgttgcctggggatgtgaaagtgctgtcagagaaagcaatcctgcagagttggaccgacaacgaacgtagcatccctaatgatgggacctgcttccaggagcacagttcgtacgggaggaatagcctcgaagacaactcctgggtgtttcccagcccacctaaaagcagcgagacagccttcggtgaaacgaaaaccaagactttgccattgcccaatctcccacctcttcattatttagatcagcacaatcaaaactgtctctacaaaaactag

SEQ ID NO: 212220 - DNA, 1179 bp, Artificial Sequence
  derived and/or modified sequence
atggatgccctggtggaggatgacatctgcatcctgaaccacgagaaggcccacaagagggacacagtgacccctgtgtccatctacagcggagatgagagcgtggccagccactttgccctggtgacagcctatgaggacatcaagaagaggctgaaggacagcgagaaggagaacagcctgctgaagaagaggatccgcttcctggaggagaagctgattgccaggtttgaggaggagaccagctctgtgggccgggagcaggtgaacaaggcctaccacgcctaccgggaggtgtgcatcgaccgggacaacctgaagagcaagctggacaagatgaacaaggacaacagcgagagcctgaaggtgctgaatgagcagctgcagagcaaggaggtggagctgctgcagctgaggacagaggtggagacccagcaggtgatgaggaacctgaacccccccagcagcaactgggaggtggagaagctgagctgtgacctgaagatccacggcctggagcaggagctggagctgatgaggaaggagtgcagcgacctgaagattgagctgcagaaggccaagcagacagacccctaccaggaggacaacctgaagagccgggacctgcagaagctgagcatcagcagtgacaacatgcagcacgcctactgggagctgaagcgggagatgagcaacctgcacctggtgacccaggtgcaggccgagctgctgaggaagctgaagaccagcacagccatcaagaaggcctgtgcccctgtgggctgcagcgaggacctgggccgggacagcaccaagctgcacctgatgaacttcaccgccacctacaccaggcacccccccctgctgcccaacgggaaggccctgtgccacaccaccagcagccccctgcctggagatgtgaaggtgctgtctgagaaggccatcctgcagagctggacagacaatgaaagaagcatccccaatgatggcacctgcttccaggagcacagcagctatggaagaaacagcctggaggacaacagctgggtgttccccagcccccccaagagcagcgagacagccttcggggagaccaagaccaagaccctgcccctgcccaacctgccccccctgcactacctggaccagcacaaccagaactgcctgtacaagaactag

SEQ ID NO: 212221 - DNA, 1179 bp, Artificial Sequence
  derived and/or modified sequence
atggacgccctggtggaggacgacatctgcatcctgaaccacgagaaggcacacaaacgggatacagtcaccccggtatcgatttacagtggggatgagtcagttgcttcacacttcgcgcttgtgaccgcatatgaggacataaagaaaagactgaaagacagcgaaaaagaaaactcacttctgaaaaagaggattcgcttcctagaggaaaaacttatcgcgcggttcgaggaagaaacttctagcgtaggacgcgagcaggtgaataaggcctatcatgcttatcgcgaggtctgcatcgaccgggacaatctcaagagcaaattagacaagatgaacaaggataatagtgaatctctgaaggttctgaatgaacagctacagtcaaaggaggtagaactgcttcaactgcgaacagaagttgaaacgcaacaggtgatgcgaaatctgaacccaccttcaagtaattgggaagttgagaaattgtcttgtgacctcaagattcacggcctggagcaggaactggagctcatgcgcaaggagtgcagtgacctcaaaatagagcttcagaaggccaagcagactgacccataccaggaggacaatctgaagtccagagatctccagaagctatccattagctcagacaacatgcagcacgcttattgggagttgaaaagagagatgtccaacttgcatctagtcacccaggtgcaggccgagctcctgagaaaactgaagacaagcaccgcgattaagaaggcgtgcgcccccgttggatgctccgaggacctgggtcgagacagtaccaaactacatctgatgaactttaccgcaacctacacccggcatcctcccctcctccccaacgggaaagcgctatgtcataccacatccagccccctccctggcgacgtaaaggtgttgtctgaaaaggccatactgcagagttggaccgataatgagaggtcgatcccgaacgacggcacgtgcttccaggaacactcttcctatggacgtaacagcctagaagacaacagctgggtttttccctccccaccaaagagttctgagacagcctttggcgagacaaagactaagaccctgcctctgccaaacctgccccctctgcattacctggatcagcacaaccaaaattgcctttacaagaattag

SEQ ID NO: 212222 - DNA, 1179 bp, Artificial Sequence
  derived and/or modified sequence
atggacgcactagttgaagacgatatctgcatactcaatcacgagaaggcgcacaagcgtgacaccgtgactcccgtgtccatctatagtggtgatgagtccgtggcaagccatttcgcactggtgacagcctatgaggacatcaagaagagattgaaggacagtgaaaaagagaattctttgttaaagaaacggatccggtttctggaggaaaagcttattgcaaggtttgaggaagagaccagtagcgtcggacgggaacaggtgaataaagcatatcatgcctatcgcgaagtctgtatagatcgggacaacctgaaatctaaactcgataagatgaacaaggacaattccgaatccttaaaggtgttaaacgaacagctacagtcaaaagaagtcgagttgctacaattgcgcactgaagtggaaacccaacaggtgatgcgaaatttaaacccaccttcaagcaattgggaagtagaaaaactctcatgcgatctcaaaatacatgggctcgagcaagaactagagttgatgagaaaggaatgctcggatttaaagatcgagctgcagaaagctaagcagactgacccctaccaggaggacaatcttaaaagccgggacttgcagaagttgtctataagctccgacaatatgcagcacgcctactgggaactgaagagagaaatgtcaaacctgcatttggtcacccaggtgcaggccgagttgctccgcaagctaaagacctctacagctatcaagaaggcatgcgcacccgtgggctgttcggaggatttaggacgggactcaacaaagcttcatcttatgaattttacggcaacttatacccgccaccctcctctcctgcccaacgggaaggccctgtgccacactacatcctctccgttgccaggggatgttaaagtgcttagcgaaaaggctattcttcagtcctggaccgataacgaaagaagcatccctaatgatggaacgtgcttccaggaacatagcagttatgggcgtaacagcctcgaggacaactcatgggtgttcccgtcaccgccaaagtccagcgagacggcttttggtgagacaaaaacgaagaccctgcccttacctaacctgcctcctcttcactacctagatcagcacaatcagaactgcctgtacaagaattag

SEQ ID NO: 212223 - DNA, 1179 bp, Artificial Sequence
  derived and/or modified sequence
atggacgccctggtggaggacgacatctgcatcctgaaccacgagaaggcccacaagagagacaccgtgacccccgtgagcatctacagcggcgacgagagcgtggccagccacttcgccctggtgaccgcctacgaggacatcaagaagagactgaaggacagcgagaaggagaacagcctgctgaagaagagaatcagattcctggaggagaagctgatcgccagattcgaggaggagaccagcagcgtgggcagagagcaggtgaacaaggcctaccacgcctacagagaggtgtgcatcgacagagacaacctgaagagcaagctggacaagatgaacaaggacaacagcgagagcctgaaggtgctgaacgagcagctgcagagcaaggaggtggagctgctgcagctgagaaccgaggtggagacccagcaggtgatgagaaacctgaacccccccagcagcaactgggaggtggagaagctgagctgcgacctgaagatccacggcctggagcaggagctggagctgatgagaaaggagtgcagcgacctgaagatcgagctgcagaaggccaagcagaccgacccctaccaggaggacaacctgaagagcagagacctgcagaagctgagcatcagcagcgacaacatgcagcacgcctactgggagctgaagagagagatgagcaacctgcacctggtgacccaggtgcaggccgagctgctgagaaagctgaagaccagcaccgccatcaagaaggcctgcgcccccgtgggctgcagcgaggacctgggcagagacagcaccaagctgcacctgatgaacttcaccgccacctacaccagacacccccccctgctgcccaacggcaaggccctgtgccacaccaccagcagccccctgcccggcgacgtgaaggtgctgagcgagaaggccatcctgcagagctggaccgacaacgagagaagcatccccaacgacggcacctgcttccaggagcacagcagctacggcagaaacagcctggaggacaacagctgggtgttccccagcccccccaagagcagcgagaccgccttcggcgagaccaagaccaagaccctgcccctgcccaacctgccccccctgcactacctggaccagcacaaccagaactgcctgtacaagaactag

SEQ ID NO: 212224 - protein, 435 aa, Artificial Sequence
  derived and/or modified sequence
MSGFLEELLGEKLVTGGGEEVDVHSLGARGISLLGLYFGCSLSAPCAQLSASLAAFYGRLRGDAAAGPGPGAGAGAAAEPEPRRRLEIVFVSSDQDQRQWQDFVRDMPWLALPYKEKHRKLKLWNKYRISNIPSLIFLDATTGKVVCRNGLLVIRDDPEGLEFPWGPKPFREVIAGPLLRNNGQSLESSSLEGSHVGVYFSAHWCPPCRSLTRVLVESYRKIKEAGQNFEIIFVSADRSEESFKQYFSEMPWLAVPYTDEARRSRLNRLYGIQGIPTLIMLDPQGEVITRQGRVEVLNDEDCREFPWHPKPVLELSDSNAAQLNEGPCLVLFVDSEDDGESEAAKQLIQPIAEKIIAKYKAKEEEAPLLFFVAGEDDMTDSLRDYTNLPEAAPLLTILDMSARAKYVMDVEEITPAIVEAFVNDFLAEKLKPEPI

SEQ ID NO: 212225 - DNA, 1308 bp, Artificial Sequence
  derived and/or modified sequence
atgtccgggttcctggaagaactcctcggggaaaagctcgtgacaggtggtggcgaagaagtggatgtgcactctttaggtgcaagaggaatcagcctccttggcctctacttcggttgctccctttccgccccgtgtgctcagctgagcgcaagccttgccgcattctacgggcggcttagaggcgatgctgcggccggcccggggcccggcgctggggccggtgccgccgcagagccggaacctcggagaaggctcgagatcgtcttcgtctctagtgaccaagatcagcgtcagtggcaggatttcgttcgcgatatgccatggcttgcgctcccatataaagaaaagcaccgcaaactgaaactgtggaacaaatatcgcatttctaacatcccaagtcttatattcctggacgccacgacaggtaaagtcgtgtgtcgcaacggacttctggtcatacgagatgatcctgaaggcctcgaatttccatgggggccaaaaccctttagggaggttatcgcaggaccccttcttcggaataacggccagtctcttgaaagcagctccctcgaaggaagccacgtaggggtttatttttctgcccactggtgccccccgtgtcgatccttaacacgggtgcttgtcgagtcataccggaaaattaaggaggcaggccagaatttcgagatcatcttcgtgagcgctgatcgatcggaggagtcttttaagcagtacttctccgaaatgccttggcttgccgtgccctacacagacgaggcccgcagatcaaggctgaacagactctatggtatccaaggcatccctacgctgatcatgctcgacccccagggggaagtgattacccgccagggccgtgtggaggtcctcaacgacgaagactgtcgcgagttcccgtggcaccctaagcccgtcctggaactctccgacagtaatgctgcacaactcaacgaggggccctgcctggtcttgttcgtggattcagaagatgacggggagagtgaggccgccaagcagctgatccagcccatagctgaaaaaatcatcgcaaaatacaaagcaaaggaggaagaggcacctctgctcttctttgtggctggcgaagacgacatgactgacagcctgcgtgactacacgaatctgccagaagccgccccgctactaactatcttagatatgtctgccagagcgaagtacgtgatggacgtggaggaaatcactcccgcaatcgttgaggcctttgtgaatgactttctggccgagaaactgaaacctgaaccaatttag

SEQ ID NO: 212226 - DNA, 1308 bp, Artificial Sequence
  derived and/or modified sequence
atgagcggcttcctggaggagctgctgggggagaagctggtgactggaggaggagaggaggtggatgtgcacagcctgggcgcccggggcatcagcctgctgggcctgtacttcggctgcagcctgagcgccccctgtgcccagctgagcgccagcctggccgccttctacggccgcctgcggggagatgctgctgctggccctggccctggggccggggccggggctgctgctgagcctgagccccggcggcggctggagatcgtgtttgtgtccagtgaccaggaccagaggcagtggcaggactttgtgcgggacatgccctggctggccctgccctacaaggagaagcacaggaagctgaagctgtggaacaagtaccgcatcagcaacatccccagcctcatcttcctggatgccaccaccgggaaggtggtgtgcagaaatggcctgctggtgatcagagatgatcctgagggcctggagttcccctggggccccaagcccttccgggaggtgattgctggccccctgctgaggaacaacggccagagcctggagagcagcagcctggagggcagccacgtgggcgtgtacttcagcgcccactggtgccccccctgccgcagcctgaccagggtgctggtggagagctacaggaagatcaaggaggccggccagaactttgagatcatctttgtgtctgctgacagaagtgaggagagcttcaagcagtacttcagcgagatgccctggctggccgtgccctacacagatgaggcccggcgcagccggctgaaccggctgtatggcatccagggcatccccaccctcatcatgctggacccccagggcgaggtgatcacccggcagggccgggtggaggtgctgaatgatgaggactgccgggagttcccctggcaccccaagcctgtgctggagctgagtgacagcaatgctgcccagctgaatgaaggcccctgcctggtgctgtttgtggacagtgaagatgatggagagagcgaggccgccaagcagctgatccagcccatcgccgagaagatcatcgccaagtacaaggccaaggaggaggaggcccccctgctcttctttgtggccggagaagatgacatgacagacagcctgcgggactacaccaacctgcctgaggccgcccccctgctgaccatcctggacatgtctgcccgggccaagtatgtgatggatgtggaggagatcaccccagccatcgtggaggcctttgtgaatgacttcctggccgagaagctgaagccagagcccatctag

SEQ ID NO: 212227 - DNA, 1308 bp, Artificial Sequence
  derived and/or modified sequence
atgagcggcttcctggaggagctgctgggcgagaagctggtgaccggaggcggcgaggaagtggacgtgcactctctcggggctcgggggatttcccttctcggcctgtactttgggtgttcactgtcagcaccatgtgcccaactgagtgcctcgttggcagcattctatggacgcctgcggggggatgccgcagcaggtccaggacctggagctggcgcaggtgctgccgcagagccggaacctagacgcaggctggaaatcgtgtttgtgagtagtgaccaagatcaacggcagtggcaggactttgtgcgggacatgccttggctggctctgccttataaggagaaacacagaaagctgaagctgtggaacaaatacagaatctctaacatcccaagcttgatcttccttgatgccacaactggtaaggtggtctgtcggaacggtctgctggtcataagggacgaccccgaagggctggagttcccgtggggaccgaagcccttccgcgaagtcatcgccgggcccctcctacgaaataatggccagtcgctggaaagttcaagtctagagggatctcatgtcggagtatatttctcggctcactggtgtcctccttgtcgatccctgacacgggtactggtggagtcctaccggaaaattaaagaagcaggccagaacttcgaaattatcttcgtgagtgcagataggagcgaagagtcctttaagcagtatttctcagaaatgccatggctggccgtaccatataccgatgaggcccggcgaagccggcttaatcggctgtacgggatacaaggaattcctaccttgattatgctcgaccctcaaggcgaagtgattactaggcaggggagggtggaggtgctgaacgatgaggactgtagagaatttccttggcacccaaagccagtgctggaactgagcgattctaacgccgcacagctgaacgaagggccatgtctcgtcctgttcgttgactctgaagatgatggcgagtcagaagccgctaaacaattaatccagcccattgccgagaagattatcgctaagtacaaggccaaagaggaggaggcaccactattattctttgttgccggtgaagacgatatgacggactccctccgagactataccaatctgcctgaggccgcaccactgctgaccattctagatatgtccgcccgtgctaagtacgtgatggatgtcgaggagattactccagctattgtagaggcctttgtcaatgattttctggccgagaaattaaagcctgagcctatttag

SEQ ID NO: 212228 - DNA, 3008 bp, Artificial Sequence
  derived and/or modified sequence
cccagcgcctgccgccgacgccgccgcctcctcccgccgcgcggaccgtggagcggggtcgcagccgcctgcccgccctgcggtgggccaggatgtcgggcttcctggaggagctgctcggcgagaagctggtgacgggcggcggcgaggaggtggacgtgcactcgctgggcgcccgcggcatctcgctgctgggtctctacttcggctgcagcctcagcgccccctgcgcgcagctcagcgccagcctggccgccttctacgggcgcctgcggggggacgcggcggccgggccggggccgggagcgggggccggggcggcggcggagcccgagccgcggcggcgcctggagatcgtcttcgtgtcctcggaccaggaccagcggcagtggcaggacttcgtgcgggacatgccgtggctggcgctgccctacaaggagaagcacaggaagctcaaactttggaacaaataccgaatttccaacattccatcactaatattcctcgacgccaccactgggaaggttgtgtgcaggaacgggctgctggtgatccgagatgacccagaaggtctggagttcccctggggaccgaaacccttcagggaagtcattgcagggcccttgcttagaaacaatgggcagtctctggagagcagcagcctggaggggtctcacgtgggcgtctatttctccgcacattggtgtccgccctgccgaagcctcacccgggtcctggtggaatcctaccggaagatcaaggaggcaggccagaacttcgagatcatcttcgttagtgcagacaggtcggaggagtccttcaaacagtacttcagtgagatgccctggctcgccgtcccctacacggatgaggcccggcggtcgcgcctcaaccggctgtacggaatccaaggcatccccacgctcatcatgctggacccgcagggcgaggtgatcacgcggcaggggcgggtggaggtgctgaacgacgaggactgccgggagttcccctggcaccccaagcccgtgctggagctctccgactccaacgccgcgcagcttaacgagggcccctgcctcgtcctttttgtagattctgaggatgacggagagtccgaggcggccaagcagctgattcagccgatagctgagaaaatcattgccaagtacaaagccaaagaggaggaggcaccccttctgttcttcgtagccggggaggatgacatgactgactccctgcgagattacaccaacctgcctgaggctgcccctttgctcaccatcctggacatgtcagcccgggccaagtacgtgatggacgtggaggagatcacccccgccatcgtggaggcctttgtgaatgacttcctagcagagaagctcaaaccggagcccatctagcgtggctccggcctcctgagacgttatttaaaactcagccttctcctcctccccctccttccttccgcccttggacttacccagcgtgccccgaatcccaccacccaagtgtccagcctctctgtggtgccttgtttctgcagtaaactcctcagccagcaccctggggtgtggaatcagcagcggcagagtccaccgtgtttggagactctgtttgggagcacgggatggccgggggcccggccagagcggggctgcatggctttcgcaaagtcactagcttttggtgaaggatctgccagggtgtcctgggcagagtgagcgtggagggccggtgggtcccgctcgggctctgactctgacgtcggcacacacggccccggacggccagaggggaaccgccgggtgacacctgcgtggaggctgagctgagaaagggcctccgcttagagctgcgggtgaggacgtccttttctaagcaacacagtcttcctcggtctgagagaaaagcagcccactcttgtgttctcaggcaggggatctccaaatgcaaaaggaagcttgtagaggttttttgggtgagaagaaaaatgtagctaaggtaatggttcatatcatacaaacagctcccacgatcctgaaattctgttaacgaatccttctctttggacatcttcccaagaaacttagccctgagtcctaggaggagcacctctgcaccagcacggacctctcgctccacccagctctgtgcccaaggcccctgatctctgctgaggtgcccacacccacgttcgatcacccctgccattcccttttattttcttttttttgagatggagtcttgctctgtcgcccaggctggagtgcagtggcaccatcttggctcacttcaacctccgcccccaaggttcaagtgattctcctgcctcagcctcccgagtagctgggattacaggcacccgccaccgtacctggctaatttttgtatttttagtagagatggggtttcaccatgttggccaggctggtctcgaactcctgacctcaggtgatccacccgcctcggcctcccaaagtgctgggattacaggcgtgagccgccgtgcccggcccccttttcttttcaaagcagaactacaaagatgagaaattaccagaagcctcgccttttcctaagcaccagcggaaggagctgtgccccgggatggagtgagggtggagggcgcgtcagccacgggtgggccttgtgtcgccttgtatcggcccaggtaggttgttggcctcttacttgggctgacctgacccccgaaagagaaacagacaactctgttctcaggattggggatggacggcttcggccaagcgttttagcctcattcactcaggccccactcagcactctgccagccaagaccattgatttggaaaatccggtccccacccgctaatgagctgttgacactgttgttccttgctgaattggattgttgacttgtagttcagaggcgtacaactagttggcgattagacttgttatgtgatgttaccagcctgaaatgcgatcaccccgtaggaaataaagcaggcatctctggacctcatcca

SEQ ID NO: 212229 - DNA, 1308 bp, Artificial Sequence
  derived and/or modified sequence
atgagcggattcctggaagaactactcggtgagaagctcgtgacaggtggaggcgaagaggtagatgtccactctctgggtgctcgtgggatctctctgttagggctttactttgggtgctccctgtctgccccatgtgcgcagttgagcgcgtctctggccgctttttatggtcgtttacgcggagatgcagccgctggaccaggccctggcgcaggcgctggcgctgcagccgagccagaaccacgtcgacgtctcgagatcgtttttgtgtcgtccgaccaagatcagagacagtggcaggatttcgttcgggatatgccttggttagccctgccatacaaggagaaacacagaaagcttaagctgtggaacaagtacaggatatccaatatcccatccctgatttttctcgatgctaccacaggaaaagtagtgtgccgtaatgggcttttagtcatcagagacgaccccgaaggattagagtttccatggggccctaagccttttagggaggtgatcgcaggtccccttttgcggaacaatggccagtctctggagagttcaagtctcgagggaagtcacgtcggggtgtatttctccgcacactggtgtcctccctgcagaagccttacgagggtgctggtggagagctatcggaaaattaaagaggccggacagaattttgagatcatttttgtgtcagcagatcgcagcgaagaatcgtttaagcagtatttttctgagatgccgtggctagccgtgccctatactgacgaagccaggaggagcagactgaaccgtctttatgggatccaaggcattccgacactgatcatgctcgatcctcagggagaagtcattaccagacagggacgcgtcgaggtactgaatgatgaggattgtcgagagtttccatggcaccctaagccagttctggaactttccgatagtaacgccgcacagctgaatgaagggccttgtttagtgcttttcgtggactcagaggatgatggcgagtctgaggctgctaagcagttaatccaacccattgccgagaagataattgccaagtacaaagctaaggaagaagaagctcccctgctgtttttcgttgcaggcgaggatgacatgaccgattctctgagagattatactaacctcccggaagcagcccctctcttgaccattctagacatgtcagcacgagccaaatatgtcatggacgtcgaagagatcactccagcgatcgtcgaagcttttgtgaatgacttcctggccgagaaacttaaacccgaacctatttag

SEQ ID NO: 212230 - DNA, 1308 bp, Artificial Sequence
  derived and/or modified sequence
atgagcggcttcctggaggagctgctgggcgagaagctggtgaccggcggcggcgaggaggtggacgtgcacagcctgggcgccagaggcatcagcctgctgggcctgtacttcggctgcagcctgagcgccccctgcgcccagctgagcgccagcctggccgccttctacggcagactgagaggcgacgccgccgccggccccggccccggcgccggcgccggcgccgccgccgagcccgagcccagaagaagactggagatcgtgttcgtgagcagcgaccaggaccagagacagtggcaggacttcgtgagagacatgccctggctggccctgccctacaaggagaagcacagaaagctgaagctgtggaacaagtacagaatcagcaacatccccagcctgatcttcctggacgccaccaccggcaaggtggtgtgcagaaacggcctgctggtgatcagagacgaccccgagggcctggagttcccctggggccccaagcccttcagagaggtgatcgccggccccctgctgagaaacaacggccagagcctggagagcagcagcctggagggcagccacgtgggcgtgtacttcagcgcccactggtgccccccctgcagaagcctgaccagagtgctggtggagagctacagaaagatcaaggaggccggccagaacttcgagatcatcttcgtgagcgccgacagaagcgaggagagcttcaagcagtacttcagcgagatgccctggctggccgtgccctacaccgacgaggccagaagaagcagactgaacagactgtacggcatccagggcatccccaccctgatcatgctggacccccagggcgaggtgatcaccagacagggcagagtggaggtgctgaacgacgaggactgcagagagttcccctggcaccccaagcccgtgctggagctgagcgacagcaacgccgcccagctgaacgagggcccctgcctggtgctgttcgtggacagcgaggacgacggcgagagcgaggccgccaagcagctgatccagcccatcgccgagaagatcatcgccaagtacaaggccaaggaggaggaggcccccctgctgttcttcgtggccggcgaggacgacatgaccgacagcctgagagactacaccaacctgcccgaggccgcccccctgctgaccatcctggacatgagcgccagagccaagtacgtgatggacgtggaggagatcacccccgccatcgtggaggccttcgtgaacgacttcctggccgagaagctgaagcccgagcccatctag

SEQ ID NO: 212231 - DNA, 1386 bp, Artificial Sequence
  derived and/or modified sequence
atggctccccagtctctaccttccagccggatggcgccacttggcatgcttttggggctgctgatggcggcttgcttcaccttctgcctttctcaccagaacctaaaggagtttgctctgaccaacccggagaagagttctactaaggaaaccgagaggaaagagaccaaggcagaggaggagcttgatgccgaggtactcgaggtatttcaccctacgcacgagtggcaggccctccagcctggccaggccgtaccagccggtagccacgttagactcaatctgcagactggggagagagaagccaagttacagtatgaagataagtttcgcaacaacctgaaagggaagcgactggatattaatactaatacctatacatcgcaggacctcaagtcagccctggctaagtttaaagagggagccgaaatggagtcctccaaagaggataaggctaggcaggctgaggttaaaaggctgttccgaccaatagaggaattgaagaaagactttgatgagttaaacgtcgttattgagacagatatgcagatcatggtcaggctgatcaataagttcaacagttcgtcgtcatccttagaggagaaaatagcggcgctgttcgacctcgaatactatgtccaccagatggataatgctcaggacctcctgagctttggtggtttacaggtagttattaacggacttaactccaccgagccccttgttaaggagtatgctgcttttgtgcttggggctgccttctcctccaacccaaaagtgcaggttgaagctatcgagggaggcgcgctgcaaaagctgctcgttatccttgctactgagcagcccctgacggccaagaagaaagttctcttcgcattatgtagcctgctgcgtcacttcccatacgcacagagacagttcctgaaacttggcgggcttcaagtcctgcgaaccctggtgcaagaaaaaggtactgaagtgctagctgtacgggttgtcacattgttgtatgaccttgtgactgagaagatgtttgccgaggaagaagccgagttgacacaggagatgagcccagagaaactgcagcagtacaggcaggtgcatcttctgccgggcctgtgggagcagggctggtgtgagattactgctcacttgttagcacttccagaacatgatgcccgggagaaggtcctgcagacactgggcgtgctgctgactacatgtagggaccgctataggcaggacccacagctcggcagaaccttggcctctctgcaggccgagtaccaagtcctcgcatcactcgaacttcaggacggagaagatgagggttacttccaggagctgcttggttctgtgaactcactgctgaaggagctcagatag

SEQ ID NO: 212232 - DNA, 1386 bp, Artificial Sequence
  derived and/or modified sequence
atggcaccacaatcactgccatcttcgaggatggctccgttgggaatgttactgggtctgctcatggctgcttgcttcacattttgtctgtcacaccagaatttaaaggaatttgccctcaccaacccagaaaagtcctcgaccaaagaaaccgagagaaaagagacaaaagccgaagaggaactggatgccgaggttttagaggttttccatcccacgcacgagtggcaagccctgcaacctggccaagctgtccctgcaggctcacatgttcggcttaatctgcagaccggagaacgggaggcgaagttacagtacgaggacaagtttagaaataacctgaaggggaaacggctggacataaataccaacacgtacaccagtcaggaccttaaatccgccctggcgaaattcaaggaaggcgcggaaatggaaagctccaaggaagacaaggcacgacaggccgaggtcaagcggctgtttagaccgatcgaggaacttaagaaggactttgacgagctaaatgtggttatcgaaaccgacatgcagataatggtaagactgatcaacaaattcaattcttctagttcctcgttggaggagaagatcgcagccctcttcgaccttgaatactacgtgcatcagatggataacgctcaggatctgctgtccttcggggggcttcaggtcgtcataaacggcctcaacagcaccgagccattggtgaaggagtacgccgcgtttgtccttggcgcggccttttcaagtaatcccaaagtccaggttgaggctatcgagggcggtgcattacagaaactgttggtcatcttggccacagaacaacctttaactgctaagaaaaaggtattgtttgccctgtgttcgctgctccggcacttcccctacgcacagcgacaattccttaaactcggaggtctgcaggtgttgcggactcttgtccaggaaaagggtacggaggttttagcagtgagggttgtaaccctgctgtacgaccttgtgaccgaaaagatgtttgcggaggaagaagccgagctcactcaggaaatgtcccctgagaaacttcagcaatatcggcaggtgcacctgctcccaggtctgtgggagcagggctggtgcgaaatcaccgcccatcttttagccctcccagaacatgatgcacgcgaaaaagttctgcagacgctcggcgtcctattaactacttgtcgggaccgctacaggcaggacccccagttgggccggaccctcgcctccctgcaggctgagtaccaggtactggcatccctggaactgcaggatggcgaagatgaggggtattttcaggagctcttggggtcagtaaacagcctgcttaaggagctgcggtag

SEQ ID NO: 212233 - DNA, 288 bp, Artificial Sequence
  derived and/or modified sequence
atggccccacagtccctgcccagttctaggatggctcctctcgggatgctgctggggcttcttatggctgcatgttttacattttgcctgagtcaccagaacctgaaagagttcgcccttacgaatcccgaaaagtcttctacaaaggagacagaacggaaagaaaccaaagctgaggaagagttggatgccgaagtgctggaggtgttccatccgacgcatgaatggcaggcactgcagcctgggcaggctgtcccagccggcagccacgtccggcttaacctatag

SEQ ID NO: 212234 - DNA, 492 bp, Artificial Sequence
  derived and/or modified sequence
atggctccacagagtctgccctcttctagaatggctcctctcggtatgctgctcggccttctgatggctgcgtgcttcacgttctgtcttagccaccagaatcttaaagagtttgccctgactaacccagagaagagctccaccaaggaaacagaaagaaaggagacaaaagccgaggaggagctggatgcagaggttctcgaggtcttccatcctacccatgaatggcaagccctgcaacccggccaagcagtacccgcaggatcccatgtccgactgaatcttcagacgggggaacgggaggctaagcttcagtacgaagataagtttcgcaataaccttaagggcaaacgactggatattaatacaaatacatacacctctcaggatctaaaaagcgcactagccaagtttaaggagggagccgagatggaatcgtctaaagaagataaagctaggcaggctgaggtgaaacggctgtttagaccttag

SEQ ID NO: 212235 - DNA, 372 bp, Artificial Sequence
  derived and/or modified sequence
atggcaccacaatctctcccaagctcccgcatggcacccctggggatgttactgggccttcttatggctgcctgttttactttctgcctatcccatcagaacttaaaagagtttgccctcaccaacccagagaaaagcagcaccaaagaaacagagagaaaagaaactaaagcagaagaggagctcgatgccgaggtcctggaggtgtttcatcctacccatgagtggcaggctctacagccaggccaagctgtgcccgctggaagccacgttcgcctgaacctccagacgggcgaaagagaggccaagctgcaatacgaagataagtttagaaacaaccttaaggggaaacgcctcgacataaacacttag

SEQ ID NO: 212236 - DNA, 579 bp, Artificial Sequence
  derived and/or modified sequence
atggcagcatgctttaccttctgcttgtcacatcaaaaccttaaagaattcgccctgacgaatccagagaaatcttccacaaaggagacagagagaaaagagactaaggctgaggaggaacttgatgctgaagtgctggaagtattccaccctactcatgagtggcaagcacttcagcccggtcaggcagttcccgctggatcccacgttagacttaatcttcagactggagaaagagaagcaaaactgcagtacgaggataagtttaggaataacttgaagggtaaacgccttgacattaacacaaatacatataccagccaggatctaaaatccgcccttgctaagttcaaggagggagcagagatggagagttcaaaggaggataaaatggacaatgctcaagacctcctgtccttcggcgggttacaggtggttatcaatggactgaactccactgagccgctggtaaaggagtatgctgccttcgttctgggcgccgccttctcgagtaaccccaaggtgcaggttgaagctatcgagggaggagcactacagaaattactggtgatactttag

SEQ ID NO: 212237 - DNA, 1386 bp, Artificial Sequence
  derived and/or modified sequence
atggccccccagagcctgcccagcagcaggatggcccccctgggcatgctgctgggcctgctgatggccgcctgcttcaccttctgcctgagccaccagaacctgaaggagtttgccctgaccaaccctgagaagagcagcaccaaggagacagagaggaaggagaccaaggccgaggaggagctggatgctgaggtgctggaggtgttccaccccacccatgagtggcaggccctgcagcccggccaggccgtgcctgctggcagccacgtgcggctgaacctgcagacaggagagcgggaggccaagctgcagtatgaggacaagttcaggaacaacctgaagggcaagaggctggacatcaacaccaacacctacaccagccaggacctgaagagcgccctggccaagttcaaggagggcgctgagatggagagcagcaaagaagacaaggcccggcaggccgaggtgaagaggctcttccggcccatcgaggagctgaagaaggactttgatgagctgaatgtggtgattgaaacagacatgcagatcatggtgcggctcatcaacaagttcaacagcagcagcagcagcctggaggagaagattgctgccctgtttgacctggagtactacgtgcaccagatggacaatgcccaggacctgctgagctttggaggcctgcaggtggtgatcaatggcctgaacagcacagagcccctggtgaaggagtatgctgcctttgtgctgggcgccgccttcagcagcaaccccaaggtgcaggtggaggccattgaaggaggagccctgcagaagctgctggtgatcctggccacagagcagcccctgacagccaagaagaaggtgctgtttgccctgtgcagcctgctgcggcacttcccctatgcccagaggcagttcctgaagctgggcggcctgcaggtgctgcggaccctggtgcaggagaagggcacagaggtgctggccgtgcgggtggtgaccctgctgtatgacctggtgacagagaagatgtttgctgaggaggaggccgagctgacccaggagatgagccctgagaagctgcagcagtaccggcaggtgcacctgctgcccggcctgtgggagcagggctggtgtgagatcacagcccacctgctggccctgcctgagcatgatgcccgggagaaggtgctgcagaccctgggcgtgctgctgaccacctgccgggaccgctaccggcaggacccccagctgggccgcaccctggccagcctgcaggccgagtaccaggtgctggccagcctggagctgcaggatggagaagatgagggctacttccaggagctgctgggctctgtgaacagcctgctgaaggagctgaggtag

SEQ ID NO: 212238 - DNA, 288 bp, Artificial Sequence
  derived and/or modified sequence
atggccccccagagcctgcccagcagcaggatggcccccctgggcatgctgctgggcctgctgatggccgcctgcttcaccttctgcctgagccaccagaacctgaaggagtttgccctgaccaaccctgagaagagcagcaccaaggagacagagaggaaggagaccaaggccgaggaggagctggatgctgaggtgctggaggtgttccaccccacccatgagtggcaggccctgcagcccggccaggccgtgcctgctggcagccacgtgcggctgaacctgtag

SEQ ID NO: 212239 - DNA, 492 bp, Artificial Sequence
  derived and/or modified sequence
atggccccccagagcctgcccagcagcaggatggcccccctgggcatgctgctgggcctgctgatggccgcctgcttcaccttctgcctgagccaccagaacctgaaggagtttgccctgaccaaccctgagaagagcagcaccaaggagacagagaggaaggagaccaaggccgaggaggagctggatgctgaggtgctggaggtgttccaccccacccatgagtggcaggccctgcagcccggccaggccgtgcctgctggcagccacgtgcggctgaacctgcagacaggagagcgggaggccaagctgcagtatgaggacaagttcaggaacaacctgaagggcaagaggctggacatcaacaccaacacctacaccagccaggacctgaagagcgccctggccaagttcaaggagggcgctgagatggagagcagcaaagaagacaaggcccggcaggccgaggtgaagaggctcttccggccctag

SEQ ID NO: 212240 - DNA, 372 bp, Artificial Sequence
  derived and/or modified sequence
atggccccccagagcctgcccagcagcaggatggcccccctgggcatgctgctgggcctgctgatggccgcctgcttcaccttctgcctgagccaccagaacctgaaggagtttgccctgaccaaccctgagaagagcagcaccaaggagacagagaggaaggagaccaaggccgaggaggagctggatgctgaggtgctggaggtgttccaccccacccatgagtggcaggccctgcagcccggccaggccgtgcctgctggcagccacgtgcggctgaacctgcagacaggagagcgggaggccaagctgcagtatgaggacaagttcaggaacaacctgaagggcaagaggctggacatcaacacctag

SEQ ID NO: 212241 - DNA, 579 bp, Artificial Sequence
  derived and/or modified sequence
atggccgcctgcttcaccttctgcctgagccaccagaacctgaaggagtttgccctgaccaaccctgagaagagcagcaccaaggagacagagaggaaggagaccaaggccgaggaggagctggatgctgaggtgctggaggtgttccaccccacccatgagtggcaggccctgcagcccggccaggccgtgcctgctggcagccacgtgcggctgaacctgcagacaggagagcgggaggccaagctgcagtatgaggacaagttcaggaacaacctgaagggcaagaggctggacatcaacaccaacacctacaccagccaggacctgaagagcgccctggccaagttcaaggagggcgctgagatggagagcagcaaggaggacaagatggacaatgcccaggacctgctgagctttggaggcctgcaggtggtgatcaatggcctgaacagcacagagcccctggtgaaggagtatgctgcctttgtgctgggcgccgccttcagcagcaaccccaaggtgcaggtggaggccatcgagggcggggccctgcagaagctgctggtgatcctgtag

SEQ ID NO: 212242 - DNA, 1386 bp, Artificial Sequence
  derived and/or modified sequence
atggccccccagagcctgcccagcagccggatggcccccctgggcatgctcctggggctgttaatggctgcgtgctttactttttgtctaagccaccaaaatctcaaagagttcgctctaacgaatcccgaaaaatccagcacaaaagaaaccgagagaaaggagaccaaagcggaagaggaactggacgctgaagtgctggaggtcttccacccgacgcatgagtggcaagcgctacaaccaggccaggccgttccagccggcagccacgtcaggctgaacctgcagactggtgagagggaagcaaagttgcagtatgaggacaaattccggaacaatctgaaggggaagagactcgatattaacactaacacatatacgtcccaggatcttaagagtgcccttgccaaatttaaggagggagccgaaatggaaagctccaaggaggataaagctaggcaggccgaggtcaagagactcttccgcccaatcgaggaactgaagaaggattttgacgagctgaacgtggtgattgagactgacatgcagatcatggtgaggctgatcaataagttcaacagttctagcagttcactggaagagaaaatcgccgcgttgtttgatctggagtactatgtccatcagatggataatgcccaggacttattatcatttggaggactccaggtcgtgataaatggcctgaactccaccgagcccctcgtcaaggagtatgccgcatttgtgctgggagcagctttctcgtccaatcccaaggtccaggtggaggcgattgaggggggcgccctgcaaaaactgctcgtgatcttagctaccgagcaaccgctcaccgcaaagaagaaagtgctctttgcgctgtgttctctccttcgacattttccctacgcacagcgtcagttcctgaagctcggcgggcttcaagttctgcgaaccctggtccaggaaaagggtaccgaagtgctcgcggttagagtcgttactttactgtacgacctcgtgaccgagaagatgttcgcggaggaagaagcagagcttacccaggaaatgtcaccagagaaattgcagcagtaccgccaggtccatcttttacccggcctctgggagcaggggtggtgcgagattacggcgcatttacttgcgttacccgagcatgatgcccgagagaaagtgcttcagacgctgggagtcttgctgaccacatgtcgagacagatacaggcaggatccacagttgggccgcacactcgcaagcctccaggccgagtatcaggtgctggccagccttgaattgcaggatggagaggatgaaggctatttccaggagctactcggcagtgtgaactccctgttgaaggagctgagatag

SEQ ID NO: 212243 - DNA, 1386 bp, Artificial Sequence
  derived and/or modified sequence
atggccccccagagcctgcccagcagccggatggcccccctgggcatgctcctcggcctgctgatggccgcctgctttaccttctgcctgagccaccagaacctcaaggaattcgctctaaccaatccagaaaagtcctctaccaaggagaccgagcgaaaagagaccaaagccgaagaggagttggatgcagaagttctggaggtctttcaccccacacatgagtggcaggctctgcagccgggacaggctgtgcctgcaggctcccatgtccgccttaacctacagaccggagagagggaggccaaactgcagtatgaagacaaattcaggaacaaccttaaagggaaacgactcgacatcaacacgaatacatatacttctcaagatctgaaatctgccctggctaagttcaaggagggagcggaaatggaatcctctaaggaagataaagcccggcaggcagaggtgaagcgactcttcaggcccattgaagagctcaagaaagacttcgacgagcttaatgtcgtgatcgaaacagatatgcagattatggtgagactgataaacaagtttaatagctcctcatcatccttggaggaaaaaatcgccgccctcttcgacctagaatattacgtacaccagatggacaatgctcaggatctgctaagcttcggcggtctgcaggttgtaattaacggcctcaacagtaccgagcctcttgtcaaggaatacgcagcatttgtgctaggggctgccttcagttctaatccaaaagtgcaggtcgaggccatcgagggcggcgctctgcagaagctgcttgttattctggccactgaacagcctctgacagcgaagaagaaagttctgttcgctctgtgttcccttttgcggcactttccttatgcccaacggcaatttctgaagctggggggtctgcaggtcttgcggacccttgtgcaagagaaaggcaccgaagtattggctgtcagagttgtcaccctcctctacgatctggtgaccgagaaaatgttcgcagaggaggaagccgaactgactcaggagatgagcccagagaagctgcagcagtatcgccaggtccacctgttacctgggctctgggagcaaggatggtgtgagatcacagcacatctgcttgcgctccctgagcacgacgcccgcgagaaggtgctgcagacactaggagtgcttcttaccacttgtagggaccggtatcgccaagacccacagttaggccgcacattagcttcgctacaagccgagtaccaggtgttggcttcactggagctgcaggacggagaggacgagggctactttcaggaactcctaggaagtgtgaattcactgctgaaggagctccgctag

SEQ ID NO: 212244 - DNA, 288 bp, Artificial Sequence
  derived and/or modified sequence
atggccccccagagcctgcccagcagccggatggcccccctgggcatgctcctcggtctactgatggctgcctgtttcaccttttgtttgagccatcaaaatctcaaagaattcgctctgacgaatccagagaaatcttctaccaaagagaccgagaggaaggaaaccaaggccgaagaagaacttgatgccgaagtactagaagtgtttcatcccacacatgagtggcaagcccttcaacccggacaagcagtgccagctggtagccatgtccgtctaaatctgtag

SEQ ID NO: 212245 - DNA, 492 bp, Artificial Sequence
  derived and/or modified sequence
atggccccccagagcctgcccagcagccggatggcccccctgggcatgctgctgggactccttatggctgcctgttttaccttctgcctttctcaccagaacctgaaagagttcgctctcacaaaccccgagaagtctagtactaaagagactgaaagaaaagaaacaaaggcagaggaggaattagacgctgaggtgcttgaagtgttccacccaacccacgaatggcaggccctgcagcctgggcaggctgtgccggccggtagccacgtgagactgaaccttcagaccggcgaacgggaagccaagctccagtatgaggataaatttcgcaacaacttaaaagggaaacgacttgacataaatactaatacctacacgagccaggatttgaagtcagcacttgctaagtttaaggagggtgccgaaatggaatcttcaaaagaggacaaagcccgacaggccgaggtaaaaaggctgtttaggccctag

SEQ ID NO: 212246 - DNA, 372 bp, Artificial Sequence
  derived and/or modified sequence
atggccccccagagcctgcccagcagccggatggcccccctgggcatgctgctgggcttgcttatggccgcgtgttttacgttttgtctgagccatcagaatctgaaggaatttgccctaacaaacccggaaaaaagcagtacaaaggaaactgaacggaaggaaactaaggcagaagaggagttggatgcagaggtgctggaggtgttccatcctacccatgagtggcaggccttgcaacctggtcaggctgtccctgccggttcccatgttagactcaatctacagaccggggaacgcgaggcgaagctgcagtatgaagacaaattccggaacaacctgaagggcaagcgacttgacatcaatacctag

SEQ ID NO: 212247 - DNA, 579 bp, Artificial Sequence
  derived and/or modified sequence
atggccgcctgcttcaccttctgcctgagccaccagaacctgaaggagtttgccttgaccaatcccgagaagagctccactaaggaaactgagcggaaggagacaaaggccgaggaggagctagacgccgaagtccttgaggtttttcatcctactcacgagtggcaagcactccaacctgggcaggcggtccctgcaggaagtcacgtgaggctgaaccttcagactggcgaacgggaagctaaactacagtatgaggacaaattcagaaataacctgaaaggcaagcggctcgacatcaatactaatacttacacctcccaggatcttaagtctgccctggccaaatttaaagagggcgccgaaatggaatcttcaaaagaggacaagatggacaacgcccaggacctgctcagctttggcgggctccaagttgtcataaatggtcttaatagtacggaaccccttgtaaaagagtacgcagcattcgtgctaggcgccgcattctcctccaaccccaaagttcaggtagaagcgatagaggggggtgcgctacaaaagttattagtgattttgtag

SEQ ID NO: 212248 - DNA, 1386 bp, Artificial Sequence
  derived and/or modified sequence
atggccccacagagtctaccaagttcacgcatggcccctctggggatgctgctggggctgctcatggctgcctgtttcaccttttgtctttctcaccagaacctgaaggagttcgccttgaccaaccccgaaaagtctagtacaaaagagaccgagcgcaaggagaccaaggccgaggaagagctggacgctgaggttctggaagtgttccacccaacacatgagtggcaagcactccagccgggtcaagcagtgcccgctggcagtcacgtgaggctcaatctgcagaccggggagcgagaggcaaaacttcagtatgaagacaagtttcgtaacaacctgaagggaaaacgcttggacataaacactaatacctatactagtcaggatctcaaaagcgccctggctaagttcaaagaaggcgctgaaatggaaagtagtaaagaggataaagcgcgtcaggctgaggtaaaaagattgttcagacctattgaggagcttaagaaggactttgatgagctgaacgtggtgatcgagacggacatgcagatcatggtgcggttgatcaataagtttaacagtagctcctcatcacttgaggagaaaatcgcggcactattcgatttggagtattatgtgcaccagatggacaacgctcaagatctgctgagctttggaggactacaggtcgtaataaacgggctgaacagcactgagccgctggtgaaggagtatgctgccttcgtgctcggcgcagccttctcctcaaaccccaaggtgcaggttgaagccattgagggaggagctctccagaagctgctggttattctggccactgaacagcctcttactgccaagaagaaggtgctttttgccttatgtagcctgctcagacatttcccctacgcacagcgacagttcctgaaattggggggacttcaagttctccgcacactcgtccaagagaagggcacggaggtgctggccgtgcgagtggtgaccctgttgtatgacctggtgaccgaaaagatgttcgctgaagaagaagctgaactgacccaggagatgagccctgaaaaactccagcagtatcgccaagtacacctgctgccgggtttgtgggaacaaggctggtgcgaaatcacagcccacctgctggctttaccagagcatgatgccagagaaaaagtgctccagactttgggggtactgctcaccacctgcagagacagatatcgacaagatccacaactgggccgaacactggcctccctgcaggccgagtatcaggtgctagcttcactcgagttacaggacggagaggacgaggggtattttcaggagctattggggtcagttaacagtctgcttaaagaactacggtag

SEQ ID NO: 212249 - DNA, 1386 bp, Artificial Sequence
  derived and/or modified sequence
atggcaccccaaagtctgccgtcatctagaatggcacccctcggtatgctcctggggctgcttatggctgcatgctttaccttttgcctgagtcaccagaacctcaaggagttcgctctgacgaatccggaaaaatcttcaacgaaggaaactgagagaaaagaaacaaaggcagaggaggagttagacgccgaagtcctggaagtgtttcatcctacgcacgaatggcaggcgctccaaccaggccaagcagtcccagccggttcacacgtgcgccttaatctccagacaggagagcgggaagccaagctgcagtacgaggataaattccgtaataaccttaaaggcaagcggcttgacatcaacactaacacttacacatcccaggatctgaagtctgcccttgctaagtttaaagagggagccgagatggaaagtagcaaggaggataaagctaggcaagctgaggttaaaaggttgtttcgcccaatcgaggagttgaagaaagatttcgacgagttgaatgtggtcatcgagacagatatgcagattatggtccgtcttatcaataaattcaatagctcttcatcaagtctggaggagaaaattgcagcactctttgacttggagtattacgtgcatcagatggataacgctcaggaccttctgtctttcggcggtctgcaggtggtcataaatggtctgaactcaaccgaaccactagtcaaagaatatgccgcattcgtcctgggagcagcattctcctcaaacccaaaagtgcaggtcgaggctatcgagggtggtgcgctgcagaagctgctagtcatcttggcaacagagcagcctttaactgcgaagaagaaggtgctctttgccctgtgctcactgttgcgccactttccctatgcccagaggcagttcttaaagctcggaggattacaggttctgagaactctggtgcaggagaaaggcaccgaggtgttagcagtgagggtcgtgacactgttatatgacctagtcacggagaagatgtttgccgaggaggaagctgaactgacccaggagatgagcccagaaaagcttcagcaataccggcaggtgcacttgcttccaggcctgtgggagcaaggctggtgcgagatcaccgcccatctgcttgcactgccagagcacgatgctcgagaaaaagtactccagacacttggagtcctgctaacaacatgtcgggatcggtatcgacaggacccacaactcgggagaacccttgcgtccctccaggctgaatatcaagttctggcttcccttgaactgcaggatggtgaggacgagggatatttccaggagctcctgggaagcgtgaattcactgctaaaggaacttcggtag

SEQ ID NO: 212250 - DNA, 288 bp, Artificial Sequence
  derived and/or modified sequence
atggcccctcaaagtctgccctccagcagaatggcgccactgggaatgcttttggggctgctgatggcagcttgtttcaccttttgcctgtcccaccaaaatctgaaagagtttgcacttacaaaccccgaaaagtctagcaccaaagagacagagcgaaaggaaaccaaagcggaggaggagctcgacgcagaggtgctggaagtgttccaccctactcatgaatggcaggccctgcagccaggccaagctgtgcccgcaggatcccacgtgcgactgaacctctag

SEQ ID NO: 212251 - DNA, 492 bp, Artificial Sequence
  derived and/or modified sequence
atggcacctcagtccctgccgtcctcccgtatggcgcctctggggatgctgcttggcttgctcatggcagcctgcttcactttctgcctgtcacaccagaacttaaaagagtttgcattaacaaaccccgagaaatctagtacaaaagagactgaaagaaaggaaacaaaagctgaggaggagctcgacgccgaggtgctggaggttttccaccctacacacgagtggcaggcattacagccgggtcaggccgttcctgctggctctcatgtccgtctgaatctacagaccggtgaaagggaggcgaaactccaatatgaagataagtttcgcaataacctgaaaggtaaacgccttgatatcaacacgaacacctatacatcccaagatttaaaatccgctctcgcgaaatttaaagagggagcggagatggagtcgtcaaaagaagataaggcccgtcaggccgaggtgaaaagactcttccggccttag

SEQ ID NO: 212252 - DNA, 372 bp, Artificial Sequence
  derived and/or modified sequence
atggccccacaatctctccctagctccaggatggcccctctgggtatgctgctcggcttgttaatggcagcctgctttacattctgtttgtctcatcaaaacctgaaggaattcgcactaaccaatccagaaaaatcttctaccaaggagacggaaagaaaggaaacgaaggccgaggaggagcttgatgccgaggtgctggaggtattccaccctacccacgaatggcaggcgctgcagcccggacaggctgtaccagccggaagtcacgttagactgaatctccagacaggcgaaagggaggcaaaactacaatacgaggataaatttcggaacaatctgaaaggcaagcgcttggacattaatacgtag

SEQ ID NO: 212253 - DNA, 579 bp, Artificial Sequence
  derived and/or modified sequence
atggcagcatgctttactttctgcctgtctcaccagaacttgaaggagttcgcacttactaatcccgagaaatctagtacaaaggaaaccgagagaaaagagactaaagcagaggaagagttggatgccgaggtgctcgaagtgtttcatcctacgcatgagtggcaggccctgcaaccgggtcaggcggtacccgctggatcccatgtgaggttgaacctgcagaccggcgagagagaggccaaactgcaatatgaagacaagttccgcaacaatttaaaaggtaagagattagacatcaatacgaacacgtataccagccaggacttgaaatccgccctggccaagtttaaagagggtgctgagatggaatcctccaaggaggataagatggataacgcccaggaccttctatcattcggtggcttgcaagtcgtaattaacggtctaaacagcacagagcccttagtcaaggagtacgccgcttttgtgctgggcgctgcattctcttccaaccctaaggtacaagtcgaggccatcgaaggtggggcattacagaagttgctcgtgattttgtag

SEQ ID NO: 212254 - DNA, 1386 bp, Artificial Sequence
  derived and/or modified sequence
atggccccccagagcctgcccagcagcagaatggcccccctgggcatgctgctgggcctgctgatggccgcctgcttcaccttctgcctgagccaccagaacctgaaggagttcgccctgaccaaccccgagaagagcagcaccaaggagaccgagagaaaggagaccaaggccgaggaggagctggacgccgaggtgctggaggtgttccaccccacccacgagtggcaggccctgcagcccggccaggccgtgcccgccggcagccacgtgagactgaacctgcagaccggcgagagagaggccaagctgcagtacgaggacaagttcagaaacaacctgaagggcaagagactggacatcaacaccaacacctacaccagccaggacctgaagagcgccctggccaagttcaaggagggcgccgagatggagagcagcaaggaggacaaggccagacaggccgaggtgaagagactgttcagacccatcgaggagctgaagaaggacttcgacgagctgaacgtggtgatcgagaccgacatgcagatcatggtgagactgatcaacaagttcaacagcagcagcagcagcctggaggagaagatcgccgccctgttcgacctggagtactacgtgcaccagatggacaacgcccaggacctgctgagcttcggcggcctgcaggtggtgatcaacggcctgaacagcaccgagcccctggtgaaggagtacgccgccttcgtgctgggcgccgccttcagcagcaaccccaaggtgcaggtggaggccatcgagggcggcgccctgcagaagctgctggtgatcctggccaccgagcagcccctgaccgccaagaagaaggtgctgttcgccctgtgcagcctgctgagacacttcccctacgcccagagacagttcctgaagctgggcggcctgcaggtgctgagaaccctggtgcaggagaagggcaccgaggtgctggccgtgagagtggtgaccctgctgtacgacctggtgaccgagaagatgttcgccgaggaggaggccgagctgacccaggagatgagccccgagaagctgcagcagtacagacaggtgcacctgctgcccggcctgtgggagcagggctggtgcgagatcaccgcccacctgctggccctgcccgagcacgacgccagagagaaggtgctgcagaccctgggcgtgctgctgaccacctgcagagacagatacagacaggacccccagctgggcagaaccctggccagcctgcaggccgagtaccaggtgctggccagcctggagctgcaggacggcgaggacgagggctacttccaggagctgctgggcagcgtgaacagcctgctgaaggagctgagatag

SEQ ID NO: 212255 - DNA, 288 bp, Artificial Sequence
  derived and/or modified sequence
atggccccccagagcctgcccagcagcagaatggcccccctgggcatgctgctgggcctgctgatggccgcctgcttcaccttctgcctgagccaccagaacctgaaggagttcgccctgaccaaccccgagaagagcagcaccaaggagaccgagagaaaggagaccaaggccgaggaggagctggacgccgaggtgctggaggtgttccaccccacccacgagtggcaggccctgcagcccggccaggccgtgcccgccggcagccacgtgagactgaacctgtag

SEQ ID NO: 212256 - DNA, 492 bp, Artificial Sequence
  derived and/or modified sequence
atggccccccagagcctgcccagcagcagaatggcccccctgggcatgctgctgggcctgctgatggccgcctgcttcaccttctgcctgagccaccagaacctgaaggagttcgccctgaccaaccccgagaagagcagcaccaaggagaccgagagaaaggagaccaaggccgaggaggagctggacgccgaggtgctggaggtgttccaccccacccacgagtggcaggccctgcagcccggccaggccgtgcccgccggcagccacgtgagactgaacctgcagaccggcgagagagaggccaagctgcagtacgaggacaagttcagaaacaacctgaagggcaagagactggacatcaacaccaacacctacaccagccaggacctgaagagcgccctggccaagttcaaggagggcgccgagatggagagcagcaaggaggacaaggccagacaggccgaggtgaagagactgttcagaccctag

SEQ ID NO: 212257 - DNA, 372 bp, Artificial Sequence
  derived and/or modified sequence
atggccccccagagcctgcccagcagcagaatggcccccctgggcatgctgctgggcctgctgatggccgcctgcttcaccttctgcctgagccaccagaacctgaaggagttcgccctgaccaaccccgagaagagcagcaccaaggagaccgagagaaaggagaccaaggccgaggaggagctggacgccgaggtgctggaggtgttccaccccacccacgagtggcaggccctgcagcccggccaggccgtgcccgccggcagccacgtgagactgaacctgcagaccggcgagagagaggccaagctgcagtacgaggacaagttcagaaacaacctgaagggcaagagactggacatcaacacctag

SEQ ID NO: 212258 - DNA, 579 bp, Artificial Sequence
  derived and/or modified sequence
atggccgcctgcttcaccttctgcctgagccaccagaacctgaaggagttcgccctgaccaaccccgagaagagcagcaccaaggagaccgagagaaaggagaccaaggccgaggaggagctggacgccgaggtgctggaggtgttccaccccacccacgagtggcaggccctgcagcccggccaggccgtgcccgccggcagccacgtgagactgaacctgcagaccggcgagagagaggccaagctgcagtacgaggacaagttcagaaacaacctgaagggcaagagactggacatcaacaccaacacctacaccagccaggacctgaagagcgccctggccaagttcaaggagggcgccgagatggagagcagcaaggaggacaagatggacaacgcccaggacctgctgagcttcggcggcctgcaggtggtgatcaacggcctgaacagcaccgagcccctggtgaaggagtacgccgccttcgtgctgggcgccgccttcagcagcaaccccaaggtgcaggtggaggccatcgagggcggcgccctgcagaagctgctggtgatcctgtag

SEQ ID NO: 212259 - protein, 585 aa, Artificial Sequence
  derived and/or modified sequence
MHTPPALPRRFQGGGRVRTPGSHRQGKDNLERDPSGGCVPDFLPQAQDSNHFIMESLFCESSGDSSLEKEFLGAPVGPSVSTPNSQHSSPSRSLSANSIKVEMYSDEESSRLLGPDERLLEKDDSVIVEDSLSEPLGYCDGSGPEPHSPGGIRLPNGKLKCDVCGMVCIGPNVLMVHKRSHTGERPFHCNQCGASFTQKGNLLRHIKLHSGEKPFKCPFCNYACRRRDALTGHLRTHSVSSPTVGKPYKCNYCGRSYKQQSTLEEHKERCHNYLQSLSTEAQALAGQPGDEIRDLEMVPDSMLHSSSERPTFIDRLANSLTKRKRSTPQKFVGEKQMRFSLSDLPYDVNSGGYEKDVELVAHHSLEPGFGSSLAFVGAEHLRPLRLPPTNCISELTPVISSVYTQMQPLPGRLELPGSREAGEGPEDLADGGPLLYRPRGPLTDPGASPSNGCQDSTDTESNHEDRVAGVVSLPQGPPPQPPPTIVVGRHSPAYAKEDPKPQEGLLRGTPGPSKEVLRVVGESGEPVKAFKCEHCRILFLDHVMFTIHMGCHGFRDPFECNICGYHSQDRYEFSSHIVRGEHKVG

SEQ ID NO: 212260 - DNA, 5506 bp, Artificial Sequence
  derived and/or modified sequence
gaagctgtccgtgtcctgggccccatgacctctggggccttggcttccccagctggcagaggattgggccttccctagggccccccctttctccctcccacccgcaggcccatccatctctctctctctctcttgcacacactcttgcctctctcaggcatttgttgtgcagttcctctttgtctgctgggcacgaggggcaacagcatctgcctttccctccctgtgcacacacccaccacccacccccttcactgtcttggaaaagggatgctgtagcctagcatctcccccactatatacacatatacattctctccagccccctccccaagcacatccaagcgtgctctcccctctccttctctccctctctctctctctctctctcacacacacacacacacacacactcaacacacatacaccctgggctgagctgctcttgctggctgcagccgtgggcctctgctcaccgtgccgctgctgctgcctgcgaaatgacggcggttcccctcacttccaggaatccacgcttcctggaaggtgagtggctgggctcacccctgcctgccactgagacgcagacatgcatacaccacccgcactccctcgccgtttccaaggcggcggccgcgttcgcaccccagggtctcaccggcaagggaaggataatctggagagggatccctcaggagggtgtgttccggatttcttgcctcaggcccaagactccaaccattttataatggaatctttattttgtgaaagtagcggggactcatctctggagaaggagttcctcggggccccagtggggccctcggtgagcacccccaacagccagcactcttctcctagccgctcactcagtgccaactccatcaaggtggagatgtacagcgatgaggagtcaagcagactgctggggccagatgagcggctcctggaaaaggacgacagcgtgattgtggaagattcattgtctgagcccctgggctactgtgatgggagtgggccagagcctcactcccctgggggcatccggctgcccaatggcaagctcaagtgtgacgtctgcggcatggtctgtattggacccaacgtgctcatggtgcacaagcgcagtcacactggtgaaaggcccttccattgcaaccagtgtggtgcctccttcacccagaaggggaacctgctgcgccacatcaagctgcactctggggagaagccctttaaatgtcccttctgcaactatgcctgccgccggcgtgatgcactcactggtcacctccgcacacactcagtctcctctcccacagtgggcaagccctacaagtgtaactactgtggccggagctacaaacagcagagtaccctggaggagcacaaggagcggtgccataactacctacagagtctcagcactgaagcccaagctttggctggccaaccaggtgacgaaatacgtgacctggagatggtgccagactccatgctgcactcatcctctgagcggccaactttcatcgatcgtctggccaatagcctcaccaaacgcaagcgttccacaccccagaagtttgtaggcgaaaagcagatgcgcttcagcctctcagacctcccctatgatgtgaactcgggtggctatgaaaaggatgtggagttggtggcacaccacagcctagagcctggctttggaagttccctggcctttgtgggtgcagagcatctgcgtcccctccgccttccacccaccaattgcatctcagaactcacgcctgtcatcagctctgtctacacccagatgcagcccctccctggtcgactggagcttccaggatcccgagaagcaggtgagggacctgaggacctggctgatggaggtcccctcctctaccggccccgaggccccctgactgaccctggggcatcccccagcaatggctgccaggactccacagacacagaaagcaaccacgaagatcgggttgcgggggtggtatccctccctcagggtcccccaccccagccacctcccaccattgtggtgggccggcacagtcctgcctacgccaaagaggaccccaagccacaggaggggttattgcggggcaccccaggcccctccaaggaagtgcttcgggtggtgggcgagagtggtgagcctgtgaaggccttcaagtgtgagcactgccgtatcctcttcctggaccacgtcatgttcactatccacatgggctgccatggcttcagagacccttttgagtgcaacatctgtggttatcacagccaggaccggtacgaattctcttcccacattgtccggggggagcataaggtgggctagcaacctctccctctctcctcagtccaccactccactgccctgactacaggcattgatccctgtccccaccatttcccaaggagttttgctttgtagccctcactactggccacctgacctcacacctgaccctgacccctcctcacctattctcttcctctatcctgaccgatgtaagcattgtgatgaaacagatcttttgcttatgtttttcctttttatcttctctcatcccagcatactgagttatttattaattagttgatttatttttgcctttttaaattttaacttatatcagtcacttgccactcccccaccctcctgtccacaactcctttccactttaggccaatttttctctcttagatcttccagcagccccaggggtaggaagctcctcttagtactaagagacttcaagcttcttgctttaagtcctcaccctttacattatctaattcttcagttttgatgctgatacctgcccccggccctaccttagctctgtggcattatatctcctctctgggactcttcaacctggtactccatacctcttgtgccctctcactttaggcagcttgcactattcttgaatgaatgaagaattatttcctcatttggaagtaggagggactgaagaaattctccccaggcactgtgggactgagagtcctattcccctagtaataggtcatattcccctagtaatatgagttctcaaagcctacattcaggatctccctctaggatgtgatagatctggtccctctccttgaactacccctccacacgctctagtcccttcaacctaccggtctattaagtggtggcttttctctccttggagtgccccaattttatattctcaggggccaaggctaggtctgcaaccctctgtctctgacagattgggagccacaggtgcctaattgggaaccagggcatgggaaaggagtgggtcaaaattcttctctttctcctccacctctcaaacttcttcactatagtgaccttcctaggctctcaggggctccttcagtccccatcctatgagaaactagtgggttgctgcctgatgacaaggggttgtttcagcccctcagtcatgctgccttctgctgctccctcccagcaggattcaccctctcattcccgggctcctgggccctgttcttaggatcagtggcagggagaaacgggtatctcttttctctcttctaattttcagtataaccaaaaattatcccagcatgagcacgggcacgtgcccttcaccccattccacccttgttccagcaagactgggatgggtacaactgaactggggtcttcctttactacccccttctacactcagctcccagacacagggtaggaggggggactgctggctactgcagagacccttggctatttgagtaacctaggattagtgagaaggggcagaaggagatacaactccactgcaagtggaggtttctttctacaagagttttctgcccaaggccacagccatcccactctctgcttccttgagattcaaaccaaaggctgtttttctatgtttaaagaaaaaaaaaagtaaaaaccaaacacaacacctcacaagttgtaactcttggtccttctctctctccttttctcttcccttccttccccttccatctttctttccacatgtcctttccttattggctcttttacctcctacttttctcactccctatcagggatattttggggggggatggtaaagggtgggctaaggaacagaccctgggattagggccttaagggctctgagaggagtctaccttgccttcttatgggaagggagaccctaaaaaactttctcctctttgtcctcctttttctcccccactctgaggtttccccaagagaaccagattggcagggagaagcattgtggggcaattgttcctccttgacaatgtagcaataaatagatgctgccaagggcagaaaatggggaggttagctcagagcagagtagtctctagagaaaggaagaatcctcaacggcaccctggggtgctagctcctttttagaatgtcagcagagctgagattaatatctgggcttttcctgaactattctggttattgagcccttcctgttagacctaccgcctcccacctcttctgtgtctgctgtgtatttggtgacacttcataaggactagtcccttctggggtatcagagccttagggtgcccccatccccttccccagtcaactgtggcacctgtaacctcccggaacatgaaggactatgctctgaggctatactctgtgcccatgagagcagagactggaagggcaagaccaggtgctaaggaggggagagggggcatcctgtctctctccagaccatcactgcactttaaccagggtcttaggtacaaaatcctacttttcagagccttccagctctggaacctcaaacatcctcatgctctctcccagctccttttgcataaaaaaaaaagtaaagaaaaagaaaaaaaaatacacacacactgaaacccacatggagaaaagaggtgtttccttttatattgctattcaaaatcaataccaccaacaaaatatttctaagtagacacttttccagacctttgtttttttgtgtcagtgtccaagctgcagataggattttgtaatacttctggcagcttctttccttgtgtacataatatatatatatacatatatatatatatttttaatcagaagttatgaagaacaaaaagaaaaaataaacacagaagcaagtgcaataccacctctcttctccctctctcctagggtttcctttgtagcctatgtttggtgtctcttttgacctttaccccttcacctcctcctctcttcttctgattcccctcccccccttttttaaagagtttttctcctttctcaaggggagttaaactagcttttgagacttattgcaaagcattttgtatatgtaatatattgtaagtaaatatttgtgtaacggagatatactactgtaagttttgtactgtactggctgaaagtctgttataaataaacatgagtaatttaacaccaaaaaaaaaaaaaaaaaaaaaaaaaaaaaaaaaaaaaaaaaaaaaaaaaaaaaaa

SEQ ID NO: 212261 - DNA, 1758 bp, Artificial Sequence
  derived and/or modified sequence
atgcacactccgcccgcgctcccgagaaggtttcagggaggcggcagagtccgtacccccggttctcaccggcaagggaaggacaacctggagcgagacccaagtggaggctgtgtccctgacttcctcccacaggcccaggactcgaaccatttcatcatggaaagcttgttttgtgagagttccggagatagttcccttgaaaaagagttccttggagccccggtggggccatccgtgtccacgccaaactcacagcattcatcgccttctaggagtctgtcagcaaatagcatcaaagtggagatgtactccgatgaagaaagttctcggttattaggccccgatgagaggttgctcgagaaagacgattctgtgatcgtggaagatagcttatccgaacccctgggttattgtgatggttcaggtcccgagcctcactcccccggcggcattcgactgcccaatggcaaacttaagtgcgacgtttgcggaatggtttgtataggtcccaacgtactcatggttcataagagatctcataccggggagaggccttttcactgcaatcagtgtggagccagcttcacacagaagggaaatctccttaggcatataaagttgcactcaggagagaagcctttcaaatgtcctttttgcaattatgcatgtcggagaagggacgccctcacgggacacctcagaacacacagtgtttcatctcccacggtggggaaaccctataagtgtaactattgtggcagaagttacaaacaacaatcgactctggaggaacacaaagaaaggtgtcacaattacctgcagtcgctgtccacagaggctcaggcgctcgcaggtcagcctggagatgaaatccgagacctggagatggtgcccgattccatgctccactcatcctcagagcggcctacctttatcgaccggctggcgaattctctgaccaagagaaaacgctctactccgcagaagttcgtgggggagaaacaaatgcggttctccttaagtgatctgccttatgacgttaatagtgggggctatgaaaaggacgtggaattggtggcgcatcatagcctagaacccggatttgggagtagtctggccttcgtgggcgcagagcaccttcgcccgttgcggctgccacctaccaattgcatttccgagctcacaccagtaatttcctccgtgtacacacagatgcagcccctgcccggcaggttggagttgcctggctccagggaagccggagaaggaccagaggatttggcagacggcggaccgctcctttacaggccaagaggtcccttaacagatccaggggcaagcccatcaaatggctgccaagactctacagacaccgaatcaaaccatgaggacagggtagccggggttgtgagcctgccccaaggaccgcctccacagcctccaccgacaatcgtcgttggacggcatagccccgcttacgcaaaagaggatccaaagccacaggaaggtttgctccgcgggactcctgggcctagcaaagaggtgttgcgggtggtgggcgagagcggcgaaccggttaaggcattcaaatgtgaacactgccgaatcctctttctggaccatgtcatgtttacgatccacatgggctgccacggcttccgtgacccctttgaatgtaacatttgtggctaccatagccaggatagatatgagttctctagccacattgtccggggcgagcataaagtgggctag

SEQ ID NO: 212262 - DNA, 1452 bp, Artificial Sequence
  derived and/or modified sequence
atgtactcggatgaggaatcatctcggctattaggacctgacgaacggctacttgagaaagatgattctgtaatcgtcgaagactctctttccgaaccgctcggatattgtgatggttccggcccggaacctcactcccctgggggcattaggctgcccaatggcaagctaaagtgtgacgtatgcggaatggtttgcatcggacctaatgtgcttatggttcacaagaggtcccatacaggagagaggcccttccactgtaaccagtgcggggctagtttcacccagaaaggaaatttactgcgccatattaagctgcatagcggagaaaagccttttaaatgtcctttctgtaattatgcatgtcgccgaagagatgccctgaccggacacctcagaacccacagcgtgtcatctccaaccgtcgggaaaccatataagtgtaactactgtggccggagctacaaacagcagtcgaccctggaggagcacaaggagcggtgtcataattacctacagtccctctcaaccgaggcacaggccctcgccggacagcccggggacgaaattagggatctagagatggtacccgacagcatgctccactcatcttcggagaggcctacattcattgatcgactagctaattccctgactaaacgcaagcgaagtaccccccaaaagttcgtaggggagaaacagatgagattctcgctctctgacctcccttacgatgttaactcaggaggctacgagaaggatgtggagctggttgctcaccattctttggaacctggattcggttcctccctggcctttgtcggagcggagcacctgagaccactcaggcttccccccaccaattgcataagtgaactaacccctgtgatctcgtcagtctatacccaaatgcaacccctgccaggtcgcctggaactgcccggctctcgtgaggccggagaaggcccggaggaccttgcagatgggggacctttactctatcggccacgaggcccactcaccgaccccggcgcaagcccgagcaatggctgccaggatagtaccgatactgagagtaaccatgaggaccgcgtggccggcgtcgtgagcttgcctcaaggacctcctccacaaccccccccaacaatcgtggtgggtcgtcactcgccggcatacgccaaagaggaccccaaacctcaagaagggctgcttcgtggaacaccaggtccatcgaaggaggtgctcagagttgtgggggagtccggtgaacccgtgaaagcatttaagtgcgagcattgccgcatactgttcctggatcatgtgatgttcacaattcatatggggtgccatggttttagggatccattcgagtgtaacatttgcggatatcacagtcaagaccggtacgagttcagctcgcatatcgtgagaggagaacacaaagtggggtag

SEQ ID NO: 212263 - DNA, 1758 bp, Artificial Sequence
  derived and/or modified sequence
atgcacacaccccccgcccttcctaggagattccagggagggggacgcgttagaacacctgggtcccatcggcagggcaaggataacctagagcgcgacccaagcggaggttgtgtgccagatttcctgccccaggctcaggatagcaaccacttcatcatggaaagtctgttttgcgagtcatccggcgacagctcattagagaaggaatttctgggggcccccgtaggcccaagcgttagcacacctaacagccagcattcctctccaagcagaagtttgagcgcaaacagcattaaggtcgaaatgtactctgacgaagaatcctcccggcttctcgggcccgacgaaaggctactcgagaaggatgattctgtcatagtggaagattctctttctgaacctcttgggtattgtgatgggagcggacctgagccccacagccctggcggtatccgactcccgaacgggaaactgaagtgcgacgtgtgtggcatggtatgcattggccccaatgtgcttatggtacacaaaagatcgcacaccggcgagcgcccctttcattgcaatcaatgtggtgcatcatttacccagaagggaaacctcttgaggcacatcaagctccactcaggggaaaagccattcaagtgtcccttttgtaattacgcatgtcggcgtagggacgctttaaccggccacttgaggacccactcagtgtcatcccccactgtgggtaaaccatacaagtgtaattattgcgggcggagctacaagcagcagtcaacactcgaggaacacaaggagcgttgtcacaactacctgcagtcacttagcacggaagcccaagctctggctgggcagccgggggacgagattcgcgatctggagatggtgcccgatagcatgctacactcaagctctgagagacccacatttatcgacaggctcgccaactccctaacaaagagaaagcggagcactccgcaaaagttcgtcggggaaaaacagatgcggttctccctgtccgatttgccgtacgatgtgaatagcggcgggtacgagaaagatgtggaactcgttgctcatcactctttggagccaggtttcggatcctcattagccttcgtgggggccgagcacctgcgcccacttcggctgccgcccacgaattgtatctctgaactgacacccgtgatctccagcgtgtatacccaaatgcagccgcttccaggacggctggagttacccggctcccgagaggcaggggagggacctgaagaccttgcggatggaggaccactgctgtataggccacgcgggcctctgactgacccgggcgcctcccctagtaacgggtgtcaggattcaaccgacactgaatcaaatcacgaggaccgggtggccggtgtggtgtctctgccccagggtccgcctccgcagccacctccaacgatcgtggtaggcagacactcccccgcctatgcaaaagaagaccctaagccccaagagggattgcttcggggcacccccggcccatccaaagaagtgctgcgagtcgtgggtgagagcggagaacccgtaaaagctttcaagtgtgaacactgccggatactctttctggaccacgtcatgttcactatccacatgggctgtcacggcttccgagacccttttgaatgcaacatttgtggctatcacagtcaggacagatatgagtttagttctcatatcgtgcggggcgaacacaaagtgggctag

SEQ ID NO: 212264 - DNA, 33 bp, Artificial Sequence
  derived and/or modified sequence
atgcacacccctccagccctgccgcggaggtag

SEQ ID NO: 212265 - DNA, 5229 bp, Artificial Sequence
  derived and/or modified sequence
cctcgcctccctctcccccaacactgtcccctctccccaacccctcacagcctgcgcgcgcgcggagacacctcagtctacatggggaggacagagaagcgcaaagaacaagagaaaagatgcatccatctgagatctaaaaggagacaatgagaatctctttaaaatggacatagaagactgcaatggccgctcctatgtgtctgtaggaccaatgaaggaattattggcatgcactaaaggagatagcaagatgggtcagacacacatatgagagtcattggcaacacccgggtaatgtaaggaatccacgcttcctggaaggtgagtggctgggctcacccctgcctgccactgagacgcagacatgcatacaccacccgcactccctcgccgtttccaaggcggcggccgcgttcgcaccccagggtctcaccggcaagggaaggataatctggagagggatccctcaggagggtgtgttccggatttcttgcctcaggcccaagactccaaccattttataatggaatctttattttgtgaaagtagcggggactcatctctggagaaggagttcctcggggccccagtggggccctcggtgagcacccccaacagccagcactcttctcctagccgctcactcagtgccaactccatcaaggtggagatgtacagcgatgaggagtcaagcagactgctggggccagatgagcggctcctggaaaaggacgacagcgtgattgtggaagattcattgtctgagcccctgggctactgtgatgggagtgggccagagcctcactcccctgggggcatccggctgcccaatggcaagctcaagtgtgacgtctgcggcatggtctgtattggacccaacgtgctcatggtgcacaagcgcagtcacactggtgaaaggcccttccattgcaaccagtgtggtgcctccttcacccagaaggggaacctgctgcgccacatcaagctgcactctggggagaagccctttaaatgtcccttctgcaactatgcctgccgccggcgtgatgcactcactggtcacctccgcacacactcagtctcctctcccacagtgggcaagccctacaagtgtaactactgtggccggagctacaaacagcagagtaccctggaggagcacaaggagcggtgccataactacctacagagtctcagcactgaagcccaagctttggctggccaaccaggtgacgaaatacgtgacctggagatggtgccagactccatgctgcactcatcctctgagcggccaactttcatcgatcgtctggccaatagcctcaccaaacgcaagcgttccacaccccagaagtttgtaggcgaaaagcagatgcgcttcagcctctcagacctcccctatgatgtgaactcgggtggctatgaaaaggatgtggagttggtggcacaccacagcctagagcctggctttggaagttccctggcctttgtgggtgcagagcatctgcgtcccctccgccttccacccaccaattgcatctcagaactcacgcctgtcatcagctctgtctacacccagatgcagcccctccctggtcgactggagcttccaggatcccgagaagcaggtgagggacctgaggacctggctgatggaggtcccctcctctaccggccccgaggccccctgactgaccctggggcatcccccagcaatggctgccaggactccacagacacagaaagcaaccacgaagatcgggttgcgggggtggtatccctccctcagggtcccccaccccagccacctcccaccattgtggtgggccggcacagtcctgcctacgccaaagaggaccccaagccacaggaggggttattgcggggcaccccaggcccctccaaggaagtgcttcgggtggtgggcgagagtggtgagcctgtgaaggccttcaagtgtgagcactgccgtatcctcttcctggaccacgtcatgttcactatccacatgggctgccatggcttcagagacccttttgagtgcaacatctgtggttatcacagccaggaccggtacgaattctcttcccacattgtccggggggagcataaggtgggctagcaacctctccctctctcctcagtccaccactccactgccctgactacaggcattgatccctgtccccaccatttcccaaggagttttgctttgtagccctcactactggccacctgacctcacacctgaccctgacccctcctcacctattctcttcctctatcctgaccgatgtaagcattgtgatgaaacagatcttttgcttatgtttttcctttttatcttctctcatcccagcatactgagttatttattaattagttgatttatttttgcctttttaaattttaacttatatcagtcacttgccactcccccaccctcctgtccacaactcctttccactttaggccaatttttctctcttagatcttccagcagccccaggggtaggaagctcctcttagtactaagagacttcaagcttcttgctttaagtcctcaccctttacattatctaattcttcagttttgatgctgatacctgcccccggccctaccttagctctgtggcattatatctcctctctgggactcttcaacctggtactccatacctcttgtgccctctcactttaggcagcttgcactattcttgaatgaatgaagaattatttcctcatttggaagtaggagggactgaagaaattctccccaggcactgtgggactgagagtcctattcccctagtaataggtcatattcccctagtaatatgagttctcaaagcctacattcaggatctccctctaggatgtgatagatctggtccctctccttgaactacccctccacacgctctagtcccttcaacctaccggtctattaagtggtggcttttctctccttggagtgccccaattttatattctcaggggccaaggctaggtctgcaaccctctgtctctgacagattgggagccacaggtgcctaattgggaaccagggcatgggaaaggagtgggtcaaaattcttctctttctcctccacctctcaaacttcttcactatagtgaccttcctaggctctcaggggctccttcagtccccatcctatgagaaactagtgggttgctgcctgatgacaaggggttgtttcagcccctcagtcatgctgccttctgctgctccctcccagcaggattcaccctctcattcccgggctcctgggccctgttcttaggatcagtggcagggagaaacgggtatctcttttctctcttctaattttcagtataaccaaaaattatcccagcatgagcacgggcacgtgcccttcaccccattccacccttgttccagcaagactgggatgggtacaactgaactggggtcttcctttactacccccttctacactcagctcccagacacagggtaggaggggggactgctggctactgcagagacccttggctatttgagtaacctaggattagtgagaaggggcagaaggagatacaactccactgcaagtggaggtttctttctacaagagttttctgcccaaggccacagccatcccactctctgcttccttgagattcaaaccaaaggctgtttttctatgtttaaagaaaaaaaaaagtaaaaaccaaacacaacacctcacaagttgtaactcttggtccttctctctctccttttctcttcccttccttccccttccatctttctttccacatgtcctttccttattggctcttttacctcctacttttctcactccctatcagggatattttggggggggatggtaaagggtgggctaaggaacagaccctgggattagggccttaagggctctgagaggagtctaccttgccttcttatgggaagggagaccctaaaaaactttctcctctttgtcctcctttttctcccccactctgaggtttccccaagagaaccagattggcagggagaagcattgtggggcaattgttcctccttgacaatgtagcaataaatagatgctgccaagggcagaaaatggggaggttagctcagagcagagtagtctctagagaaaggaagaatcctcaacggcaccctggggtgctagctcctttttagaatgtcagcagagctgagattaatatctgggcttttcctgaactattctggttattgagcccttcctgttagacctaccgcctcccacctcttctgtgtctgctgtgtatttggtgacacttcataaggactagtcccttctggggtatcagagccttagggtgcccccatccccttccccagtcaactgtggcacctgtaacctcccggaacatgaaggactatgctctgaggctatactctgtgcccatgagagcagagactggaagggcaagaccaggtgctaaggaggggagagggggcatcctgtctctctccagaccatcactgcactttaaccagggtcttaggtacaaaatcctacttttcagagccttccagctctggaacctcaaacatcctcatgctctctcccagctccttttgcataaaaaaaaaagtaaagaaaaagaaaaaaaaatacacacacactgaaacccacatggagaaaagaggtgtttccttttatattgctattcaaaatcaataccaccaacaaaatatttctaagtagacacttttccagacctttgtttttttgtgtcagtgtccaagctgcagataggattttgtaatacttctggcagcttctttccttgtgtacataatatatatatatacatatatatatatatttttaatcagaagttatgaagaacaaaaagaaaaaataaacacagaagcaagtgcaataccacctctcttctccctctctcctagggtttcctttgtagcctatgtttggtgtctcttttgacctttaccccttcacctcctcctctcttcttctgattcccctcccccccttttttaaagagtttttctcctttctcaaggggagttaaactagcttttgagacttattgcaaagcattttgtatatgtaatatattgtaagtaaatatttgtgtaacggagatatactactgtaagttttgtactgtactggctgaaagtctgttataaataaacatgagtaatttaacacc

SEQ ID NO: 212266 - DNA, 3683 bp, Artificial Sequence
  derived and/or modified sequence
cttgcctctctcaggcatttgttgtgcagttcctctttgtctgctgggcacgaggggcaacagcatctgcctttccctccctgtgcacacacccaccacccacccccttcactgtcttggaaaagggatgctgtagcctagcatctcccccactatatacacatatacattctctccagccccctccccaagcacatccaagcgtgctctcccctctccttctctccctctctctctctctctctctcacacacacacacacacacacactcaacacacatacaccctgggctgagctgctcttgctggctgcagccgtgggcctctgctcaccgtgccgctgctgctgcctgcgaaatgacggcggttcccctcacttccaggaatccacgcttcctggaaggtgagtggctgggctcacccctgcctgccactgagacgcagacatgcatacaccacccgcactccctcgccgtttccaaggcggcggccgcgttcgcaccccagggtctcaccggcaagggaaggataatgtagcggggactcatctctggagaaggagttcctcggggccccagtggggccctcggtgagcacccccaacagccagcactcttctcctagccgctcactcagtgccaactccatcaaggtggagatgtacagcgatgaggagtcaagcagactgctggggccagatgagcggctcctggaaaaggacgacagcgtgattgtggaagattcattgtctgagcccctgggctactgtgatgggagtgggccagagcctcactcccctgggggcatccggctgcccaatggcaagctcaagtgtgacgtctgcggcatggtctgtattggacccaacgtgctcatggtgcacaagcgcagtcacactggtgaaaggcccttccattgcaaccagtgtggtgcctccttcacccagaaggggaacctgctgcgccacatcaagctgcactctggggagaagccctttaaatgtcccttctgcaactatgcctgccgccggcgtgatgcactcactggtcacctccgcacacactcagtctcctctcccacagtgggcaagccctacaagtgtaactactgtggccggagctacaaacagcagagtaccctggaggagcacaaggagcggtgccataactacctacagagtctcagcactgaagcccaagctttggctggccaaccaggtgacgaaatacgtgacctggagatggtgccagactccatgctgcactcatcctctgagcggccaactttcatcgatcgtctggccaatagcctcaccaaacgcaagcgttccacaccccagaagtttgtaggcgaaaagcagatgcgcttcagcctctcagacctcccctatgatgtgaactcgggtggctatgaaaaggatgtggagttggtggcacaccacagcctagagcctggctttggaagttccctggcctttgtgggtgcagagcatctgcgtcccctccgccttccacccaccaattgcatctcagaactcacgcctgtcatcagctctgtctacacccagatgcagcccctccctggtcgactggagcttccaggatcccgagaagcaggtgagggacctgaggacctggctgatggaggtcccctcctctaccggccccgaggccccctgactgaccctggggcatcccccagcaatggctgccaggactccacagacacagaaagcaaccacgaagatcgggttgcgggggtggtatccctccctcagggtcccccaccccagccacctcccaccattgtggtgggccggcacagtcctgcctacgccaaagaggaccccaagccacaggaggggttattgcggggcaccccaggcccctccaaggaagtgcttcgggtggtgggcgagagtggtgagcctgtgaaggccttcaagtgtgagcactgccgtatcctcttcctggaccacgtcatgttcactatccacatgggctgccatggcttcagagacccttttgagtgcaacatctgtggttatcacagccaggaccggtacgaattctcttcccacattgtccggggggagcataaggtgggctagcaacctctccctctctcctcagtccaccactccactgccctgactacaggcattgatccctgtccccaccatttcccaaggagttttgctttgtagccctcactactggccacctgacctcacacctgaccctgacccctcctcacctattctcttcctctatcctgaccgatgtaagcattgtgatgaaacagatcttttgcttatgtttttcctttttatcttctctcatcccagcatactgagttatttattaattagttgatttatttttgcctttttaaattttaacttatatcagtcacttgccactcccccaccctcctgtccacaactcctttccactttaggccaatttttctctcttagatcttccagcagccccaggggtaggaagctcctcttagtactaagagacttcaagcttcttgctttaagtcctcaccctttacattatctaattcttcagttttgatgctgatacctgcccccggccctaccttagctctgtggcattatatctcctctctgggactcttcaacctggtactccatacctcttgtgccctctcactttaggcagcttgcactattcttgaatgaatgaagaattatttcctcatttggaagtaggagggactgaagaaattctccccaggcactgtgggactgagagtcctattcccctagtaataggtcatattcccctagtaatatgagttctcaaagcctacattcaggatctccctctaggatgtgatagatctggtccctctccttgaactacccctccacacgctctagtcccttcaacctaccggtctattaagtggtggcttttctctccttggagtgccccaattttatattctcaggggccaaggctaggtctgcaaccctctgtctctgacagattgggagccacaggtgcctaattgggaaccagggcatgggaaaggagtgggtcaaaattcttctctttctcctccacctctcaaacttcttcactatagtgaccttcctaggctctcaggggctccttcagtccccatcctatgagaaactagtgggttgctgcctgatgacaaggggttgtttcagcccctcagtcatgctgccttctgctgctccctcccagcaggattcaccctctcattcccgggctcctgggccctgttcttaggatcagtggcagggagaaacgggtatctcttttctctcttctaattttcagtataaccaaaaattatcccagcatgagcacgggcacgtgcccttcaccccattccacccttgttccagcaagactgggatgggtacaactgaactggggtcttcctttactacccccttctacactcagctcccagacacagggtaggaggggggactgctggctactgcagagacccttggctatttgagtaacctaggattagtgagaaggggcagaaggagatacaactccactgcaagtggaggtttctttctacaagagttttctgcccaaggccacagccatcccactctctgcttccttgagattcaaaccaaaggctgtttttctatgttt

SEQ ID NO: 212267 - DNA, 2539 bp, Artificial Sequence
  derived and/or modified sequence
ctctttgtctgctgggcacgaggggcaacagcatctgcctttccctccctgtgcacacacccaccacccacccccttcactgtcttggaaaagggatgctgtagcctagcatctcccccactatatacacatatacattctctccagccccctccccaagcacatccaagcgtgctctcccctctccttctctccctctctctctctctctctctcacacacacacacacacacacactcaacacacatacaccctgggctgagctgctcttgctggctgcagccgtgggcctctgctcaccgtgccgctgctgctgcctgcgaaatgacggcggttcccctcacttccaggaatccacgcttcctggaaggtgagtggctgggctcacccctgcctgccactgagacgcagacatgcatacaccacccgcactccctcgccgtttccaaggcggcggccgcgttcgcaccccagggtctcaccggcaagggaaggataatctggagagggatccctcaggagggtgtgttccggatttcttgcctcaggcccaagactccaaccattttataatggaatctttattttgtgaaagtagcggggactcatctctggagaaggagttcctcggggccccagtggggccctcggtgagcacccccaacagccagcactcttctcctagccgctcactcagtgccaactccatcaaggtggagatgtacagcgatgaggagtcaagcagactgctggggccagatgagcggctcctggaaaaggacgacagcgtgattgtggaagattcattgtctgagcccctgggctactgtgatgggagtgggccagagcctcactcccctgggggcatccggctgcccaatggcaagctcaagtgtgacgtctgcggcatggtctgtattggacccaacgtgctcatggtgcacaagcgcagtcacactggtgaaaggcccttccattgcaaccagtgtggtgcctccttcacccagaaggggaacctgctgcgccacatcaagctgcactctggggagaagccctttaaatgtcccttctgcaactatgcctgccgccggcgtgatgcactcactggtcacctccgcacacactcagtctcctctcccacagtgggcaagccctacaagtgtaactactgtggccggagctacaaacagcagagtaccctggaggagcacaaggagcggtgccataactacctacagagtctcagcactgaagcccaagctttggctggccaaccaggtgacgaaatacgtgacctggagatggtgccagactccatgctgcactcatcctctgagcggccaactttcatcgatcgtctggccaatagcctcaccaaacgcaagcgttccacaccccagaagtttgtaggcgaaaagcagatgcgcttcagcctctcagacctcccctatgatgtgaactcgggtggctatgaaaaggatgtggagttggtggcacaccacagcctagagcctggctttggaagttccctggcctttgtgggtgcagagcatctgcgtcccctccgccttccacccaccaattgcatctcagaactcacgcctgtcatcagctctgtctacacccagatgcagcccctccctggtcgactggagcttccaggatcccgagaagcaggtgagggacctgaggacctggctgatggaggtcccctcctctaccggccccgaggccccctgactgaccctggggcatcccccagcaatggctgccaggactccacagacacagaaagcaaccacgaagatcgggttgcgggggtggtatccctccctcagggtcccccaccccagccacctcccaccattgtggtgggccggcacagtcctgcctacgccaaagaggaccccaagccacaggaggggttattgcggggcaccccaggcccctccaaggaagtgcttcgggtggtgggcgagagtggtgagcctgtgaaggccttcaagtgtgagcactgccgtatcctcttcctggaccacgtcatgttcactatccacatgggctgccatggcttcagagacccttttgagtgcaacatctgtggttatcacagccaggaccggtacgaattctcttcccacattgtccggggggagcataaggtgggctagcaacctctccctctctcctcagtccaccactccactgccctgactacaggcattgatccctgtccccaccatttcccaaggagttttgctttgtagccctcactactggccacctgacctcacacctgaccctgacccctcctcacctattctcttcctctatcctgaccgatgtaagcattgtgatgaaacagatcttttgcttatgtttttcctttttatcttctctcatcccagcatactgagttatttattaattagttgatttatttttgcctttttaaattttaacttatatcagtcacttgccactcccccaccctcctgtccacaactcctttccactttaggccaatttttctctctt

SEQ ID NO: 212268 - DNA, 1758 bp, Artificial Sequence
  derived and/or modified sequence
atgcacaccccaccagccctgccccggcgcttccagggcggcggccgggtgaggaccccaggcagccaccggcagggcaaggacaacctggagcgggaccccagcggcggctgtgtgcctgacttcctgccccaggcccaggacagcaaccacttcatcatggagagcctcttctgtgagagcagcggggacagcagcctggagaaggagttcctgggcgcccctgtgggccccagcgtgtccacccccaacagccagcacagcagccccagccgcagcctgagcgccaacagcatcaaggtggagatgtacagtgatgaggagagcagccggctgctgggcccagatgagcggctgctggagaaggatgattctgtgattgtggaggacagcctgtctgagcccctgggctactgtgatggcagcggccctgagccccacagccctgggggcatccggctgcccaacgggaagctgaagtgtgatgtgtgtggcatggtgtgcatcggccccaacgtgctgatggtgcacaagaggagccacactggagagcggcccttccactgcaaccagtgtggggccagcttcacccagaagggcaacctgctgcggcacatcaagctgcacagcggggagaagcccttcaagtgccccttctgcaactatgcctgcagaagaagagatgccctgaccggccacctgcggacccacagcgtgagcagccccaccgtgggcaagccctacaagtgcaactactgcggccgcagctacaagcagcagagcaccctggaggagcacaaggagcgctgccacaactacctgcagagcctgagcacagaggcccaggccctggccggccagcctggagatgagatccgggacctggagatggtgcctgacagcatgctgcacagcagcagcgagcggcccaccttcatcgaccggctggccaacagcctgaccaagaggaagaggagcaccccccagaagtttgtgggggagaagcagatgaggttcagcctgagtgacctgccctatgatgtgaacagcggcggctatgagaaggatgtggagctggtggcccaccacagcctggagcccggcttcggcagcagcctggcctttgtgggcgctgagcacctgcggcccctgcggctgccccccaccaactgcatcagcgagctgacccctgtgatcagctctgtgtacacccagatgcagcccctgcccggccgcctggagctgcccggcagccgggaggccggggagggccctgaggacctggctgatggcggccccctgctgtaccggccccggggccccctgacagatcctggggccagccccagcaatggctgccaggacagcacagacacagagagcaaccacgaggacagagtggccggcgtggtgtccctgccccagggccccccaccccagcccccacccaccatcgtggtgggccgccacagccctgcctatgccaaggaggaccccaagccccaggagggcctgctgcggggcaccccaggccccagcaaggaggtgctgcgggtggtgggggagagcggggagcctgtgaaggccttcaagtgtgagcactgccgcatcctcttcctggaccacgtgatgttcaccatccacatgggctgccacggcttccgggacccctttgagtgcaacatctgtggctaccacagccaggacagatatgagttcagcagccacatcgtgcggggggagcacaaggtgggctag

SEQ ID NO: 212269 - DNA, 1452 bp, Artificial Sequence
  derived and/or modified sequence
atgtacagtgatgaggagagcagccggctgctgggcccagatgagcggctgctggagaaggatgattctgtgattgtggaggacagcctgtctgagcccctgggctactgtgatggcagcggccctgagccccacagccctgggggcatccggctgcccaacgggaagctgaagtgtgatgtgtgtggcatggtgtgcatcggccccaacgtgctgatggtgcacaagaggagccacactggagagcggcccttccactgcaaccagtgtggggccagcttcacccagaagggcaacctgctgcggcacatcaagctgcacagcggggagaagcccttcaagtgccccttctgcaactatgcctgcagaagaagagatgccctgaccggccacctgcggacccacagcgtgagcagccccaccgtgggcaagccctacaagtgcaactactgcggccgcagctacaagcagcagagcaccctggaggagcacaaggagcgctgccacaactacctgcagagcctgagcacagaggcccaggccctggccggccagcctggagatgagatccgggacctggagatggtgcctgacagcatgctgcacagcagcagcgagcggcccaccttcatcgaccggctggccaacagcctgaccaagaggaagaggagcaccccccagaagtttgtgggggagaagcagatgaggttcagcctgagtgacctgccctatgatgtgaacagcggcggctatgagaaggatgtggagctggtggcccaccacagcctggagcccggcttcggcagcagcctggcctttgtgggcgctgagcacctgcggcccctgcggctgccccccaccaactgcatcagcgagctgacccctgtgatcagctctgtgtacacccagatgcagcccctgcccggccgcctggagctgcccggcagccgggaggccggggagggccctgaggacctggctgatggcggccccctgctgtaccggccccggggccccctgacagatcctggggccagccccagcaatggctgccaggacagcacagacacagagagcaaccacgaggacagagtggccggcgtggtgtccctgccccagggccccccaccccagcccccacccaccatcgtggtgggccgccacagccctgcctatgccaaggaggaccccaagccccaggagggcctgctgcggggcaccccaggccccagcaaggaggtgctgcgggtggtgggggagagcggggagcctgtgaaggccttcaagtgtgagcactgccgcatcctcttcctggaccacgtgatgttcaccatccacatgggctgccacggcttccgggacccctttgagtgcaacatctgtggctaccacagccaggacagatatgagttcagcagccacatcgtgcggggggagcacaaggtgggctag

SEQ ID NO: 212270 - DNA, 33 bp, Artificial Sequence
  derived and/or modified sequence
atgcacaccccaccagccctgcccaggaggtag

SEQ ID NO: 212271 - DNA, 1758 bp, Artificial Sequence
  derived and/or modified sequence
atgcacaccccccccgccctgccccggcggttccagggcggcggcagggtcaggacgccagggtcccatagacagggaaaagataatctcgaaagggatccttctggaggttgtgtcccagactttcttccacaggcccaggattccaatcacttcattatggagtctctgttttgtgagtccagcggtgacagcagcctcgagaaagaattcctgggcgcccccgtcgggcccagcgtctctacacccaactcccagcattccagccccagccggagcctgtccgctaatagcatcaaggtcgagatgtacagcgatgaggagtcatcgaggctcctgggcccagatgagaggctattggaaaaagatgatagcgttatcgtagaggatagcctgtccgagcccttgggatactgtgacggatcaggacctgagcctcactcccctggcggtatcaggctccctaatgggaaactcaaatgcgatgtgtgcggcatggtgtgtattggccccaatgtgctgatggtgcataagcggtcccacactggtgagcgaccctttcactgtaaccaatgtggcgctagctttactcagaagggcaatctgctgcggcatatcaaacttcatagtggtgagaagccttttaagtgccctttttgtaattacgcatgtcggcggcgcgatgctctaacggggcatctgcggacacacagtgtatcatctccaactgtaggtaaaccctacaagtgcaattactgtggaagaagttataaacagcaatctacgctggaagaacataaggaaaggtgtcacaactacctgcagtcgctgagtacggaagcccaggctctggctggccagcccggtgacgagattcgagacctagagatggtaccagattcaatgctgcattcctcaagcgagcgtccgacattcatagacaggctggcgaactcactcacaaagcgtaagcggtcaactccgcagaaattcgttggtgagaagcaaatgcgcttctccctttccgacctgccatacgacgtcaacagtggcggatatgaaaaggacgtggagctggtggcacatcattcactagagcctggatttggatcgagtctggcctttgtgggcgctgaacacctgcgtcctctgcgacttcctcccaccaactgtatctctgagcttaccccagtgatctcctctgtgtatactcagatgcagcccctccctggcaggctggaactccccggatcccgggaggcaggagaaggcccagaggatctcgcagatggaggtcctcttctgtacaggcctaggggcccactgaccgaccccggagcttcaccctccaacggttgccaagactctaccgacacagaatccaaccatgaagatcgtgtagctggagtggtttcccttcctcagggaccgccacctcagcccccacctactattgttgttggcagacatagcccagcctacgcaaaagaggatcccaagcctcaggagggattgctgagggggacccccggaccttccaaggaggtattaagggtggtcggggaatctggagaacctgttaaggccttcaaatgcgaacactgccgcatccttttcctcgatcatgttatgtttaccatccatatgggttgtcatggcttccgcgatccttttgagtgcaacatttgcggataccatagtcaagacaggtatgaatttagctcgcatatcgttagaggcgagcataaggtggggtag

SEQ ID NO: 212272 - DNA, 1452 bp, Artificial Sequence
  derived and/or modified sequence
atgtacagcgacgaggagagcagccggctgctgggccccgacgagagactactagagaaagatgatagcgtaatcgtggaggatagcctgagtgaacccttgggctattgtgacggttccggccccgaacctcatagtcccggcggtatccgcttgcccaacggaaagctgaagtgcgatgtctgcggaatggtctgcatcggtcccaacgtgctgatggttcacaagaggtcgcatacgggagagaggccattccattgcaatcagtgtggggcttcttttacccaaaaggggaatcttctgcgtcatatcaagctccatagtggtgaaaagccttttaaatgcccattttgcaattatgcctgccggcggcgggacgctttaacgggccatcttcgtacccattctgtgtccagtccgacagtgggtaagccctacaagtgcaactactgcggcagaagttataagcagcagtccacacttgaggaacataaggagcgatgtcataattacctgcagagtttgtctaccgaggctcaagcgttagctggccagcctggagacgagattcgcgatctggagatggtgcctgatagtatgctgcactcaagctccgagcggcctaccttcatcgaccgcctggctaattcccttactaaaaggaagaggagcacaccgcagaaattcgttggtgagaagcaaatgaggttcagcctgtctgacctaccctatgacgtgaattcaggaggctacgagaaggatgtggaactcgtagcacaccattctcttgaaccagggttcggaagttcattggcctttgttggcgccgagcacctgcgcccgttgaggttacccccgaccaactgtatcagtgagttgactccagtgatcagcagcgtctacacccagatgcagcctcttccggggcgcctcgaactccctgggagcagagaggcgggggaagggcctgaagacctggccgacgggggacccctgctgtatcggccccgcggcccgcttactgatcccggcgcttctccaagtaatgggtgtcaagattcaaccgataccgaatccaatcacgaggaccgcgtggccggagtcgtttccttgcctcagggcccaccgcctcagcctccccctactatcgtcgtcggcagacattcaccggcctacgcaaaggaggatcccaagccccaggaaggactcttgcgtggtacccctgggccgtctaaggaagtgcttcgagtggtaggcgagagcggtgaacccgtgaaggctttcaagtgcgaacactgcagaatcctttttctggatcatgtaatgtttactatacacatgggatgtcacggctttagagatcctttcgagtgcaatatttgcgggtatcattcccaagatcgctacgagttctcttctcacattgtgcgaggggagcataaggtggggtag

SEQ ID NO: 212273 - DNA, 1758 bp, Artificial Sequence
  derived and/or modified sequence
atgcacaccccccccgccctgccccggcggttccagggcggcggccgcgtgcgcacccctggcagccacaggcaagggaaggataacttggagagagacccctccggcgggtgtgtccccgattttctacctcaggcgcaagactctaatcacttcatcatggagtcactgttttgtgagtcctcgggagattcgagcctggagaaagaatttctcggagcccctgtgggccctagtgtgagtacacccaacagccagcattcttctccttccaggtcactgtcggctaattccataaaggtggagatgtactcggatgaggaatctagccggctgctaggtccagacgagagactacttgagaaagatgactctgtgatcgtagaagatagcttaagtgagcctctgggatactgcgatggcagcggtcccgaaccgcacagtccgggcggcatcaggttgccgaacggaaagctcaaatgcgacgtctgcgggatggtgtgtatcggcccaaatgtgcttatggtccacaaacgttcacatacgggcgagcggccgttccattgcaatcagtgcggggcctccttcactcagaagggtaacttgctcagacatatcaaacttcactctggcgagaaacctttcaaatgcccattctgtaactacgcctgcagacgcagggacgccctgacagggcacttacgtactcattcagtgtcatctccaacggtcggtaaaccttacaaatgtaattactgtggacggtcatataagcaacagagcacattagaagaacataaggagcggtgtcataattatttgcaaagcctatccacagaggcccaggcactcgctggacagcccggggacgagatccgggacctcgagatggttcctgattcaatgctacactcttctagtgagcgtcccacattcatcgaccgcttagctaactctctgaccaagaggaaacggagcacaccacaaaaattcgtcggggaaaaacagatgcgcttctccctctctgacctgccatatgacgtcaactctggggggtatgagaaagacgtggaactcgtggcgcaccacagtttggaaccagggttcggttcaagcctcgccttcgtgggagccgagcatctccggccacttcggctgccccctacaaattgtatctccgagctgacccccgttatctctagcgtatacacccagatgcagccccttcccggccgactggagcttcccgggtctcgcgaggcaggggagggaccggaagacttggccgatggaggccccctgctgtaccgtccacgtgggcctctgactgatccgggagctagccccagtaacggctgtcaagactctactgacaccgagtctaatcacgaggatcgagtcgctggagtcgttagcctgcctcaggggcctccaccgcagcctccccccacaatcgttgtaggccgccattccccagcgtatgccaaagaggaccctaaaccgcaggagggccttctgcgggggactcccggaccttccaaagaggttctacgggtggtgggcgaatcaggagagcctgtgaaggccttcaaatgtgagcactgtagaatccttttcctggatcacgtgatgtttacaatccacatggggtgccacgggtttcgtgaccctttcgagtgcaacatttgtggctaccacagtcaagatcgttacgagttctcttcccacatcgttaggggtgagcacaaagttggctag

SEQ ID NO: 212274 - DNA, 33 bp, Artificial Sequence
  derived and/or modified sequence
atgcacaccccccccgccctgccccggcggtag

SEQ ID NO: 212275 - DNA, 1758 bp, Artificial Sequence
  derived and/or modified sequence
atgcataccccaccagcgctgcccaggcggttccaaggaggaggcagagtgcgaacacccggatctcataggcagggcaaggataatttagagcgtgacccatctggaggctgtgtgcccgacttcttaccacaggcacaggattccaaccattttattatggagtccttattctgtgaatcttccggggactcatccctggagaaggaattcctcggagccccagtaggcccaagtgtttccactcccaattctcagcactccagcccatcccgctctttgtccgccaatagcatcaaagtagaaatgtactcggatgaagaaagcagtagacttctgggtccagacgagagactgttagagaaagacgactccgtgatcgtggaagattctctgtcggagcctctgggatattgtgatggcagcgggccagagccccatagccccggaggaattcgtctccccaatgggaagctgaagtgtgatgtttgtggcatggtgtgtataggccctaatgtgctgatggttcataagcgatcacataccggtgagagaccattccactgcaaccaatgcggtgcctcctttactcaaaagggaaatttgttgaggcatataaagctgcattccggcgagaagccattcaaatgtcctttctgcaattatgcctgccgcagacgagacgctcttacaggccatttgcgcacacactctgtgtcatcccctactgtgggcaagccttataagtgcaactactgtgggagatcatacaaacaacagtccaccttggaagagcacaaggagaggtgccacaactaccttcagtctctgtcaactgaggcccaagctctggctgggcagcccggagatgaaattcgtgatctcgagatggttcctgacagcatgctgcactcgtcatccgaacgcccaactttcatagaccgactggctaattctctgacgaaacgtaaacggagcacacctcagaagtttgtgggggagaagcaaatgagattttctctatccgatctcccatacgacgttaactctggcggatacgagaaggatgttgagcttgtcgcacaccatagtctggagccgggattcggaagctccctcgccttcgttggggctgagcacctcaggcccctaaggctgcctcctacgaactgcatcagcgagctcacacctgtgatatcatcagtgtatactcaaatgcaacccttacccggtagattagagttacccggaagcagggaagcgggtgagggcccagaggatttggccgacggtggccctctactgtacaggcccaggggccctctgacagatcctggggcaagccccagcaatggttgccaagactcgactgatacagagagcaaccacgaagaccgggtagcaggggtcgttagtctgcctcagggccctccccctcagccgccaccaactatagtggtggggagacacagccccgcatacgccaaggaggacccgaagccacaggagggtctgttgcgtggcaccccaggaccgagcaaagaggtccttagagtggtgggcgagagtggagaaccagtgaaagctttcaagtgcgagcactgcagaatcctctttctggaccacgtgatgttcacaatacacatggggtgccatggcttcagagaccctttcgaatgtaatatctgtggctaccatagtcaagaccggtacgagttctcctcacacatcgtgagaggcgagcacaaagtcggttag

SEQ ID NO: 212276 - DNA, 1452 bp, Artificial Sequence
  derived and/or modified sequence
atgtattccgatgaagaatcttcaagactcttggggcctgacgagagactgctggagaaggacgattctgtcattgtggaagactctctgagcgaacctctgggctactgcgacgggagtggtcctgaaccccactctcccggtggcattcgacttccaaacggtaaactcaagtgtgacgtgtgtggcatggtatgtatcggcccaaacgttctcatggtccacaagcggagccacacgggggagcgcccttttcactgcaaccagtgcggcgcatcgttcacacaaaaaggtaatttgctgcgtcatatcaagctccactcaggcgagaaacctttcaagtgtcccttttgcaattacgcctgcaggcgacgggatgctcttaccggccacctgagaacccattctgtgagctcgcctaccgtgggaaaaccctacaaatgtaactattgcggcagaagctacaagcagcagtccacccttgaggaacataaggagagatgtcacaactatctccagagcttgagcacagaggcacaggcgttagcaggtcagccaggcgacgagatcagggatctggaaatggtccctgattctatgttacatagcagtagtgaacgcccaacttttatcgaccggttagctaacagcctgactaaaaggaagcgctctactccccagaagttcgttggagaaaagcagatgaggttctctctctcagatttaccctacgatgtgaactcaggtggatacgaaaaggacgtggagctcgtggcacaccattctcttgagccaggcttcgggtcctctctggcctttgtcggggctgaacacctgcgacctctgcgcctgcccccaacgaactgtatctcagagcttacgcctgtcatctcgtctgtgtatacgcagatgcaacctctgccaggccgtttagaactacctggctcaagagaagccggagaaggcccagaagatttggccgatggaggcccactgttgtacaggcccagaggaccactcacggacccaggagccagcccctcaaacggctgtcaggacagtaccgacacagaaagtaatcatgaggaccgcgttgccggagttgtgtctttgccgcagggtcctccaccccagcccccaccaactatagtcgtagggagacactcgcctgcgtacgctaaggaggatcctaaaccgcaggaaggacttctcagaggtactcccggacctagcaaagaggttctccgagtcgttggggaatccggtgaacccgtgaaagcctttaaatgtgagcactgtaggattttgtttttggaccatgtcatgttcacaatccatatgggatgccacggatttcgggatcccttcgagtgcaatatttgcggctaccacagtcaggacagatacgagttctctagccatatcgtaagaggggaacataaagtcggctag

SEQ ID NO: 212277 - DNA, 1758 bp, Artificial Sequence
  derived and/or modified sequence
atgcacacaccgccagctttgccaagacggtttcaaggcggtggtagagtcagaacgccgggatcgcacagacagggaaaggataatttagaaagagacccaagcggtggctgtgtccccgatttccttccccaggctcaggatagtaaccatttcattatggagtctctattttgcgagtcgtccggcgatagctctttggagaaagagtttttaggcgctcccgtggggccttctgtaagtactccaaatagccaacacagttcccccagcagaagcctgagtgccaactctatcaaggtggaaatgtacagcgacgaggaatccagccgtctgctcggcccagatgaaaggttattggaaaaggacgacagcgtgatagtggaggatagcttatcagagcctctgggatattgtgatggcagcgggcctgagcctcattcaccaggcggaatccgcttacctaatgggaaactaaagtgtgatgtatgtggcatggtttgcatagggccaaacgtcctgatggtgcataaacggtcacatactggggagagaccattccactgtaatcagtgcggggcatcatttacccaaaaaggcaatttgcttaggcatataaagttgcatagcggtgagaagccattcaaatgcccattctgcaattacgcatgcagacggagggacgctttgaccggccatcttcgtacacatagtgtaagctcacctaccgtaggcaaaccatataagtgcaactactgtggccgtagttataagcagcagagcacgttagaagaacataaggagagatgtcacaactatctccaaagccttagcaccgaagcgcaggccttagccggacaacccggtgacgagatccgcgatctggagatggtccccgactccatgctacactcctcttccgaaagaccaacattcatcgatcggctcgccaattctctaaccaaacgcaagagatcaacaccccaaaagttcgttggtgagaaacaaatgcgcttcagtctgtcagatttgccctatgatgttaatagtggcggttacgagaaagacgtggaacttgttgcccaccattcccttgaaccagggtttggatcatccctcgctttcgtgggagccgagcatctcaggccgctgcgcctcccaccaaccaactgcatctcagaactgacgcctgtgatcagctccgtgtatacgcagatgcaacccctgccgggacgactggagctgcctggcagcagagaggctggagaaggccctgaggatttggctgacggcggaccactgctgtatcgacctaggggtcccctgaccgatccgggtgcctctccttctaacgggtgtcaggattccactgacacagagtctaaccatgaggatagagttgcaggcgtggtgtctcttccccagggcccaccaccacagccaccacctaccattgtcgtggggcgacacagccccgcttatgccaaggaggatcccaagccccaggaggggttgttgagaggcaccccgggaccttcaaaagaggtgctccgcgtggtgggagagagcggagaacccgtgaaagcctttaagtgcgagcactgtaggatcctcttccttgatcacgttatgtttacgattcatatggggtgtcacgggtttagggacccgttcgaatgcaacatctgtgggtatcatagccaggaccggtacgagtttagctcacatattgtccggggagaacacaaggtggggtag

SEQ ID NO: 212278 - DNA, 33 bp, Artificial Sequence
  derived and/or modified sequence
atgcacacacctcctgcgctaccacggagatag

SEQ ID NO: 212279 - DNA, 1758 bp, Artificial Sequence
  derived and/or modified sequence
atgcacaccccccccgccctgcccagaagattccagggcggcggcagagtgagaacccccggcagccacagacagggcaaggacaacctggagagagaccccagcggcggctgcgtgcccgacttcctgccccaggcccaggacagcaaccacttcatcatggagagcctgttctgcgagagcagcggcgacagcagcctggagaaggagttcctgggcgcccccgtgggccccagcgtgagcacccccaacagccagcacagcagccccagcagaagcctgagcgccaacagcatcaaggtggagatgtacagcgacgaggagagcagcagactgctgggccccgacgagagactgctggagaaggacgacagcgtgatcgtggaggacagcctgagcgagcccctgggctactgcgacggcagcggccccgagccccacagccccggcggcatcagactgcccaacggcaagctgaagtgcgacgtgtgcggcatggtgtgcatcggccccaacgtgctgatggtgcacaagagaagccacaccggcgagagacccttccactgcaaccagtgcggcgccagcttcacccagaagggcaacctgctgagacacatcaagctgcacagcggcgagaagcccttcaagtgccccttctgcaactacgcctgcagaagaagagacgccctgaccggccacctgagaacccacagcgtgagcagccccaccgtgggcaagccctacaagtgcaactactgcggcagaagctacaagcagcagagcaccctggaggagcacaaggagagatgccacaactacctgcagagcctgagcaccgaggcccaggccctggccggccagcccggcgacgagatcagagacctggagatggtgcccgacagcatgctgcacagcagcagcgagagacccaccttcatcgacagactggccaacagcctgaccaagagaaagagaagcaccccccagaagttcgtgggcgagaagcagatgagattcagcctgagcgacctgccctacgacgtgaacagcggcggctacgagaaggacgtggagctggtggcccaccacagcctggagcccggcttcggcagcagcctggccttcgtgggcgccgagcacctgagacccctgagactgccccccaccaactgcatcagcgagctgacccccgtgatcagcagcgtgtacacccagatgcagcccctgcccggcagactggagctgcccggcagcagagaggccggcgagggccccgaggacctggccgacggcggccccctgctgtacagacccagaggccccctgaccgaccccggcgccagccccagcaacggctgccaggacagcaccgacaccgagagcaaccacgaggacagagtggccggcgtggtgagcctgccccagggcccccccccccagcccccccccaccatcgtggtgggcagacacagccccgcctacgccaaggaggaccccaagccccaggagggcctgctgagaggcacccccggccccagcaaggaggtgctgagagtggtgggcgagagcggcgagcccgtgaaggccttcaagtgcgagcactgcagaatcctgttcctggaccacgtgatgttcaccatccacatgggctgccacggcttcagagaccccttcgagtgcaacatctgcggctaccacagccaggacagatacgagttcagcagccacatcgtgagaggcgagcacaaggtgggctag

SEQ ID NO: 212280 - DNA, 1452 bp, Artificial Sequence
  derived and/or modified sequence
atgtacagcgacgaggagagcagcagactgctgggccccgacgagagactgctggagaaggacgacagcgtgatcgtggaggacagcctgagcgagcccctgggctactgcgacggcagcggccccgagccccacagccccggcggcatcagactgcccaacggcaagctgaagtgcgacgtgtgcggcatggtgtgcatcggccccaacgtgctgatggtgcacaagagaagccacaccggcgagagacccttccactgcaaccagtgcggcgccagcttcacccagaagggcaacctgctgagacacatcaagctgcacagcggcgagaagcccttcaagtgccccttctgcaactacgcctgcagaagaagagacgccctgaccggccacctgagaacccacagcgtgagcagccccaccgtgggcaagccctacaagtgcaactactgcggcagaagctacaagcagcagagcaccctggaggagcacaaggagagatgccacaactacctgcagagcctgagcaccgaggcccaggccctggccggccagcccggcgacgagatcagagacctggagatggtgcccgacagcatgctgcacagcagcagcgagagacccaccttcatcgacagactggccaacagcctgaccaagagaaagagaagcaccccccagaagttcgtgggcgagaagcagatgagattcagcctgagcgacctgccctacgacgtgaacagcggcggctacgagaaggacgtggagctggtggcccaccacagcctggagcccggcttcggcagcagcctggccttcgtgggcgccgagcacctgagacccctgagactgccccccaccaactgcatcagcgagctgacccccgtgatcagcagcgtgtacacccagatgcagcccctgcccggcagactggagctgcccggcagcagagaggccggcgagggccccgaggacctggccgacggcggccccctgctgtacagacccagaggccccctgaccgaccccggcgccagccccagcaacggctgccaggacagcaccgacaccgagagcaaccacgaggacagagtggccggcgtggtgagcctgccccagggcccccccccccagcccccccccaccatcgtggtgggcagacacagccccgcctacgccaaggaggaccccaagccccaggagggcctgctgagaggcacccccggccccagcaaggaggtgctgagagtggtgggcgagagcggcgagcccgtgaaggccttcaagtgcgagcactgcagaatcctgttcctggaccacgtgatgttcaccatccacatgggctgccacggcttcagagaccccttcgagtgcaacatctgcggctaccacagccaggacagatacgagttcagcagccacatcgtgagaggcgagcacaaggtgggctag

SEQ ID NO: 212281 - DNA, 33 bp, Artificial Sequence
  derived and/or modified sequence
atgcacaccccccccgccctgcccagaagatag

SEQ ID NO: 212282 - protein, 186 aa, Artificial Sequence
  derived and/or modified sequence
MSPADPGTVATMRKPRCSLPDVLGVAGLVRRRRRYALSGSVWKKRTLTWRVRSFPQSSQLSQETVRVLMSYALMAWGMESGLTFHEVDSPQGQEPDILIDFARAFHQDSYPFDGLGGTLAHAFFPGEHPISGDTHFDDEETWTFGSKASQQLEQELAGGSPVDEELGFSRGWRVNPLGPGSPERLS

SEQ ID NO: 212283 - protein, 562 aa, Artificial Sequence
  derived and/or modified sequence
MRLRLRLLALLLLLLAPPARAPKPSAQDVSLGVDWLTRYGYLPPPHPAQAQLQSPEKLRDAIKVMQRFAGLPETGRMDPGTVATMRKPRCSLPDVLGVAGLVRRRRRYALSGSVWKKRTLTWRVRSFPQSSQLSQETVRVLMSYALMAWGMESGLTFHEVDSPQGQEPDILIDFARAFHQDSYPFDGLGGTLAHAFFPGEHPISGDTHFDDEETWTFGSKDGEGTDLFAVAVHEFGHALGLGHSSAPNSIMRPFYQGPVGDPDKYRLSQDDRDGLQQLYGKAPQTPYDKPTRKPLAPPPQPPASPTHSPSFPIPDRCEGNFDAIANIRGETFFFKGPWFWRLQPSGQLVSPRPARLHRFWEGLPAQVRVVQAAYARHRDGRILLFSGPQFWVFQDRQLEGGARPLTELGLPPGEEVDAVFSWPQNGKTYLVRGRQYWRYDEAAARPDPGYPRDLSLWEGAPPSPDDVTVSNAGDTYFFKGAHYWRFPKNSIKTEPDAPQPMGPNWLDCPAPSSGPRAPRPPKATPVSETCDCQCELNQAAGRWPAPIPLLLLPLLVGGVASR

SEQ ID NO: 212284 - DNA, 1689 bp, Artificial Sequence
  derived and/or modified sequence
atgagactgagactgagactgctggccctgctgctgctgctgctggccccccccgccagagcccccaagcccagcgcccaggacgtgagcctgggcgtggactggctgaccagatacggctacctgccccccccccaccccgcccaggcccagctgcagagccccgagaagctgagagacgccatcaaggtgatgcagagattcgccggcctgcccgagaccggcagaatggaccccggcaccgtggccaccatgagaaagcccagatgcagcctgcccgacgtgctgggcgtggccggcctggtgagaagaagaagaagatacgccctgagcggcagcgtgtggaagaagagaaccctgacctggagagtgagaagcttcccccagagcagccagctgagccaggagaccgtgagagtgctgatgagctacgccctgatggcctggggcatggagagcggcctgaccttccacgaggtggacagcccccagggccaggagcccgacatcctgatcgacttcgccagagccttccaccaggacagctaccccttcgacggcctgggcggcaccctggcccacgccttcttccccggcgagcaccccatcagcggcgacacccacttcgacgacgaggagacctggaccttcggcagcaaggacggcgagggcaccgacctgttcgccgtggccgtgcacgagttcggccacgccctgggcctgggccacagcagcgcccccaacagcatcatgagacccttctaccagggccccgtgggcgaccccgacaagtacagactgagccaggacgacagagacggcctgcagcagctgtacggcaaggccccccagaccccctacgacaagcccaccagaaagcccctggccccccccccccagccccccgccagccccacccacagccccagcttccccatccccgacagatgcgagggcaacttcgacgccatcgccaacatcagaggcgagaccttcttcttcaagggcccctggttctggagactgcagcccagcggccagctggtgagccccagacccgccagactgcacagattctgggagggcctgcccgcccaggtgagagtggtgcaggccgcctacgccagacacagagacggcagaatcctgctgttcagcggcccccagttctgggtgttccaggacagacagctggagggcggcgccagacccctgaccgagctgggcctgccccccggcgaggaggtggacgccgtgttcagctggccccagaacggcaagacctacctggtgagaggcagacagtactggagatacgacgaggccgccgccagacccgaccccggctaccccagagacctgagcctgtgggagggcgccccccccagccccgacgacgtgaccgtgagcaacgccggcgacacctacttcttcaagggcgcccactactggagattccccaagaacagcatcaagaccgagcccgacgccccccagcccatgggccccaactggctggactgccccgcccccagcagcggccccagagcccccagaccccccaaggccacccccgtgagcgagacctgcgactgccagtgcgagctgaaccaggccgccggcagatggcccgcccccatccccctgctgctgctgcccctgctggtgggcggcgtggccagcagatag

SEQ ID NO: 212285 - DNA, 1689 bp, Artificial Sequence
  derived and/or modified sequence
atgcgtcttcggctgcggctcctcgcgttgttattgttgctgctcgcaccacccgccagagcacccaagccctctgctcaggatgtgtcactgggtgtggattggctgacaaggtacggctatctgcctcctcctcatcccgctcaggcccagctgcagagccccgaaaaactcagagatgcgataaaggtcatgcaacgctttgctggactccctgagacaggtcgcatggaccctggtaccgtcgccaccatgaggaaacccaggtgctccttacctgacgtgctgggagttgccggactggtgaggcggagacggcggtatgccctgtctggaagcgtgtggaagaaacggaccttaacttggcgcgtccggagcttcccacaatcttctcagctcagccaggagaccgtaagggtgcttatgtcttatgcactgatggcgtgggggatggaatccggactcacgtttcacgaggtggactccccccagggccaggaacccgatattttgattgactttgcgagggcttttcaccaggactcctatccgtttgacggccttggaggaaccctcgcacatgccttttttcctggagagcacccaatctcaggggatacccacttcgacgatgaggagacatggacattcggctccaaagacggcgaagggactgatctgttcgctgtcgcggttcacgagtttggacacgccttaggtctggggcacagcagcgcccccaacagcattatgaggcccttctatcagggacctgttggcgatcccgacaagtaccggctctctcaggacgacagagacggcctgcaacagttgtacgggaaggccccccaaaccccctacgacaagcccacgcgtaagcccctggcccccccgccgcagccaccggcatccccgactcactcaccctcctttccaattcccgatcgttgtgaggggaactttgacgccatcgccaatatcaggggcgagacatttttcttcaaagggccttggttctggcggctccaaccgtccggtcagctggtttcacccaggcccgctagactccatcgattttgggaaggccttcccgcacaagtgagggtggtccaggccgcctacgctcggcacagagatggaaggatccttcttttctccggtccgcagttttgggtgttccaagatcgtcagttggagggcggggccaggcccttgacggagctgggattaccccccggggaagaggtggatgcggttttctcctggccacagaatgggaagacttacctcgtaaggggccgccaatattggcgctacgacgaggccgccgcaaggcccgatcctgggtacccgagagaccttagcctatgggaaggggcccctccgtcccccgacgatgtgacagtgagtaacgctggcgatacttatttctttaaaggcgctcattactggagattccccaaaaactccataaagacagagcccgatgctcctcagcccatgggtccgaactggttagactgtcctgccccttcaagtggaccacgcgcacctcgacctccaaaggcaacaccagtctcagagacctgtgactgtcagtgcgaacttaaccaggccgctgggcgttggcccgcacccattcccctgcttctgctccctcttctggtgggtggagtcgccagccggtag

SEQ ID NO: 212286 - DNA, 1689 bp, Artificial Sequence
  derived and/or modified sequence
atgaggctgcggctgcggctgctggccctgctgctgctgctgctggcccccccagcccgggcccccaagcccagcgcccaggatgtgtccctgggcgtggactggctgaccaggtatggctacctgcccccaccccacccagcccaggcccagctgcagagccctgagaagctgagagatgccatcaaggtgatgcagagatttgctggcctgcctgagaccggccgcatggaccccggcaccgtggccaccatgaggaagccccgctgcagcctgcctgatgtgctgggcgtggccggcctggtgagaagaagaagaagatatgccctgagcggctctgtgtggaagaagaggaccctgacctggagggtgcgctccttcccccagagcagccagctgagccaggagaccgtgcgggtgctgatgtcctatgccctgatggcctggggcatggagagcggcctgaccttccacgaggtggacagcccccagggccaggagccagacatcctgattgactttgcccgggccttccaccaggacagctacccctttgatggcctgggcggcaccctggcccacgccttcttccctggagagcaccccatcagcggggacacccactttgatgatgaggagacctggaccttcggcagcaaggatggagagggcacagacctgtttgctgtggccgtgcatgaatttggacatgccctgggcctgggccacagcagcgcccccaacagcatcatgaggcccttctaccagggccctgtgggggaccctgacaagtaccgcctgagccaggatgacagagatggcctgcagcagctgtatggcaaggccccccagaccccctatgacaagcccaccaggaagcccctggcccccccaccccagcccccagccagccccacccacagccccagcttccccatcccagacagatgtgagggcaactttgatgccatcgccaacatccggggggagaccttcttcttcaagggcccctggttctggaggctgcagcccagcggccagctggtgagccccaggcctgcccggctgcaccgcttctgggagggcctgcctgcccaggtgcgggtggtgcaggccgcctatgcccggcacagagatggccgcatcctgctcttcagcggcccccagttctgggtgttccaggaccggcagctggagggcggggcccggcccctgacagagctgggcctgcccccaggagaggaggtggatgctgtgttctcctggccccagaatggcaagacctacctggtgcggggccggcagtactggaggtatgatgaggccgccgcccggccagaccccggctacccccgggacctgagcctgtgggagggcgccccacccagcccagatgatgtgacagtgtccaatgctggggacacctacttcttcaagggggcccactactggaggttccccaagaacagcatcaagacagagccagatgccccccagcccatgggccccaactggctggactgcccagcccccagcagcggcccccgggccccccggccccccaaggccacccctgtgtctgagacctgtgactgccagtgtgagctgaaccaggccgccggccgctggccagcccccatccccctgctgctgctgcccctgctggtgggcggcgtggccagcaggtag

SEQ ID NO: 212287 - DNA, 1689 bp, Artificial Sequence
  derived and/or modified sequence
atgcggctgcggctgcggctgctggccctgctgctgctgctgctggctcctcccgcccgcgccccaaagcctagcgctcaggacgtctcgctgggggtagactggctcacaaggtacgggtacttaccaccccctcaccccgcgcaggcacagttacagtcccctgagaagctccgagacgccataaaggtcatgcagagattcgctggtctgccagagacgggccgaatggaccccggcacagttgctactatgcggaaacccaggtgctccctgcccgacgttctgggcgtggctggacttgtgcggaggcgcaggcggtatgccttgtctggatcagtctggaagaaacggacactgacctggagagtgaggagctttccccagagcagtcaactcagccaggagactgtgcgagtgctgatgtcgtacgcactgatggcttgggggatggagagtggtttaacattccacgaggtggactccccccaaggacaggaaccggatatccttatcgatttcgccagggcttttcatcaagacagttaccccttcgacggtctcggaggcaccttggcccacgccttttttcctggagaacacccaatttccggcgacacacacttcgacgacgaagaaacatggaccttcggctccaaagatggcgaggggacggacctgttcgccgtcgcagtccatgagtttggccacgcattgggcctaggacactcaagcgcaccaaactcaatcatgaggcctttctaccagggccctgtgggggaccccgacaagtaccgcctgtcccaggacgaccgggacgggttgcagcagctctacggtaaagccccccagactccttacgacaaacccaccagaaagcccttggcaccaccacctcaaccaccggcgagccctactcacagcccaagctttcccatccccgatcgatgcgaaggtaacttcgatgcaatcgcgaatatacggggcgagacctttttcttcaaggggccatggttctggcggctacagccttccgggcaactagttagtcctaggcctgccagacttcaccgattctgggagggccttcctgcccaagtaagagtggtgcaggctgcgtacgctcgacatagagacgggagaatactgctgttttcggggcctcagttttgggtgttccaggatcggcagctggaaggcggcgcacggcccctgactgagctggggctgccccccggggaagaagtcgacgccgtgttttcttggccccagaacggtaagacctacctcgtaagggggcgtcagtactggaggtacgacgaggcggccgcccggccagaccctggatatcctcgggacctttctctgtgggaaggggctccccctagccccgacgacgttacagtgagcaacgcaggagatacgtatttctttaaaggggcacactattggcggtttcctaagaattccataaaaactgagcctgacgccccacagccgatggggccgaattggctggactgtccagccccctctagcggcccacgggctccaaggccccccaaagccactccagtgagtgaaacctgtgactgccagtgcgagttaaaccaagccgcagggaggtggcccgcccccatccccctcctcctcctgcctctccttgttggcggagtggccagtaggtag

SEQ ID NO: 212288 - DNA, 1689 bp, Artificial Sequence
  derived and/or modified sequence
atgcgtctccggttgcggctcctcgctctccttctattgttactcgcccctcccgctcgtgccccaaagcctagcgcccaggacgtttcgctgggcgtcgattggttgacaaggtacggatacctaccacctccacatccagcgcaggcacagctccagagtcctgagaagctaagggatgctatcaaggtgatgcagaggtttgctggtctccctgagacaggcagaatggatcctggcaccgtggctacaatgaggaaaccacggtgctccttgcccgacgtattgggggtggccggattagttagaaggcggaggcgctacgcactgtctggtagtgtatggaagaagagaactttgacttggcgcgtcagatccttcccacagtcctcacagctgtctcaagagactgtgcgtgtcctgatgtcatacgcactgatggcttggggtatggaaagcggactcacgttccacgaggtggactccccccagggacaggagccagacatccttattgattttgcgagggcttttcaccaggacagttatcccttcgatggactggggggtacactggcccatgcctttttcccaggggaacatcccatctccggggacacccattttgacgatgaggagacatggacatttggctctaaggatggcgagggtacggacttgttcgccgttgctgtgcatgaattcggacacgctttaggattgggacactccagcgccccaaatagcatcatgcgccctttttatcaggggcctgtgggggaccctgacaaataccgcctgtcgcaggacgatcgagacggactccagcagctttacggtaaggctccacagaccccctacgataaacccaccagaaagcctctggctccaccgccacagccccctgcttcacccacacactctcctagttttccaatacctgaccgctgcgagggcaatttcgacgccatcgccaacatccgcggagaaacattttttttcaagggtccttggttttggcgactgcagccatcgggccaacttgttagtccaaggcctgcacgccttcataggttctgggagggccttccggctcaggtaagagtcgttcaggccgcttacgctcgccatagggacggtcggattctgttgttctctggtcctcagttctgggtgttccaagaccgccagctggaaggaggggcacggccactcaccgagcttgggctaccccctggagaggaagttgatgccgtctttagctggccacaaaatggcaagacatacttagtccgcggtagacagtactggcgctacgatgaggccgctgccagaccagatcccggatacccacgagacctttccctttgggaaggggcaccaccctccccagacgacgtcacagtatcaaatgctggagacacatatttcttcaaaggggcacattactggaggttccctaaaaacagcatcaagaccgaaccagacgcacctcagcccatgggaccaaactggctcgattgtcccgctcccagtagcggaccgcgagcccctcgacctccgaaggcaacacccgtttccgagacctgcgattgtcagtgtgagctaaaccaggctgctgggagatggccagcacccattcctttgcttctgttacccctgctggtgggcggagttgctagccggtag

SEQ ID NO: 212289 - DNA, 3530 bp, Artificial Sequence
  derived and/or modified sequence
gattcccgggcccacccgacccagcggcgcgaccctggccctccgggaccctccgctgactccaccgcgcacttcccgggacccccacacacatcccagccctccggccgatccctccctactcggtgccgggtgccccccgccctctccaggcccggatctcctcccccaggtccccggggcggccccagccaggcccccttcgaaccccgccggcggcccgggctggggcgcaccatgcggctgcggctccggcttctggcgctgctgcttctgctgctggcaccgcccgcgcgcgccccgaagccctcggcgcaggacgtgagcctgggcgtggactggctgactcgctatggttacctgccgccaccccaccctgcccaggcccagctgcagagccctgagaagttgcgcgatgccatcaaagtcatgcagaggttcgcggggctgccggagaccggccgcatggacccagggacagtggccaccatgcgtaagccccgctgctccctgcctgacgtgctgggggtggcggggctggtcaggcggcgtcgccggtacgctctgagcggcagcgtgtggaagaagcgaaccctgacatggagggtacgttccttcccccagagctcccagctgagccaggagaccgtgcgggtcctcatgagctatgccctgatggcctggggcatggagtcaggcctcacatttcatgaggtggattccccccagggccaggagcccgacatcctcatcgactttgcccgcgccttccaccaggacagctaccccttcgacgggttggggggcaccctagcccatgccttcttccctggggagcaccccatctccggggacactcactttgacgatgaggagacctggacttttgggtcaaaagacggcgaggggaccgacctgtttgccgtggctgtccatgagtttggccacgccctgggcctgggccactcctcagcccccaactccattatgaggcccttctaccagggtccggtgggcgaccctgacaagtaccgcctgtctcaggatgaccgcgatggcctgcagcaactctatgggaaggcgccccaaaccccatatgacaagcccacaaggaaacccctggctcctccgccccagcccccggcctcgcccacacacagcccatccttccccatccctgatcgatgtgagggcaattttgacgccatcgccaacatccgaggggaaactttcttcttcaaaggcccctggttctggcgcctccagccctccggacagctggtgtccccgcgacccgcacggctgcaccgcttctgggaggggctgcccgcccaggtgagggtggtgcaggccgcctatgctcggcaccgagacggccgaatcctcctctttagcgggccccagttctgggtgttccaggaccggcagctggagggcggggcgcggccgctcacggagctggggctgcccccgggagaggaggtggacgccgtgttctcgtggccacagaacgggaagacctacctggtccgcggccggcagtactggcgctacgacgaggcggcggcgcgcccggaccccggctaccctcgcgacctgagcctctgggaaggcgcgcccccctcccctgacgatgtcaccgtcagcaacgcaggtgacacctacttcttcaagggcgcccactactggcgcttccccaagaacagcatcaagaccgagccggacgccccccagcccatggggcccaactggctggactgccccgccccgagctctggtccccgcgcccccaggccccccaaagcgacccccgtgtccgaaacctgcgattgtcagtgcgagctcaaccaggccgcaggacgttggcctgctcccatcccgctgctcctcttgcccctgctggtggggggtgtagcctcccgctgatggggggagccatccagaccgaacagcgccctccacggccgagtcccccgccgctggacctggtcgggggttgtgaggcgctgcggaggccccttgtctgttcccacggacgggggctcgggcgcggactaagcaggggggatctcccgcgcaggggcggcggcggcggggaccggtcgcctggcgctgggctcagtctcctcagggtctgagaccccggcgctgccaccggaacccgccttcaggggcgcacgcgcgctgggaccatgcgtcggtcgtcgcccccgtcgttccctcccggctgccgccagggggcggtcggaccccgcctcccgagcccggggaggggcggggaggacaaggggcgggcccgcggcctcacccggagggacggcagccccggtcgcgcgctggccccgcaggaccttccttttccaggaagagccagcttttctcggagcgcagtcctgggactctccgcagccccgccccgcctggccactgcgtctggcattcctgggtcgttagaggacaggcctgactgcgaagctgtgccttgcccctctcccacccgcagtttctcaccccgttctgctcccacaaggcccccctacagtcactgccacactggtggggacctgggacccagacccggaaccagcccagatatcacccctgaggacccatgcgccacgtcctgggtggtggaatcagtggctggagggacgacccttgctctccaggctgttaaccttttccgttgctcccccgccacccacctcctcctccccaggccacccaacttgggcacctccctgggcccagaactgccttccattcaatggggaacccttctatccccaagaaccccttccctgcttgcaccctggagagaacagcttgactcccatcaactcaacgctggtggaaagacagggaccgaaccctggctcaggcctggtcattgcctcctcagcactccctcctgggaggccttagctctagagtgaggggtgggtggaacctgggggcacctcgttcaccctgtccccactccccacagttttaggatctaaatgattgcctctggaactattcttctagactatcccacatcagaatcactgggaaatttaagtttgcagatcccacactcaccctgaatcctcactcagggtggggtcaggaatctgcattttaactagtcgcggggattgtggggggcagtagctggctgtttcgtggcatttctgtggctctgcagtgttcctccaccccaggaccaatatgttcaggccacaccgatggcctgaaccccatgggtagagtcacttaggggccacttcctaagttgctgtccagcctcagtgaccccctagtgcttcctggagctgaggctgtgggcggctgtcccagcaaccatgcgaggggttgccccagttgctcatacaaacagatcagcatgaggacagaaggcaggagactttggtcagttacctgggaattctgggctgccaggaaacgatttgggcctctgtcagtttcttttccatgtatgaggagggggaaatttgtatattagaaacttattcatcccactcagg

SEQ ID NO: 212290 - protein, 1883 aa, Artificial Sequence
  derived and/or modified sequence
MPVGRIECPSSPSFPRDISHECRVCGVTEVGLSAYAKHISGQLHKDNVDAQEREDDGKGEEEEEDYFDKELIQLIKQRKEQSRQDEPSNSNQEINSDDRRPQWRREDRIPYQDRESYSQPAWHHRGPPQRDWKWEKDGFNNTRKNSFPHSLRNGGGPRGRSGWHKGVAGGSSTWFHNHSNSGGGWLSNSGAVDWNHNGTGRNSSWLSEGTGGFSSWHMNNSNGNWKSSVRSTNNWNYSGPGDKFQPGRNRNSNCQMEDMTMLWNKKSNKSNKYSHDRYNWQRQENDKLGTVATYRGPSEGFTSDKFPSEGLLDFNFEQLESQTTKQADTATSKVSGKNGSAAREKPRRWTPYPSQKTLDLQSGLKDITGNKSEMIEKPLFDFSLITTGIQEPQTDETRNSPTQKTQKEIHTGSLNHKASSDSAASFEVVRQCPTAEKPEQEHTPNKMPSLKSPLLPCPATKSLSQKQDPKNISKNTKTNFFSPGEHSNPSNKPTVEDNHGPYISKLRSSCPHVLKGNKSTFGSQKQSGDNLNDTLRKAKEVLQCHESLQNPLLSTSKSTRNYAKASRNVEESEKGSLKIEFQVHALEDESDGETSDTEKHGTKIGTLGSATTELLSGSTRTADEKEEDDRILKTSRELSTSPCNPIVRQKESELQMTSAASPHPGLLLDLKTSLEDAQVDDSIKSHVSYETEGFESASLDAELQKSDISQPSGPLLPELSKLGFPASLQRDLTRHISLKSKTGVHLPEPNLNSARRIRNISGHRKSETEKESGLKPTLRQILNASRRNVNWEQVIQQVTKKKQELGKGLPRFGIEMVPLVQNEQEALDLDGEPDLSSLEGFQWEGVSISSSPGLARKRSLSESSVIMDRAPSVYSFFSEEGTGKENEPQQMVSPSNSLRAGQSQKATMHLKQEVTPRAASLRTGERAENVATQRRHSAQLSSDHIIPLMHLAKDLNSQERSIPPSENQNSQESNGEGNCLSSSASSALAISSLADAATDSSCTSGAEQNDGQSIRKKRRATGDGSSPELPSLERKNKRRKIKGKKERSQVDQLLNISLREEELSKSLQCMDNNLLQARAALQTAYVEVQRLLMLKQQITMEMSALRTHRIQILQGLQETYEPSEHPDQVPCSLTRERRNSRSQTSIDAALLPTPFFPLFLEPPSSHVSPSPTGASLQITTSPTFQTHGSVPAPDSSVQIKQEPMSPEQDENVNAVPPSSACNVSKELLEANREISDSCPVYPVITARLSLPESTESFHEPSQELKFSVEQRNTRNRENSPSSQSAGLSSINKEGEEPTKGNSGSEACTSSFLRLSFASETPLEKEPHSPADQPEQQAESTLTSAETRGSKKKKKLRKKKSLRAAHVPENSDTEQDVLTVKPVRKVKAGKLIKGGKVTTSTWEDSRTGREQESVRDEPDSDSSLEVLEIPNPQLEVVAIDSSESGEEKPDSPSKKDIWNSTEQNPLETSRSGCDEVSSTSEIGTRYKDGIPVSVAETQTVISSIKGSKNSSEISSEPGDDDEPTEGSFEGHQAAVNAIQIFGNLLYTCSADKTVRVYNLVSRKCIGVFEGHTSKVNCLLVTQTSGKNAALYTGSSDHTIRCYNVKSRECVEQLQLEDRVLCLHSRWRILYAGLANGTVVTFNIKNNKRLEIFECHGPRAVSCLATAQEGARKLLVVGSYDCTISVRDARNGLLLRTLEGHSKTILCMKVVNDLVFSGSSDQSVHAHNIHTGELVRIYKGHNHAVTVVNILGKVMVTACLDKFVRVYELQSHDRLQVYGGHKDMIMCMTIHKSMIYTGCYDGSIQAVRLNLMQNYRCWWHGCSLIFGVVDHLKQHLLTDHTNPNFQTLKCRWKNCDAFFTARKGSKQDAAGHIERHAEDDSKIDS

SEQ ID NO: 212291 - DNA, 10487 bp, Artificial Sequence
  derived and/or modified sequence
acgcgggggagtgcagctggcaccatgggtgtgctccagagcaacttctgcttgctctgagccccctgccctgcctcccctttcaccatgtttcctctgacaagattttaagtacagcaattcaagaagatttctcctcctaaacgacatttatctgaagtctattgcctcttgattgctggaaaagaatcttaaaatcatttcaaaagtaacttataaacaaacttattaaaagtgatgaaaggagcattgaaattaattagcactaatttttcactgtgccaaagtgtgcagtgtccttcagaggaaacaataacagatctggtgagtgtgccatgccagtggggagaattgaatgtccctcatctccctctttccctagggacattagtcatgagtgccgagtgtgcggggtcacagaagtgggtctttctgcatatgcaaagcacatttctggccagttgcacaaagataacgttgatgcccaggaaagagaagatgatggaaaaggagaggaagaggaagaagattattttgacaaggaactcattcagttaataaaacaaaggaaagaacaaagtcgacaagatgaaccttccaatagcaaccaagaaataaactctgatgacagacgaccccaatggagacgagaagaccgaattccttaccaagacagagagagttacagtcagcctgcatggcatcatcgtggacctccacagcgggattggaaatgggaaaaagatggctttaataatactaggaaaaacagctttccacattctttgaggaatggtggtggaccaagaggacgttccgggtggcataagggtgttgcaggaggctcctcgacttggtttcacaaccatagtaattctggaggtggttggctttcaaatagtggagcagtagattggaatcataatggtacaggaaggaattccagttggctttctgaaggaacaggtggcttttccagttggcatatgaacaacagtaacggaaactggaaatccagtgtacgtagtacaaataattggaattacagtggccctggagacaaatttcaaccaggcagaaacagaaattctaactgtcaaatggaagacatgactatgctatggaacaagaaatctaataagtcaaacaaatacagtcacgacagatataattggcagcggcaagaaaatgacaaacttggtacagttgccacatatagaggtccttctgaaggatttacaagtgataaatttccttcagaaggcttactcgacttcaattttgagcagctggaaagccaaaccactaaacaagcagacactgctacttccaaagttagtggaaagaatggcagtgcggcaagggaaaagcctcgtcgctggacgccttacccttctcagaagactctggatttacagtcgggattgaaagacatcactggtaacaagtcagaaatgatagagaaacctctctttgattttagcttgataactacaggaatacaggagccccaaactgatgaaacacgtaattccccaacacagaaaacacaaaaagaaatacatactggatctcttaatcacaaggcctcttctgattccgctgcttccttcgaggtggtgagacagtgccccactgcagaaaaacctgaacaagagcatacaccaaataaaatgccatcattgaaatccccactccttccatgtccagccactaaatcattgtctcaaaagcaagatccaaagaatatctcaaaaaacaccaaaacaaattttttttcccctggagaacactcaaatccctcgaacaagcccactgtggaagataaccatggtccttacatatccaaactgcgtagttcatgtcctcatgttttaaaagggaataaaagtacatttggctctcaaaagcaatctggtgataatttaaatgatactttacgaaaggccaaagaggtgctacagtgtcatgagtcattgcaaaatccacttcttagcacttctaaaagtaccaggaactatgcaaaagcaagtagaaatgtagaagaatctgaaaaagggtctttgaaaattgagtttcaagtgcacgcactagaagatgaaagtgatggagagacatctgacacggaaaagcatggaacaaaaattggaaccctaggttctgcaactacagaattgttatctggcagcactcgaactgctgatgagaaagaggaggatgaccgcatcctgaagacttctagagagctatccacttccccatgtaatcccatagttcgccagaaagaatctgaattacaaatgacatctgcagccagtccacaccctggcttattgctagacttgaaaacctctctagaagatgcacaggttgatgactctattaaatctcatgtatcttatgaaacagaaggctttgagagtgctagcttggatgcagagcttcaaaaaagtgacatcagtcagccctcgggccctctcctgcctgaactaagtaagcttggctttcctgcctcacttcagagggatctaacccggcacattagtttgaagagcaaaactggagtacaccttcctgagccaaacctcaatagtgcccgccgcattcgcaatattagcggtcaccgaaagagtgagacagagaaggagtctgggctcaagccaaccctacggcagattctaaatgcatctcggagaaatgtcaactgggaacaggtcattcagcaagtaaccaagaaaaagcaagagctgggcaaaggcttacccaggtttggcatagaaatggtaccccttgttcaaaatgaacaagaagccttagatttggatggggaacctgatctgtccagtctagaaggattccagtgggaaggtgtttccatttcctcgtcccctggcttggcaagaaagcgaagcctttctgagagcagcgtgatcatggacagagctccttctgtgtatagcttcttcagtgaggaaggtacaggcaaagaaaatgagccccagcagatggtttcacctagtaactcattgagggctggacagagccagaaagcaaccatgcacctcaaacaagaagtgacacctcgggctgcctccctccgaacaggtgaaagggctgaaaatgttgctacccaaaggcgacatagtgcacaattatcctctgaccatataatacctttgatgcatttggcaaaagacttgaacagccaggagaggtctataccaccgtcagagaatcagaattcccaggagagtaatggagagggaaactgtctgtcatcaagcgcatcctcagcccttgcgatctccagtttagcggatgcagccacagatagtagctgtacctctggtgctgaacaaaatgatggccaaagtattagaaagaaacgaagagccactggagatggatcttctcctgaactcccaagtcttgagagaaaaaataaaagaaggaaaattaaaggaaaaaaagaacgttctcaggttgaccagctgctgaatatttctttaagggaggaagaacttagtaagtcattgcagtgcatggataacaatcttctgcaagcccgtgcagcccttcagacagcttatgtggaagttcagaggctacttatgctcaagcagcagataactatggagatgagtgcactgaggacccatagaatacagattctacagggattacaagaaacatatgaaccttctgagcacccagaccaggttccctgtagcctcacacgagaacgaaggaacagtagatctcaaacatccattgatgccgcactgctgcccactccctttttcccactttttctggagcctccatcttcccatgtgtctccatcacccaccggagcctctcttcaaataaccacgtctcctactttccaaacccatggcagtgtccctgctccagactcatcagttcagattaaacaagagcccatgtctcctgaacaagatgagaatgtgaatgctgtgccaccaagctctgcctgcaatgtgtccaaggaattactggaagctaatagagagatcagtgacagttgtccagtttatccagtcatcactgctagattgtccttaccagagtcaacagaaagtttccatgagcctagccaagaactgaagttttctgtggagcaaagaaataccagaaacagagaaaactctccctcttcccaatcagctggtctttctagcataaataaagaaggggaagagccaaccaaaggcaatagtgggtctgaagcctgtaccagttcttttctaagattgtcttttgcttcagaaacccctttggagaaggaaccccactctccagctgaccagcctgaacaacaggcagaatccactttgacatcagctgagactaggggaagcaagaaaaagaagaaactccggaagaagaaaagtctacgggctgcccatgttcctgagaatagtgacactgaacaggatgttttgactgttaaacctgtaaggaaagtaaaagctggaaagttaattaaaggggggaaagtaacaacctccacttgggaagacagcaggactggtcgggagcaggagagtgtcagagatgagccagatagtgactcgtctctggaagtcctagaaattcctaatcctcagttagaagtagtagccattgattcttcagaatcaggagaagagaaaccagacagcccatctaaaaaggatatttggaactctacagagcaaaacccactagaaacgtctcgttctgggtgtgatgaagttagctctaccagtgaaattggcactcgctataaagatggcatccctgtaagtgtggcagaaactcagactgtgatctcctccataaaaggatcaaagaattcttcagaaatatcttcagagccaggagatgatgatgaacccacagaaggaagctttgagggacaccaagctgccgtaaatgcaattcagatatttgggaacttgctatatacctgttcagcagataaaactgttcgggtttataatctggtgagtcggaaatgtattggtgtctttgagggtcatacctccaaagttaactgcctcctggttactcagacctccgggaagaatgctgccctttacaccgggtccagtgaccataccatccgctgctataatgttaagagccgagagtgtgtggagcagttacagctggaagaccgggtcctctgcctccacagtagatggcgaatcctctatgcgggactggcaaatggcactgtggtcaccttcaacataaagaacaacaaacgacttgagatctttgaatgccatggccctcgggcagtcagctgtcttgctacagctcaggaaggtgcccgaaaactgctggtcgtggggtcttatgactgcacaattagtgtacgcgatgcccggaatggactgctcctcagaactctggagggccatagcaaaaccattctttgcatgaaggtggtgaatgatctcgtgttcagtggctccagtgatcagtcagtccatgctcacaacattcacactggtgagctcgtgcggatctataaaggtcacaatcatgcagtgactgtggtgaatatcctaggaaaagtgatggtgactgcttgcctggataaatttgttcgtgtctatgaattacagtctcatgatcgattacaagtttatggaggacacaaagacatgattatgtgtatgaccatccataaaagcatgatttacactggctgttatgatggcagtattcaggccgtgaggcttaatctgatgcagaattaccgctgttggtggcatggttgctctctgatatttggcgttgtagatcatttaaaacaacacttgctgaccgaccacactaatcccaacttccagactctgaaatgtcgctggaagaactgcgatgcttttttcactgctaggaaaggatccaaacaggatgctgcaggacatattgaacgacatgctgaagatgacagcaaaattgattcatgaagttttttgcctcccacgttgggaagtcattagttgaactattttcacattggccccccacacaggccactctcttccctttcttggtgaagtaaggaaggagaaagtggttactagccaggcatacccctagcataagtctgggcagctctatgggatgataaattacacttttaagttcttgctggaggttttaaatagatttagacaaatgttaaggaaccatacttctctgggacagcatggcatatagtgatatatgctatttgcgttctccagatgtttattgaagatacagatcctaattggttacccagtttgaccctaatcatatgtatattttattgatttcagtttgcaatttttaatttatgttcttatgatggtttaaacctatagtcaggcttttaagtacaagtttgtttaagtgccagactttgaggatcagttttaatttctccatttgtaatagctgggtatttaaactggaagcaaatagttttctttcttaacaattatgtgcagtgtgtgtcactgttttcttgctttatagatagagctggctttaagtgctaaaggacacagtagatttttgacaaacagtggctgctctgctgactatcttttaggaattcaggaagcaaatcacatagtgacaagtccttacagacaccacttctagtaaatctctgtaaatgtggatagaaagctcagtgtgaggcagtgcgtagacctaacgtctacctttacatctgctgttgaacctgggcactacctgttacagatcctgtcaggctgttgaactggaggtgtacctttatcttcctttctagtgtctgaccctgcaagcctaatgttggtttgaacccttttggtttgttcagttgccagcctccatctctcccactgtatggccgtgcctagaccgatggcagccatcgaatattcctctgggctcacggggtgttttccacccccctgcagcaactaagatggtgggggagagggggttagaataaagcatctgaatacagttttcaggacctcaagcagacttcctagagacttgtttctgagacagttctttgccttcacttccctgctagctgggaaagaagagtggagcagagactctgcctggccactgagaacagccaaattcacaaaccctcagtggggctttgtttttggattttctccggactcatcagtaaacctgtagaagtgtcgctttccagccttttgtttctggatcctcaaaactcagaacgtggccgggcgtggtggctcacgcctgtaatcccagcactttgggaggctgaggcaggcagatcacctgaggctaggagttgcagaccagcctggccaacatggcaaaaccccgtctctactaaaaatacaaaaagccgggcgtggtgggcgcctgtaatcccagctgctcaggaggctgaggcaggagaatcgcttgaacccgggaggcagagattgcagtaagctgagatcgtgccactgcactccagcctggtgacagagtgagactccgtctcaaaaaaaaaaaaaaaaactcagcttcttcagagagataaaattgggggaggagcccagggccacataccaagctttgggacatggtgcctcatgctctctgggattgcagaccatccaggtctgtcttcgcccctgttagtgcacatatatccactcacatgtcttccctcaggctatcgggcagggggacttcaccagggggtttatggataggcttcaagagggtctgtgagcccccagaaattgtgtgtgagactgagtatgtgttcttttttccaggaaaggctccagtggttcttacttgatccaaaaaatgtcaagaattaatctaggaggccgggcctggtggctcacacctgtaatcccagctctttgggaggccgaggcgggtggatcactcaaggtcaggcatttgagaccagcctggccaacatagtgaaaccccgtctctattaaaaatacaaaaattagctgggtgtggtggtatgtgcctgtagtctcagctactcaggaggctgagacaggagaatcacttgaaccctggaggtagaagttgcagtgagccaagatcatactactgcactccagcctgggcgacaagagtgaaactccacctcaaaaaaaaaaaaaaaagagttaatctaggagataatgaatggcctagtactagataatatatggccccacaagctcttgacttctgtccttggggaaagccattttgttaaccacactagtgagatttacatgatgcttaatggagaacagagaagatcttgttgcaaaaggtgtattaaatatttgtgctgtttctgtatgagattgagaagcttttcccacctctcacccctatttcctataaggatatccagagaagccaaactgttctgtgggtttgggaatggtcatttcccgggaaaatgcatctggatcgatgactaaacctggcccttttctctgggctgtagtgaagccgcattttcacgctggctggcagtgtgctgagagcctcgaatgctctgcggcgtagtgcccttctgccctgcctgacgatgtatcgaaaagatgagagtgaaggagactttgtgcagcaggaaacgggtaggtgaggtgttgggcagttgtgggaacttctgagagtattacagagtggtagaatcggtaagaactctgatttggacttcgctttggtggaactgtgtgcctatacctgcctgtgtgtgtgcaagtgtgcaggttcctttgtatgtatgtgtacgtgtgggaacctgtgtttgtcatatttttcttcatttcacaaaggctttttttgaagcagtggcagtatgcctttgtttcaagaacacatgaaattcttttaacaccagattagtgtgttaccccaaatgaacggttctagccctctattaagaaataaagggaccataagcattttggctgcttatggctgtgtgttactacttacaagagtcttgaaaattatacagaactttgccttctttttttaatgtcttccacaatgttgtgactgattataaccctgtttcccctcagagaagagctatggctcagggatctgtgttgactctggcatttagtggctttgtgaaggaaagaaaccattaaatgacctgacaaaaactgactcatgtctttaaagtagttgaagccacttttagaatgttactctcggttgcttttgtctaattctaatggcttaaagccaagaaaaccatagtataaatctttttgtgtacctatgctagtgtttaaatggcagttcgttgtgataaagtatcagtcacttcaagttttctgtgaaagtttttaattaggttaaaaataattttggcatacgtctctactcagtttataaagcagttccacaccatgcaaacaaaactctaacagcaaaggttatcttgacctgatgttacttgaatctgagagaaagtcattacttactactgcactcctgcttttgtgggaaaaattttcttcttccccagaagagttaacagttgagtgttcagctcctgacttacctttaatttagaggcaatattattactgtttaagtgattatttgcttaacacaggttttattttgtctttttgctggtagattatacaagggacaactttagtgatgaggcatgtggatgatttggtgggagtaggtatatacttagtggaatggtttattttatggaagagaattcattggaggtgagattgaagtatattgtgaagtgggatttgaacagcacatatgctctggtttgctcaaataactgcagtttatgcttacatctaaattttgtttctgttacctaaacgggagcttctagaattacgaaggccatacctgccacatttataaaataatggttttatccctgcccccaaatcatcaggttcctcgggtttaagagaagtggtctaatagacaggaatagaagttgtggtggaggtgatttgggatagactaggtttccttatgcaagtggatatgagctcctcatagaaaccagacctactgtattagacagtaacctctaacctcacctccaagcccaagtatatggccctgctgggttacctggtgactacatttcccagattcactctaaattcaaggtagtgacccaaataaattgggaaaggagggggtcaaggaggaaaagctgttgaaaatctttctcctatttaagagaaatatatgccctagagctgctccagcacccttggtttctgatttttttaatattgaatatggattagaagaatgaaatcagatgacacctgactgcaaaaatgtttataagcaaatagccttcttacattttggtataaagctgtgaacttcgtaactttgtaaagcaagatataaagcaaatacaagaggaaaataaagtacttttactaattgaaaaaaaaaaaaaaaaaaaa

SEQ ID NO: 212292 - DNA, 5652 bp, Artificial Sequence
  derived and/or modified sequence
atgccagtcggcagaattgagtgtccaagttcaccatcatttccacgagacatatcacatgaatgccgagtctgtggagtaactgaagttgggctaagcgcatatgcaaaacatatctctggccagctgcataaggacaacgtggacgcccaagagcgtgaggacgatgggaaaggcgaagaagaggaagaagactacttcgacaaagagctcattcagctgattaaacagcgtaaggaacaatctagacaggacgaaccgagtaactcgaatcaggagattaacagcgatgatcggcgccctcagtggaggcgcgaagatcgcatcccatatcaggaccgggaatcttacagccagcctgcctggcatcaccggggcccaccccagagagattggaaatgggagaaagacgggttcaacaacactagaaagaactctttcccgcatagcctgaggaatgggggaggacctcgcggcaggtctggctggcataagggggtggctggaggaagcagcacctggtttcataaccacagcaattcaggcggtggatggcttagcaatagtggcgccgtggactggaatcataatgggacagggaggaatagttcttggctgtcagaaggaacaggcggctttagttcctggcatatgaacaactccaatggtaactggaagagctcagttcgatccacgaataattggaactattccgggccaggtgataaattccagccgggtcgaaacagaaacagtaactgccagatggaggacatgaccatgctctggaataagaagtcaaacaagtccaacaaatatagccacgatcgctacaattggcaacgccaagaaaacgacaagctgggaacagttgctacgtaccggggaccgtccgaggggttcactagtgacaagtttccatccgaaggacttctggacttcaattttgaacagttagaatcccagacgacaaaacaggctgacactgccaccagcaaagttagcggcaagaacggctcagctgccagagaaaaacccagacgatggacgccatatccctctcaaaaaacactggacctgcaatcgggactgaaggatatcacaggaaacaagtctgaaatgattgaaaagcctctcttcgacttctctctaataactaccggcattcaggagccgcagaccgacgagactcggaacagccccacccagaaaacacagaaagaaatccatacgggaagcctcaaccacaaggcatcaagtgactccgcagccagctttgaagtagtaagacagtgtcccaccgcagaaaagccagagcaggaacatacaccaaataaaatgccctctttgaaatcaccactgttaccttgccctgccactaaaagtttgtcccaaaagcaagatcccaagaacatctccaaaaatactaaaactaatttcttcagtcctggcgaacactcgaatcctagcaacaagcctaccgtggaggataaccatgggccatacatctctaagttacgcagtagctgtccccatgtgcttaagggtaacaagtccacgtttgggtctcagaagcagtccggcgacaatctgaatgatactttacgcaaagccaaggaagtgctccaatgccacgagtcactccaaaatcccctcctgtctacaagcaaaagcacccggaactatgctaaagcgtctcggaacgttgaggaatcggagaagggtagtctgaaaattgagttccaagtccatgctctggaagatgaatcggatggcgaaaccagtgatacagaaaagcacggcacgaaaatcggcactttagggtcagccactaccgagttgctcagcggctccacacgtaccgcagatgaaaaggaagaagatgaccgaattctgaagacctctcgagagctcagtacaagcccttgcaatcctatcgtgagacagaaggaatctgagctacagatgacatccgctgcgtctccccatcctggcctcctcctggatttgaaaacttctctcgaagacgctcaagttgatgacagcatcaagagtcacgtatcctacgagaccgagggatttgaatccgctagcctggacgcagaactacagaagtctgatattagtcagccttccggaccacttctgcctgagctttcaaaactggggtttcctgcctccctgcagcgtgatctgacgcgacacatatccttgaaatcaaagactggggtgcacctgccagagcccaacttgaactccgctcgacggattaggaacatctcgggacatcgaaaaagcgagacagaaaaggagtcaggactgaagccaaccctgagacaaatcctaaacgcttccaggaggaacgtaaactgggagcaagtaatacagcaggtgaccaaaaaaaaacaagagctgggcaaagggttacctcgctttgggattgagatggtgcctctggttcagaacgagcaggaggctctcgatttagacggcgagcctgatctgtccagcttggaaggctttcaatgggagggagtgtccatttctagtagtcctggactggccaggaagagaagtctcagcgaatcatctgttatcatggaccgcgcaccaagtgtctactcatttttttccgaggagggaacgggaaaggagaacgagccacagcagatggtgtccccatctaacagtctccgggctggccagtcacaaaaagcgaccatgcacctgaagcaagaggtgactcctagagctgcgagcctccggaccggagagagagcagaaaacgtggctacacagaggagacacagtgcccagctcagtagtgaccacatcatccctctgatgcacctggcaaaggatctaaattcccaggagaggtcaattccgccttctgaaaaccaaaacagtcaggagtctaatggagaaggtaactgcctgagctcctccgcatcatcagccctggccatcagctccttggccgatgcggcgaccgattccagctgcacttccggtgctgaacaaaacgacggccagagcattaggaaaaagcgtagggctacgggagatggatcaagtcctgagctacccagcctagagaggaagaataaacgcagaaagatcaaaggaaaaaaggaaaggtctcaggtagatcaactgctcaacatctctctccgggaggaagagctttccaagtcacttcagtgcatggacaacaacctgttgcaggctagagccgccctgcaaactgcttacgtcgaagtgcaacgcttattaatgctcaaacagcagatcaccatggagatgtctgcgctgcgcacacacagaatacagatcctgcagggcctgcaggagacgtatgagccatcagagcacccggaccaggtgccctgttcgctgacacgggagagacggaactccaggtcacagacttctatagacgccgccttgctgccaacgcccttcttccctttgttcctggaaccaccttctagtcacgtgagtccttctccaactggggcatctctgcagattacaaccagccccacctttcaaacccacggcagtgtcccagcacccgactcttctgtgcaaataaaacaggagcccatgagccccgagcaggatgagaatgtcaacgccgtgcccccctctagcgcatgcaatgtcagtaaagaattattagaagcaaacagagagatctcagattcatgtcctgtgtacccagtgatcacagccagactgtcgctccctgaaagtacggaatctttccatgaaccctctcaagagctgaagttctctgtcgagcagagaaatactcggaatagggagaactctccatcgtcccagtctgccggcctcagctctattaacaaagagggggaagagcctacaaaggggaatagtggatcggaagcctgtacgtcatccttcttacgtctgtcgtttgcttccgaaactcccctggaaaaggagccacactcccccgccgatcagcctgagcagcaggccgaaagtactttgacttctgccgaaactcggggatctaagaagaagaaaaaactgaggaaaaaaaagagtttgagagcggcccacgttcccgaaaattctgacaccgagcaggatgtactgacagtgaagccagtgaggaaggtgaaggctggcaaactgatcaaggggggtaaagttacaacgagcacttgggaggattctcgtacgggccgagaacaagaatctgtgcgggacgagcccgatagcgacagttcactggaagttctggaaatccccaatccgcagctcgaggttgtcgccatcgactcgagtgaatctggtgaagagaaacccgatagtcccagcaagaaagacatttggaactctacagagcagaaccccttagagacaagcagaagcggatgtgatgaggtttccagcacctctgagattgggacccgatacaaagatggcatcccagttagcgtggcagaaacacagaccgttatctcgtcaattaagggatccaaaaatagctctgaaatctcctctgagcccggcgatgatgatgaaccgaccgagggctcatttgagggacaccaagctgccgtgaacgcaatccaaatttttggtaacttgctctacacatgtagcgccgataagaccgtccgcgtgtataatcttgtcagtagaaagtgtattggagtgtttgagggccatacctccaaggtgaattgccttttggtgacccagacctcaggaaaaaatgccgctctttacaccggctcgagcgaccatactattcgctgctacaacgtaaagtctcgcgaatgtgtggagcaacttcagctggaagaccgagtgctttgccttcacagccggtggcggatcttatacgccggcctggcaaatggcacagtggtgacattcaacatcaagaacaataaacgcttggagattttcgagtgtcacggcccccgtgccgtgtcctgtcttgccacagcacaggaaggtgctcggaaactcttggtagttggcagttatgattgcacaatcagtgtgcgcgacgctcggaatggactgctccttcgaaccctggagggccattcgaagaccatcctatgtatgaaggttgtcaacgatctggtgttcagcggttctagtgatcagagcgtgcacgcacacaatatacacacaggagagttagtgaggatttacaaagggcataaccacgccgtgaccgtcgtcaatatattaggcaaggtcatggttactgcctgtctggacaagtttgtgcgcgtgtatgaattgcagagtcatgatcgactgcaggtgtacggcgggcataaggatatgattatgtgcatgaccattcacaagtcaatgatttacaccggctgctacgacggcagcatccaggccgtgagattgaatctgatgcagaattataggtgttggtggcatggctgctccctcatcttcggagtagttgatcacttgaagcagcacctgttgactgaccacacgaatccaaatttccagacactcaagtgcaggtggaaaaattgtgatgccttcttcactgctcgaaaaggcagtaagcaggatgccgcagggcacattgagcgacacgccgaggatgatagtaaaatcgattcgtag

SEQ ID NO: 212293 - DNA, 5652 bp, Artificial Sequence
  derived and/or modified sequence
atgcctgtgggcagaattgaatgtcccagcagccccagcttcccccgggacatcagccatgaatgtcgggtgtgtggggtgacagaggtgggcctgagcgcctatgccaagcacatcagcggccagctgcacaaggacaacgtggatgcccaggagcgggaggatgatggcaagggggaggaggaggaggaggactactttgacaaggagctgatccagctgatcaagcagaggaaggagcagagccggcaggatgagcccagcaacagcaaccaggagatcaacagtgatgacagaagaccccagtggaggcgggaggaccgcatcccctaccaggaccgggagagctacagccagcctgcctggcaccaccggggccccccccagagggactggaagtgggagaaggatggcttcaacaacaccaggaagaacagcttcccccacagcctgagaaatggaggcggcccccggggccgcagcggctggcacaagggcgtggccggcggcagcagcacctggttccacaaccacagcaacagcggcggcggctggctgagcaacagcggggctgtggactggaaccacaatggaactggaagaaacagctcctggctgtctgagggcaccggcggcttcagctcctggcacatgaacaacagcaatggaaactggaagagctctgtgcgcagcaccaacaactggaactacagcggccctggggacaagttccagcccggcaggaacagaaacagcaactgccagatggaggacatgaccatgctgtggaacaagaagagcaacaagagcaacaagtacagccatgaccgctacaactggcagaggcaggagaatgacaagctgggcaccgtggccacctaccggggccccagcgagggcttcaccagtgacaagttccccagcgagggcctgctggacttcaactttgagcagctggagagccagaccaccaagcaggccgacacagccaccagcaaggtgtctgggaagaatggcagcgctgcccgggagaagccccggcgctggaccccctaccccagccagaagaccctggacctgcagagcggcctgaaggacatcaccggcaacaagtctgagatgattgagaagcccctgtttgacttcagcctcatcaccaccggcatccaggagccccagacagatgagaccaggaacagccccacccagaagacccagaaggagatccacacaggcagcctgaaccacaaggccagcagtgacagcgctgccagctttgaggtggtgcggcagtgccccacagctgagaagccagagcaggagcacacccccaacaagatgcccagcctgaagagccccctgctgccctgcccagccaccaagagcctgagccagaagcaggaccccaagaacatcagcaagaacaccaagaccaacttcttcagccctggagagcacagcaaccccagcaacaagcccaccgtggaggacaaccacggcccctacatcagcaagctgcggagcagctgcccccacgtgctgaagggcaacaagagcaccttcggcagccagaagcagagcggggacaacctgaatgacaccctgaggaaggccaaggaggtgctgcagtgccacgagagcctgcagaaccccctgctgagcaccagcaagagcaccaggaactatgccaaggccagcagaaatgtggaggagagcgagaagggcagcctgaagattgagttccaggtgcacgccctggaggatgaaagtgatggagagaccagtgacacagagaagcacggcaccaagattggcaccctgggcagcgccaccacagagctgctgagcggcagcaccaggacagcagatgagaaggaggaggatgaccgcatcctgaagaccagccgggagctgagcaccagcccctgcaaccccatcgtgcggcagaaggagagcgagctgcagatgaccagcgctgccagcccccaccctggcctgctgctggacctgaagaccagcctggaggatgcccaggtggatgacagcatcaagagccacgtgtcctatgaaacagagggctttgagagcgccagcctggatgctgagctgcagaagagtgacatcagccagcccagcggccccctgctgcctgagctgagcaagctgggcttccctgccagcctgcagagggacctgaccaggcacatcagcctgaagagcaagacaggagtgcacctgcctgagcccaacctgaacagcgcccggcgcatccggaacatcagcggccacaggaagtcagaaacagagaaggagagcggcctgaagcccaccctgcggcagatcctgaatgccagcagaagaaatgtgaactgggagcaggtgatccagcaggtgaccaagaagaagcaggagctgggcaagggcctgccccgcttcggcatcgagatggtgcccctggtgcagaatgagcaggaggccctggacctggatggagagccagacctgagcagcctggagggcttccagtgggagggcgtgtccatcagcagcagccctggcctggccaggaagaggagcctgtctgagagcagcgtcatcatggaccgggcccccagcgtgtacagcttcttcagcgaggagggcaccgggaaggaaaatgagccccagcagatggtgagccccagcaacagcctgcgggccggccagagccagaaggccaccatgcacctgaagcaggaggtgaccccccgggccgccagcctgaggactggagagcgggcagaaaatgtggccacccagaggaggcacagcgcccagctgagcagtgaccacatcatccccctgatgcacctggccaaggacctgaacagccaggagaggagcatccccccatctgagaaccagaacagccaggagagcaatggagagggcaactgcctgagcagcagcgccagcagcgccctggccatcagcagcctggctgatgctgccacagacagcagctgcaccagcggggctgagcagaatgatggccagagcatcaggaagaagaggcgggccactggagatggcagcagccctgagctgcccagcctggagaggaagaacaagaggaggaagatcaagggcaagaaggagaggagccaggtggaccagctgctgaacatcagcctgcgggaggaggagctgagcaagagcctgcagtgcatggacaacaacctgctgcaggcccgggccgccctgcagacagcctacgtggaggtgcagaggctgctgatgctgaagcagcagatcaccatggagatgtctgccctgcggacccaccgcatccagatcctgcagggcctgcaggagacctatgagcccagcgagcacccagaccaggtgccctgcagcctgacccgggagaggaggaacagccgcagccagaccagcattgatgctgccctgctgcccacccccttcttccccctcttcctggagccccccagcagccacgtgagccccagccccaccggggccagcctgcagatcaccaccagccccaccttccagacccacggctctgtgcctgccccagacagctctgtgcagatcaagcaggagcccatgagccctgagcaggatgaaaatgtgaatgctgtgccccccagcagcgcctgcaatgtgtccaaggagctgctggaggccaaccgggagatcagtgacagctgccctgtgtaccctgtgatcacagcccggctgagcctgcctgagagcacagagagcttccacgagcccagccaggagctgaagttctctgtggagcagaggaacaccaggaaccgggagaacagccccagcagccagagcgctggcctgagcagcatcaacaaggagggggaggagcccaccaagggcaacagcggcagcgaggcctgcaccagcagcttcctgcggctgagctttgccagcgagacccccctggagaaggagccccacagccctgctgaccagcctgagcagcaggccgagagcaccctgaccagcgctgagacccggggcagcaagaagaagaagaagctgaggaagaagaagagcctgcgggccgcccacgtgcctgagaacagcgacacagagcaggatgtgctgactgtgaagcctgtgaggaaggtgaaggccggcaagctgatcaagggcggcaaggtgaccaccagcacctgggaggacagcaggacaggccgggagcaggagagcgtgagagatgagccagacagcgacagcagcctggaggtgctggagatccccaacccccagctggaggtggtggccatcgacagcagcgagagcggggaggagaagccagacagccccagcaagaaggacatctggaacagcacagagcagaaccccctggagaccagccgcagcggctgtgatgaggtgagcagcaccagcgagatcggcacccgctacaaggatggcatccctgtgtctgtggccgagacccagaccgtcatcagcagcatcaagggcagcaagaacagcagcgagatcagcagcgagcctggagatgatgatgagcccacagagggcagctttgagggccaccaggccgctgtgaatgccatccagatcttcggcaacctgctgtacacctgcagcgctgacaagacagtgcgggtgtacaacctggtgtccaggaagtgcatcggcgtgtttgagggccacaccagcaaggtgaactgcctgctggtgacccagaccagcggcaagaatgctgccctgtacacaggcagcagtgaccacaccatccgctgctacaacgtgaagagcagagaatgtgtggagcagctgcagctggaggacagagtgctgtgcctgcacagccgctggaggatcctgtatgccggcctggccaacggcaccgtggtgaccttcaacatcaagaacaacaagaggctggagatctttgagtgccacggccccagggctgtgtcctgcctggccacagcccaggagggcgccaggaagctgctggtggtgggcagctatgactgcaccatctctgtgagagatgccagaaatggcctgctgctgcggaccctggagggccacagcaagaccatcctgtgcatgaaggtggtgaatgacctggtgttttctggcagcagtgaccagagcgtgcacgcccacaacatccacactggagagctggtgcgcatctacaagggccacaaccacgctgtgacagtggtgaacatcctgggcaaggtgatggtgacagcctgcctggacaagtttgtgcgggtgtatgagctgcagagccatgaccggctgcaggtgtatggaggccacaaggacatgatcatgtgcatgaccatccacaagtccatgatctacacaggctgctatgatggcagcatccaggccgtgcggctgaacctgatgcagaactaccgctgctggtggcacggctgcagcctcatcttcggcgtggtggaccacctgaagcagcacctgctgacagaccacaccaaccccaacttccagaccctgaagtgccgctggaagaactgtgatgccttcttcaccgccaggaagggcagcaagcaggatgctgctggccacatcgagagacatgctgaagatgacagcaagattgacagctag

SEQ ID NO: 212294 - DNA, 5652 bp, Artificial Sequence
  derived and/or modified sequence
atgcccgtgggccggatcgagtgccccagcagccccagcttcccccgagatatttcccatgaatgcagggtttgtggggttaccgaggtgggcctgagcgcctatgccaaacacatcagcggccagttacataaagataacgttgatgcacaagagcgggaagatgacggcaagggggaagaggaggaagaagactacttcgataaggaactcattcagcttataaaacagaggaaggagcaatcgaggcaggacgagccatcaaatagtaatcaagagatcaactcggacgatcggaggcctcagtggaggagggaggacaggatcccttatcaggatcgagaaagctattcgcaacccgcctggcaccatcgagggcctcctcagagggactggaagtgggagaaggatggatttaataacacacgtaagaattcttttccccactctctcagaaatggcggaggccctcgcggtcgatctgggtggcacaaaggtgtggccggagggtcttcaacctggttccataaccattcgaacagcggaggcgggtggctcagcaacagtggtgccgtcgactggaaccataacggtacggggcggaactcaagctggctgtccgagggcacaggaggcttcagctcatggcacatgaacaatagcaatgggaactggaagagttcggtacggtctacgaataactggaattacagtgggcccggagataaattccagccaggtcgaaatagaaattctaactgtcagatggaggatatgactatgttgtggaacaaaaaaagcaataagtccaacaaatacagccatgaccgttacaactggcagcgtcaggagaacgataagctcggaaccgtcgccacctatcggggtccgagcgagggctttacatcagataaattcccttctgagggactgctcgacttcaatttcgagcagttggagagccagactactaaacaagctgacaccgcaaccagcaaggtatcaggaaagaatggttcagctgcccgggagaagccccgcagatggaccccatacccctcacagaagaccctggatttgcagtcaggactgaaggacatcactggaaacaaatccgaaatgatcgagaagccactgttcgatttctcccttatcacaacgggaatccaagagcctcagaccgatgagacgcggaactctcccacacagaaaacccagaaggagattcacaccggcagcctgaaccacaaagcctcctccgacagcgccgcatctttcgaggtagtccggcaatgcccaaccgccgaaaagccagagcaagaacatacccctaataagatgcctagtctaaagtccccgttgcttccctgtcccgctacaaagtcgctctctcagaagcaggaccccaaaaatataagtaagaacactaagacgaatttcttcagtcccggagagcactccaatcctagtaacaaaccaactgtcgaggacaaccacggcccctacattagtaagctgaggtcttcatgcccgcatgtcttgaaagggaataaaagcacctttggttcccagaagcagagtggcgataacctgaatgacacactgcggaaggccaaggaggtcctacagtgccacgagtctctgcagaaccctttgttatccacctccaagtctactcggaattacgctaaggcctcccgcaatgtagaagaaagtgaaaaaggatcactgaagattgagtttcaggtacatgccttggaagatgagtcagacggcgagaccagtgacacagagaaacatgggaccaagattgggaccctaggatccgctactacagagttgctgtccggatcaacccgcacagctgatgagaaagaagaggacgacaggattctgaagacatcacgggaactgtctacatcaccctgcaaccccattgtccgccagaaggaatcggaacttcaaatgacctctgccgccagcccacaccctgggttgctgctggacctgaagaccagcctggaggatgcccaggttgatgatagtatcaaaagccacgtcagctacgagacggaaggcttcgagtctgcttcactcgacgcagagcttcagaagtccgacatctcccagccatctggacctcttctgcctgaactgagcaaactgggctttcctgcttcacttcagcgtgacctgactaggcatatttctctgaaaagcaaaaccggcgtgcacctgccagagccaaatttaaactctgcccggcgtattcggaacatttctggccacagaaaaagcgagaccgaaaaagagagcggactcaagcccaccttgcggcagatcctgaatgctagccgccgcaacgtcaactgggaacaggtcatccagcaggtcacaaaaaaaaaacaggagctaggcaaggggctgccgcgctttggcatagagatggtgcctctagtacagaatgagcaggaagcccttgacttggatggtgagccagatctctcttctctggaaggtttccaatgggaaggggtctccattagctcttcccccggtctggcccggaagagaagtctgtcagaaagtagtgttataatggaccgtgccccttctgtctactcttttttcagcgaggaagggacaggtaaggagaatgagccacagcagatggtctcccctagtaacagcctgagagccgggcagtcccagaaggcgacaatgcatctgaaacaagaggtcacacccagggcagcctcattgcggaccggtgaaagggccgagaacgtggcaacccaacgtagacactccgctcaactgagttctgaccacatcatccccctgatgcaccttgcaaaggatctgaactcgcaggaaagatcaatacccccctccgagaaccagaattctcaagagtctaacggcgagggaaattgcctgtcttctagcgctagctccgctctagctatttcctccctcgcagacgctgccaccgacagcagttgcacgagcggcgccgagcagaacgatggccagtccattcgtaaaaaaagaagagcgacgggtgacggcagtagcccggagctgccttcactggaacggaagaacaaaaggcgaaagatcaaaggtaaaaaggagcgctcccaggtggaccagctcctgaatattagccttcgagaggaggagctgtctaaatccctccagtgtatggataataacctgctgcaggccagggccgcattacaaactgcatacgtggaggtgcagagactgctgatgctcaaacagcagataactatggagatgagcgctttgcgcacgcaccgaatccagattctccagggcctccaagagacctatgagccaagtgagcacccagaccaggtgccttgcagtctcactcgggaaaggcgtaactctagatctcagacgtcgatcgacgctgctctgctcccgactccctttttccctcttttcctggagccacccagctcccatgtgtcaccttctcctaccggagccagtctgcaaattactacaagccctactttccaaacacacggaagtgtgcccgccccggattcatctgttcagataaagcaagaacctatgtccccagagcaggatgagaatgttaatgccgtccccccctctagtgcctgcaacgtctccaaagaattgctcgaagctaaccgggagataagtgatagctgccccgtgtatccagtcatcacggcaagattgagcctgcccgagtcaacggagagctttcatgaaccgagccaggaattgaaattcagcgtggagcaacggaacacaaggaatagagagaacagtccaagctcccagagtgcagggctgtcatccatcaataaggagggagaagaacccaccaagggaaacagcgggtccgaagcttgtacaagctcgtttctgcgcctttcatttgccagtgaaacacccctggaaaaggaaccacatagtcccgctgatcagccagaacagcaggccgagtcgaccctgactagcgcagaaacacggggcagcaagaaaaaaaaaaaacttcgtaagaaaaagtcgctcagagcggctcatgtaccagaaaacagcgatactgagcaggacgtgctgactgtgaagccagtgcggaaggttaaagccggcaagctgatcaaagggggtaaagtcactacctctacatgggaggatagcagaaccggaagggaacaggaatctgtgagggatgagcccgattcagatagcagtctggaggtgctagaaataccgaatcctcagttggaggttgtggcaatagattcctctgagtcaggcgaggagaagcctgactcccccagcaaaaaggacatatggaactccactgagcagaaccccctggagaccagtcgttcaggctgtgacgaggtctctagcactagtgaaatcggcacaaggtacaaagatgggatccccgtctcggtggcggaaactcagactgttatcagctcaatcaaagggagcaaaaactcttcggagatctcatcagagcctggagatgatgatgaacctactgaaggctcctttgagggccaccaagccgcggtgaatgccattcagatcttcggcaatttgctgtacacctgctccgcagataaaaccgtcagggtgtacaacctggtcagtcgaaaatgcattggcgtcttcgaaggccatacctcaaaagtcaattgcctcctggtaacacagacttcaggcaaaaatgctgcactttacacaggatctagtgatcacactatccgttgttacaatgtgaagtccagagagtgcgtggagcagctgcagctggaggaccgcgtcctgtgtcttcactctcggtggcggatactgtacgccggactcgccaatggaactgtcgtgacgttcaatatcaaaaataacaagagactcgaaatcttcgagtgccatggcccacgggccgtgagctgcctcgctaccgcgcaggagggcgccaggaaactgctagttgtcggcagttacgactgcaccattagcgtacgcgacgctagaaatggcctccttttacgaacattggagggacacagcaagacaattctgtgcatgaaagtcgtgaatgaccttgtgttttcaggcagctcagatcagtctgtgcatgctcacaacatccatacgggcgaactggtgagaatctacaagggccataaccacgccgtcaccgtcgttaatattctgggcaaggtcatggtgacagcctgtctcgataaatttgttcgggtgtatgagttgcagtctcacgatagacttcaggtctacggagggcataaagacatgataatgtgcatgacgatacacaaatcaatgatttacacaggatgctatgacggctccatacaggccgtgagacttaatctcatgcagaactacagatgttggtggcacggctgcagtctgatttttggcgtcgtcgaccatctgaagcagcacctgttgaccgaccacacaaatccgaactttcagaccctaaaatgtcgctggaaaaattgtgacgccttcttcacagcgcggaagggatcaaagcaggacgcagccggtcacatcgaacggcatgccgaggacgatagtaaaatagactcatag

SEQ ID NO: 212295 - DNA, 5652 bp, Artificial Sequence
  derived and/or modified sequence
atgcctgtgggccgtattgagtgccctagttcacctagtttccctcgtgacattagtcacgaatgcagggtctgcggtgtaactgaggttggactgtctgcctatgcgaagcacatctccgggcaactccataaggataatgtggacgctcaggaacgggaagatgacggcaagggcgaggaggaggaggaggattattttgacaaggagctgatccaattaatcaagcaacgtaaagaacagagtcgccaggacgaacctagtaatagtaaccaggagataaacagtgacgatcgaagaccgcagtggaggcgggaggaccgcattccttatcaagaccgagagtcttatagtcagccagcctggcatcaccgcggaccaccccagcgcgactggaagtgggaaaaggatggatttaacaacaccaggaaaaattcattcccccacagcctcagaaatggcggaggtccacgtggccgatccggctggcacaagggcgttgcaggtggtagttctacatggtttcacaatcattctaacagtggtgggggatggctgagtaattctggtgccgtggattggaatcataacggcacaggcaggaacagcagctggctttcagagggaacgggaggcttttcttcttggcacatgaataactcaaacggcaattggaaatccagcgtcaggagcactaacaactggaattacagcgggcctggggacaagtttcagcccggtcgaaaccgtaattcgaactgccagatggaggatatgactatgttatggaacaaaaaaagtaataaaagcaataaatactcccacgacagatacaattggcagagacaggaaaatgataagctcggaacggttgctacttaccgcggtccctctgaagggtttacatcagataaatttcccagcgaagggctgctggacttcaacttcgagcagctcgaatcgcaaacgactaagcaggccgatacagccacctcaaaggtgtcaggcaaaaacgggagcgccgctcgcgaaaaacctcgcaggtggacaccttacccctcccagaagacacttgacctgcaatccgggcttaaagacattaccggaaataagagtgagatgattgaaaaacctctgttcgatttctctctaatcacaaccgggatccaagagccccagactgacgagacgcggaactcgccgacgcagaagacccagaaagagatccataccggatctctcaatcataaagcatcttccgacagcgccgcaagttttgaagtcgtccggcagtgtccaactgcggaaaagccagagcaggaacatactccaaataagatgccctctcttaagtctcctctgctaccatgtccggcaacgaagagcctgtcgcaaaagcaagatccgaagaatatttcgaaaaataccaagacaaacttttttagcccaggcgagcactctaacccatctaacaagcctaccgtggaagacaaccatgggccatacatctcaaagctgcgttcttcttgtccacacgtgttgaagggtaacaaaagcacctttgggagccagaaacagtccggagacaacttaaatgacacgcttcgcaaggcgaaagaagtcctgcagtgccatgaaagcctgcagaatcccctgttaagcacatccaagagcacacgaaattacgccaaggcatccaggaacgtggaggaatctgaaaagggtagcctgaaaattgagtttcaggtccacgccctggaggacgagtcagacggcgagacgtcagacactgagaagcacggcaccaaaattggaactttagggtccgccaccacagaactcctgtctggatctactcgaacagccgatgagaaggaagaggacgatcgcatcctgaagactagtcgcgagctaagcacaagcccctgtaatcctattgtgaggcagaaagagagtgagctgcaaatgacaagcgcagccagtccccatcccggactcctactggacttgaagacctcactggaggatgctcaggttgatgacagcattaagtcccatgtgtcttatgagactgagggtttcgagtcggcctcactggacgcggagctgcaaaaaagcgatattagtcagcccagcgggcctctactcccggagttatccaaactgggattcccagcgtcccttcaaagggatcttactcgccacataagtcttaaaagtaaaaccggagttcatctccctgagccaaacttgaactccgcccgaagaatcagaaatatcagtggccatcggaaaagtgagaccgaaaaggagagcggactcaaaccaactctacggcagatactgaacgcatccagacgcaatgttaattgggaacaggttatccagcaagtcacaaagaaaaagcaggagctgggcaaaggactcccacggttcgggatcgagatggtgcctctagtgcagaatgagcaggaggccctcgacctcgacggcgagcctgatctgtctagtttagaagggttccagtgggaaggggtgagtataagtagctcacccggattggccaggaaaagatctctgtcagaaagttcagtcatcatggatcgcgctcccagcgtatactctttcttttccgaagaaggcaccggaaaggagaatgaaccacagcaaatggtgtctccttccaattctctcagggctggacagtcccaaaaggccacgatgcacctaaagcaggaagttacaccgcgagccgcttctctaagaaccggcgaacgggctgagaacgttgcaactcagaggcgccatagtgcccagctcagcagcgatcatattatacctttaatgcacctggctaaggaccttaacagtcaagaacgcagcattccccctagcgagaatcagaatagccaggaatctaatggcgaaggaaactgcctgtccagctccgctagttcggccctggccatcagtagccttgcagacgccgcaaccgacagctcttgtactagcggtgcagagcaaaatgacggacagtccattaggaaaaagcggcgagccaccggagatggaagtagccctgagctgccaagtctggagcgcaagaacaagagaaggaagattaaaggaaaaaaagaaagatctcaggtagaccaactgctgaacataagcttgagagaggaagagctcagtaaatccttacaatgtatggacaataatttgctgcaggctagagccgcattacaaacagcatatgtggaggttcagcggctgttgatgctaaaacagcagatcacgatggaaatgagcgccctaaggactcaccgtatccagatcttgcagggcctccaggagacgtacgagcctagcgaacacccagaccaggttccatgttctctgacacgggagcggaggaatagccgatctcagacaagtatcgatgctgctctactacccactcctttttttccgcttttcctggaacccccttcatcacacgtcagtccttcacccacaggtgctagcctccagatcaccacgagtcctactttccagacccatggctcagtgcctgcccctgatagcagtgtacagatcaagcaggagcctatgtccccggaacaggatgagaacgtcaatgctgtgcctcccagcagcgcctgcaatgtctccaaagagctgctggaggctaatcgggaaatctcggattcttgccctgtttatccggtgattacggctcggttgtccttgcccgaatctacagagtcattccacgagccctcccaagagctaaagttctccgtggagcagcggaatacccgtaaccgtgaaaactcgcctagctctcagagcgccggtttgtcatccatcaacaaggagggggaggaacccactaagggtaattccggcagcgaagcatgtacgagctcttttttaagattgtctttcgccagtgagacacctctggaaaaagagccacactcacccgctgaccaaccggagcagcaggcggagtctacactcactagtgctgaaacacgcggatccaagaagaagaaaaaactcagaaagaagaagagcttgcgggctgcacatgtccctgagaattcggatactgaacaggatgtgctcacagttaaaccggtgcgcaaagttaaagctggaaaactgatcaagggaggaaaggtaactacctctacttgggaagatagccgtaccgggagagaacaggaatcggtgagggacgaaccggactccgattccagcttggaggtgctcgaaatccctaatccgcagcttgaggtggtggctattgactcttccgagagcggagaggagaaaccggacagtcctagcaagaaggatatttggaatagcaccgagcagaaccctctggagaccagcagaagcggctgcgacgaagtgtcgagcacgtcagaaattgggactagatacaaggacgggatacccgtgagcgtcgccgaaacacagacggtgatttcgagcataaaaggatccaaaaacagcagcgagatctcttccgaacctggagacgacgacgaacccaccgagggcagctttgagggtcaccaggccgcagttaacgcgatccagatcttcgggaacttactgtatacttgttctgccgataagacagttcgggtgtacaatcttgtgtcacgaaaatgcattggcgtcttcgagggacatacatcaaaagtaaattgccttctggtgactcagacttccggtaaaaacgccgctctgtacacgggatcttcagatcacacgattaggtgttacaacgtgaaatcgcgggaatgtgtggagcagctgcaattagaggatcgcgtgctttgtctgcattccaggtggcgaattctgtatgcagggttggccaacggcactgtggtaacgtttaacatcaagaacaacaaaagattggagatattcgagtgtcatgggcctcgcgctgtcagctgcctggctaccgcccaggaaggtgctagaaaattactggtggtaggatcttatgactgcaccatcagcgttagggacgcaagaaatggcctgctgttgagaaccttagagggacattcaaagaccattctgtgcatgaaagttgtgaacgatctcgtcttctctggttcctccgaccaatccgtccacgcacacaacatacacaccggagaactggtaaggatctataaaggccacaaccacgcagtgaccgtggttaacattctaggtaaggtgatggtaaccgcatgccttgacaaattcgtccgggtctacgagctgcagtcccacgatagactacaggtctacggtgggcataaagacatgattatgtgcatgactattcacaagtcaatgatatatactgggtgctacgacggaagtatccaagctgtgcggttgaacctgatgcaaaactatcgctgctggtggcacgggtgcagcctgatttttggcgtggtggatcatctcaaacagcacctgttgactgatcacactaaccctaactttcaaaccttgaagtgcagatggaagaactgcgatgcgtttttcaccgcgagaaagggttccaaacaggatgcagcaggccatattgagagacatgccgaagatgacagtaagatcgatagttaa

SEQ ID NO: 212296 - DNA, 10459 bp, Artificial Sequence
  derived and/or modified sequence
gagtgcagctggcaccatgggtgtgctccagagcaacttctgcttgctctgagccccctgccctgcctcccctttcaccatgtttcctctgacaagattttaagtacagcaattcaagaagatttctcctcctaaacgacatttatctgaagtctattgcctcttgattgctggaaaagaatcttaaaatcatttcaaaagtaacttataaacaaacttattaaaagtgatgaaaggagcattgaaattaattagcactaatttttcactgtgccaaagtgtgcagtgtccttcagaggaaacaataacagatctggtgagtgtgccatgccagtggggagaattgaatgtccctcatctccctctttccctagggacattagtcatgagtgccgagtgtgcggggtcacagaagtgggtctttctgcatatgcaaagcacatttctggccagttgcacaaagataacgttgatgcccaggaaagagaagatgatggaaaaggagaggaagaggaagaagattattttgacaaggaactcattcagttaataaaacaaaggaaagaacaaagtcgacaagatgaaccttccaatagcaaccaagaaataaactctgatgacagacgaccccaatggagacgagaagaccgaattccttaccaagacagagagagttacagtcagcctgcatggcatcatcgtggacctccacagcgggattggaaatgggaaaaagatggctttaataatactaggaaaaacagctttccacattctttgaggaatggtggtggaccaagaggacgttccgggtggcataagggtgttgcaggaggctcctcgacttggtttcacaaccatagtaattctggaggtggttggctttcaaatagtggagcagtagattggaatcataatggtacaggaaggaattccagttggctttctgaaggaacaggtggcttttccagttggcatatgaacaacagtaacggaaactggaaatccagtgtacgtagtacaaataattggaattacagtggccctggagacaaatttcaaccaggcagaaacagaaattctaactgtcaaatggaagacatgactatgctatggaacaagaaatctaataagtcaaacaaatacagtcacgacagatataattggcagcggcaagaaaatgacaaacttggtacagttgccacatatagaggtccttctgaaggatttacaagtgataaatttccttcagaaggcttactcgacttcaattttgagcagctggaaagccaaaccactaaacaagcagacactgctacttccaaagttagtggaaagaatggcagtgcggcaagggaaaagcctcgtcgctggacgccttacccttctcagaagactctggatttacagtcgggattgaaagacatcactggtaacaagtcagaaatgatagagaaacctctctttgattttagcttgataactacaggaatacaggagccccaaactgatgaaacacgtaattccccaacacagaaaacacaaaaagaaatacatactggatctcttaatcacaaggcctcttctgattccgctgcttccttcgaggtggtgagacagtgccccactgcagaaaaacctgaacaagagcatacaccaaataaaatgccatcattgaaatccccactccttccatgtccagccactaaatcattgtctcaaaagcaagatccaaagaatatctcaaaaaacaccaaaacaaattttttttcccctggagaacactcaaatccctcgaacaagcccactgtggaagataaccatggtccttacatatccaaactgcgtagttcatgtcctcatgttttaaaagggaataaaagtacatttggctctcaaaagcaatctggtgataatttaaatgatactttacgaaaggccaaagaggtgctacagtgtcatgagtcattgcaaaatccacttcttagcacttctaaaagtaccaggaactatgcaaaagcaagtagaaatgtagaagaatctgaaaaagggtctttgaaaattgagtttcaagtgcacgcactagaagatgaaagtgatggagagacatctgacacggaaaagcatggaacaaaaattggaaccctaggttctgcaactacagaattgttatctggcagcactcgaactgctgatgagaaagaggaggatgaccgcatcctgaagacttctagagagctatccacttccccatgtaatcccatagttcgccagaaagaatctgaattacaaatgacatctgcagccagtccacaccctggcttattgctagacttgaaaacctctctagaagatgcacaggttgatgactctattaaatctcatgtatcttatgaaacagaaggctttgagagtgctagcttggatgcagagcttcaaaaaagtgacatcagtcagccctcgggccctctcctgcctgaactaagtaagcttggctttcctgcctcacttcagagggatctaacccggcacattagtttgaagagcaaaactggagtacaccttcctgagccaaacctcaatagtgcccgccgcattcgcaatattagcggtcaccgaaagagtgagacagagaaggagtctgggctcaagccaaccctacggcagattctaaatgcatctcggagaaatgtcaactgggaacaggtcattcagcaagtaaccaagaaaaagcaagagctgggcaaaggcttacccaggtttggcatagaaatggtaccccttgttcaaaatgaacaagaagccttagatttggatggggaacctgatctgtccagtctagaaggattccagtgggaaggtgtttccatttcctcgtcccctggcttggcaagaaagcgaagcctttctgagagcagcgtgatcatggacagagctccttctgtgtatagcttcttcagtgaggaaggtacaggcaaagaaaatgagccccagcagatggtttcacctagtaactcattgagggctggacagagccagaaagcaaccatgcacctcaaacaagaagtgacacctcgggctgcctccctccgaacaggtgaaagggctgaaaatgttgctacccaaaggcgacatagtgcacaattatcctctgaccatataatacctttgatgcatttggcaaaagacttgaacagccaggagaggtctataccaccgtcagagaatcagaattcccaggagagtaatggagagggaaactgtctgtcatcaagcgcatcctcagcccttgcgatctccagtttagcggatgcagccacagatagtagctgtacctctggtgctgaacaaaatgatggccaaagtattagaaagaaacgaagagccactggagatggatcttctcctgaactcccaagtcttgagagaaaaaataaaagaaggaaaattaaaggaaaaaaagaacgttctcaggttgaccagctgctgaatatttctttaagggaggaagaacttagtaagtcattgcagtgcatggataacaatcttctgcaagcccgtgcagcccttcagacagcttatgtggaagttcagaggctacttatgctcaagcagcagataactatggagatgagtgcactgaggacccatagaatacagattctacagggattacaagaaacatatgaaccttctgagcacccagaccaggttccctgtagcctcacacgagaacgaaggaacagtagatctcaaacatccattgatgccgcactgctgcccactccctttttcccactttttctggagcctccatcttcccatgtgtctccatcacccaccggagcctctcttcaaataaccacgtctcctactttccaaacccatggcagtgtccctgctccagactcatcagttcagattaaacaagagcccatgtctcctgaacaagatgagaatgtgaatgctgtgccaccaagctctgcctgcaatgtgtccaaggaattactggaagctaatagagagatcagtgacagttgtccagtttatccagtcatcactgctagattgtccttaccagagtcaacagaaagtttccatgagcctagccaagaactgaagttttctgtggagcaaagaaataccagaaacagagaaaactctccctcttcccaatcagctggtctttctagcataaataaagaaggggaagagccaaccaaaggcaatagtgggtctgaagcctgtaccagttcttttctaagattgtcttttgcttcagaaacccctttggagaaggaaccccactctccagctgaccagcctgaacaacaggcagaatccactttgacatcagctgagactaggggaagcaagaaaaagaagaaactccggaagaagaaaagtctacgggctgcccatgttcctgagaatagtgacactgaacaggatgttttgactgttaaacctgtaaggaaagtaaaagctggaaagttaattaaaggggggaaagtaacaacctccacttgggaagacagcaggactggtcgggagcaggagagtgtcagagatgagccagatagtgactcgtctctggaagtcctagaaattcctaatcctcagttagaagtagtagccattgattcttcagaatcaggagaagagaaaccagacagcccatctaaaaaggatatttggaactctacagagcaaaacccactagaaacgtctcgttctgggtgtgatgaagttagctctaccagtgaaattggcactcgctataaagatggcatccctgtaagtgtggcagaaactcagactgtgatctcctccataaaaggatcaaagaattcttcagaaatatcttcagagccaggagatgatgatgaacccacagaaggaagctttgagggacaccaagctgccgtaaatgcaattcagatatttgggaacttgctatatacctgttcagcagataaaactgttcgggtttataatctggtgagtcggaaatgtattggtgtctttgagggtcatacctccaaagttaactgcctcctggttactcagacctccgggaagaatgctgccctttacaccgggtccagtgaccataccatccgctgctataatgttaagagccgagagtgtgtggagcagttacagctggaagaccgggtcctctgcctccacagtagatggcgaatcctctatgcgggactggcaaatggcactgtggtcaccttcaacataaagaacaacaaacgacttgagatctttgaatgccatggccctcgggcagtcagctgtcttgctacagctcaggaaggtgcccgaaaactgctggtcgtggggtcttatgactgcacaattagtgtacgcgatgcccggaatggactgctcctcagaactctggagggccatagcaaaaccattctttgcatgaaggtggtgaatgatctcgtgttcagtggctccagtgatcagtcagtccatgctcacaacattcacactggtgagctcgtgcggatctataaaggtcacaatcatgcagtgactgtggtgaatatcctaggaaaagtgatggtgactgcttgcctggataaatttgttcgtgtctatgaattacagtctcatgatcgattacaagtttatggaggacacaaagacatgattatgtgtatgaccatccataaaagcatgatttacactggctgttatgatggcagtattcaggccgtgaggcttaatctgatgcagaattaccgctgttggtggcatggttgctctctgatatttggcgttgtagatcatttaaaacaacacttgctgaccgaccacactaatcccaacttccagactctgaaatgtcgctggaagaactgcgatgcttttttcactgctaggaaaggatccaaacaggatgctgcaggacatattgaacgacatgctgaagatgacagcaaaattgattcatgaagttttttgcctcccacgttgggaagtcattagttgaactattttcacattggccccccacacaggccactctcttccctttcttggtgaagtaaggaaggagaaagtggttactagccaggcatacccctagcataagtctgggcagctctatgggatgataaattacacttttaagttcttgctggaggttttaaatagatttagacaaatgttaaggaaccatacttctctgggacagcatggcatatagtgatatatgctatttgcgttctccagatgtttattgaagatacagatcctaattggttacccagtttgaccctaatcatatgtatattttattgatttcagtttgcaatttttaatttatgttcttatgatggtttaaacctatagtcaggcttttaagtacaagtttgtttaagtgccagactttgaggatcagttttaatttctccatttgtaatagctgggtatttaaactggaagcaaatagttttctttcttaacaattatgtgcagtgtgtgtcactgttttcttgctttatagatagagctggctttaagtgctaaaggacacagtagatttttgacaaacagtggctgctctgctgactatcttttaggaattcaggaagcaaatcacatagtgacaagtccttacagacaccacttctagtaaatctctgtaaatgtggatagaaagctcagtgtgaggcagtgcgtagacctaacgtctacctttacatctgctgttgaacctgggcactacctgttacagatcctgtcaggctgttgaactggaggtgtacctttatcttcctttctagtgtctgaccctgcaagcctaatgttggtttgaacccttttggtttgttcagttgccagcctccatctctcccactgtatggccgtgcctagaccgatggcagccatcgaatattcctctgggctcacggggtgttttccacccccctgcagcaactaagatggtgggggagagggggttagaataaagcatctgaatacagttttcaggacctcaagcagacttcctagagacttgtttctgagacagttctttgccttcacttccctgctagctgggaaagaagagtggagcagagactctgcctggccactgagaacagccaaattcacaaaccctcagtggggctttgtttttggattttctccggactcatcagtaaacctgtagaagtgtcgctttccagccttttgtttctggatcctcaaaactcagaacgtggccgggcgtggtggctcacgcctgtaatcccagcactttgggaggctgaggcaggcagatcacctgaggctaggagttgcagaccagcctggccaacatggcaaaaccccgtctctactaaaaatacaaaaagccgggcgtggtgggcgcctgtaatcccagctgctcaggaggctgaggcaggagaatcgcttgaacccgggaggcagagattgcagtaagctgagatcgtgccactgcactccagcctggtgacagagtgagactccgtctcaaaaaaaaaaaaaaaaactcagcttcttcagagagataaaattgggggaggagcccagggccacataccaagctttgggacatggtgcctcatgctctctgggattgcagaccatccaggtctgtcttcgcccctgttagtgcacatatatccactcacatgtcttccctcaggctatcgggcagggggacttcaccagggggtttatggataggcttcaagagggtctgtgagcccccagaaattgtgtgtgagactgagtatgtgttcttttttccaggaaaggctccagtggttcttacttgatccaaaaaatgtcaagaattaatctaggaggccgggcctggtggctcacacctgtaatcccagctctttgggaggccgaggcgggtggatcactcaaggtcaggcatttgagaccagcctggccaacatagtgaaaccccgtctctattaaaaatacaaaaattagctgggtgtggtggtatgtgcctgtagtctcagctactcaggaggctgagacaggagaatcacttgaaccctggaggtagaagttgcagtgagccaagatcatactactgcactccagcctgggcgacaagagtgaaactccacctcaaaaaaaaaaaaaaaagagttaatctaggagataatgaatggcctagtactagataatatatggccccacaagctcttgacttctgtccttggggaaagccattttgttaaccacactagtgagatttacatgatgcttaatggagaacagagaagatcttgttgcaaaaggtgtattaaatatttgtgctgtttctgtatgagattgagaagcttttcccacctctcacccctatttcctataaggatatccagagaagccaaactgttctgtgggtttgggaatggtcatttcccgggaaaatgcatctggatcgatgactaaacctggcccttttctctgggctgtagtgaagccgcattttcacgctggctggcagtgtgctgagagcctcgaatgctctgcggcgtagtgcccttctgccctgcctgacgatgtatcgaaaagatgagagtgaaggagactttgtgcagcaggaaacgggtaggtgaggtgttgggcagttgtgggaacttctgagagtattacagagtggtagaatcggtaagaactctgatttggacttcgctttggtggaactgtgtgcctatacctgcctgtgtgtgtgcaagtgtgcaggttcctttgtatgtatgtgtacgtgtgggaacctgtgtttgtcatatttttcttcatttcacaaaggctttttttgaagcagtggcagtatgcctttgtttcaagaacacatgaaattcttttaacaccagattagtgtgttaccccaaatgaacggttctagccctctattaagaaataaagggaccataagcattttggctgcttatggctgtgtgttactacttacaagagtcttgaaaattatacagaactttgccttctttttttaatgtcttccacaatgttgtgactgattataaccctgtttcccctcagagaagagctatggctcagggatctgtgttgactctggcatttagtggctttgtgaaggaaagaaaccattaaatgacctgacaaaaactgactcatgtctttaaagtagttgaagccacttttagaatgttactctcggttgcttttgtctaattctaatggcttaaagccaagaaaaccatagtataaatctttttgtgtacctatgctagtgtttaaatggcagttcgttgtgataaagtatcagtcacttcaagttttctgtgaaagtttttaattaggttaaaaataattttggcatacgtctctactcagtttataaagcagttccacaccatgcaaacaaaactctaacagcaaaggttatcttgacctgatgttacttgaatctgagagaaagtcattacttactactgcactcctgcttttgtgggaaaaattttcttcttccccagaagagttaacagttgagtgttcagctcctgacttacctttaatttagaggcaatattattactgtttaagtgattatttgcttaacacaggttttattttgtctttttgctggtagattatacaagggacaactttagtgatgaggcatgtggatgatttggtgggagtaggtatatacttagtggaatggtttattttatggaagagaattcattggaggtgagattgaagtatattgtgaagtgggatttgaacagcacatatgctctggtttgctcaaataactgcagtttatgcttacatctaaattttgtttctgttacctaaacgggagcttctagaattacgaaggccatacctgccacatttataaaataatggttttatccctgcccccaaatcatcaggttcctcgggtttaagagaagtggtctaatagacaggaatagaagttgtggtggaggtgatttgggatagactaggtttccttatgcaagtggatatgagctcctcatagaaaccagacctactgtattagacagtaacctctaacctcacctccaagcccaagtatatggccctgctgggttacctggtgactacatttcccagattcactctaaattcaaggtagtgacccaaataaattgggaaaggagggggtcaaggaggaaaagctgttgaaaatctttctcctatttaagagaaatatatgccctagagctgctccagcacccttggtttctgatttttttaatattgaatatggattagaagaatgaaatcagatgacacctgactgcaaaaatgtttataagcaaatagccttcttacattttggtataaagctgtgaacttcgtaactttgtaaagcaagatataaagcaaatacaagaggaaaataaagtacttttactaattg

SEQ ID NO: 212297 - DNA, 5652 bp, Artificial Sequence
  derived and/or modified sequence
atgcccgtgggcagaatcgagtgccccagcagccccagcttccccagagacatcagccacgagtgcagagtgtgcggcgtgaccgaggtgggcctgagcgcctacgccaagcacatcagcggccagctgcacaaggacaacgtggacgcccaggagagagaggacgacggcaagggcgaggaggaggaggaggactacttcgacaaggagctgatccagctgatcaagcagagaaaggagcagagcagacaggacgagcccagcaacagcaaccaggagatcaacagcgacgacagaagaccccagtggagaagagaggacagaatcccctaccaggacagagagagctacagccagcccgcctggcaccacagaggccccccccagagagactggaagtgggagaaggacggcttcaacaacaccagaaagaacagcttcccccacagcctgagaaacggcggcggccccagaggcagaagcggctggcacaagggcgtggccggcggcagcagcacctggttccacaaccacagcaacagcggcggcggctggctgagcaacagcggcgccgtggactggaaccacaacggcaccggcagaaacagcagctggctgagcgagggcaccggcggcttcagcagctggcacatgaacaacagcaacggcaactggaagagcagcgtgagaagcaccaacaactggaactacagcggccccggcgacaagttccagcccggcagaaacagaaacagcaactgccagatggaggacatgaccatgctgtggaacaagaagagcaacaagagcaacaagtacagccacgacagatacaactggcagagacaggagaacgacaagctgggcaccgtggccacctacagaggccccagcgagggcttcaccagcgacaagttccccagcgagggcctgctggacttcaacttcgagcagctggagagccagaccaccaagcaggccgacaccgccaccagcaaggtgagcggcaagaacggcagcgccgccagagagaagcccagaagatggaccccctaccccagccagaagaccctggacctgcagagcggcctgaaggacatcaccggcaacaagagcgagatgatcgagaagcccctgttcgacttcagcctgatcaccaccggcatccaggagccccagaccgacgagaccagaaacagccccacccagaagacccagaaggagatccacaccggcagcctgaaccacaaggccagcagcgacagcgccgccagcttcgaggtggtgagacagtgccccaccgccgagaagcccgagcaggagcacacccccaacaagatgcccagcctgaagagccccctgctgccctgccccgccaccaagagcctgagccagaagcaggaccccaagaacatcagcaagaacaccaagaccaacttcttcagccccggcgagcacagcaaccccagcaacaagcccaccgtggaggacaaccacggcccctacatcagcaagctgagaagcagctgcccccacgtgctgaagggcaacaagagcaccttcggcagccagaagcagagcggcgacaacctgaacgacaccctgagaaaggccaaggaggtgctgcagtgccacgagagcctgcagaaccccctgctgagcaccagcaagagcaccagaaactacgccaaggccagcagaaacgtggaggagagcgagaagggcagcctgaagatcgagttccaggtgcacgccctggaggacgagagcgacggcgagaccagcgacaccgagaagcacggcaccaagatcggcaccctgggcagcgccaccaccgagctgctgagcggcagcaccagaaccgccgacgagaaggaggaggacgacagaatcctgaagaccagcagagagctgagcaccagcccctgcaaccccatcgtgagacagaaggagagcgagctgcagatgaccagcgccgccagcccccaccccggcctgctgctggacctgaagaccagcctggaggacgcccaggtggacgacagcatcaagagccacgtgagctacgagaccgagggcttcgagagcgccagcctggacgccgagctgcagaagagcgacatcagccagcccagcggccccctgctgcccgagctgagcaagctgggcttccccgccagcctgcagagagacctgaccagacacatcagcctgaagagcaagaccggcgtgcacctgcccgagcccaacctgaacagcgccagaagaatcagaaacatcagcggccacagaaagagcgagaccgagaaggagagcggcctgaagcccaccctgagacagatcctgaacgccagcagaagaaacgtgaactgggagcaggtgatccagcaggtgaccaagaagaagcaggagctgggcaagggcctgcccagattcggcatcgagatggtgcccctggtgcagaacgagcaggaggccctggacctggacggcgagcccgacctgagcagcctggagggcttccagtgggagggcgtgagcatcagcagcagccccggcctggccagaaagagaagcctgagcgagagcagcgtgatcatggacagagcccccagcgtgtacagcttcttcagcgaggagggcaccggcaaggagaacgagccccagcagatggtgagccccagcaacagcctgagagccggccagagccagaaggccaccatgcacctgaagcaggaggtgacccccagagccgccagcctgagaaccggcgagagagccgagaacgtggccacccagagaagacacagcgcccagctgagcagcgaccacatcatccccctgatgcacctggccaaggacctgaacagccaggagagaagcatcccccccagcgagaaccagaacagccaggagagcaacggcgagggcaactgcctgagcagcagcgccagcagcgccctggccatcagcagcctggccgacgccgccaccgacagcagctgcaccagcggcgccgagcagaacgacggccagagcatcagaaagaagagaagagccaccggcgacggcagcagccccgagctgcccagcctggagagaaagaacaagagaagaaagatcaagggcaagaaggagagaagccaggtggaccagctgctgaacatcagcctgagagaggaggagctgagcaagagcctgcagtgcatggacaacaacctgctgcaggccagagccgccctgcagaccgcctacgtggaggtgcagagactgctgatgctgaagcagcagatcaccatggagatgagcgccctgagaacccacagaatccagatcctgcagggcctgcaggagacctacgagcccagcgagcaccccgaccaggtgccctgcagcctgaccagagagagaagaaacagcagaagccagaccagcatcgacgccgccctgctgcccacccccttcttccccctgttcctggagccccccagcagccacgtgagccccagccccaccggcgccagcctgcagatcaccaccagccccaccttccagacccacggcagcgtgcccgcccccgacagcagcgtgcagatcaagcaggagcccatgagccccgagcaggacgagaacgtgaacgccgtgccccccagcagcgcctgcaacgtgagcaaggagctgctggaggccaacagagagatcagcgacagctgccccgtgtaccccgtgatcaccgccagactgagcctgcccgagagcaccgagagcttccacgagcccagccaggagctgaagttcagcgtggagcagagaaacaccagaaacagagagaacagccccagcagccagagcgccggcctgagcagcatcaacaaggagggcgaggagcccaccaagggcaacagcggcagcgaggcctgcaccagcagcttcctgagactgagcttcgccagcgagacccccctggagaaggagccccacagccccgccgaccagcccgagcagcaggccgagagcaccctgaccagcgccgagaccagaggcagcaagaagaagaagaagctgagaaagaagaagagcctgagagccgcccacgtgcccgagaacagcgacaccgagcaggacgtgctgaccgtgaagcccgtgagaaaggtgaaggccggcaagctgatcaagggcggcaaggtgaccaccagcacctgggaggacagcagaaccggcagagagcaggagagcgtgagagacgagcccgacagcgacagcagcctggaggtgctggagatccccaacccccagctggaggtggtggccatcgacagcagcgagagcggcgaggagaagcccgacagccccagcaagaaggacatctggaacagcaccgagcagaaccccctggagaccagcagaagcggctgcgacgaggtgagcagcaccagcgagatcggcaccagatacaaggacggcatccccgtgagcgtggccgagacccagaccgtgatcagcagcatcaagggcagcaagaacagcagcgagatcagcagcgagcccggcgacgacgacgagcccaccgagggcagcttcgagggccaccaggccgccgtgaacgccatccagatcttcggcaacctgctgtacacctgcagcgccgacaagaccgtgagagtgtacaacctggtgagcagaaagtgcatcggcgtgttcgagggccacaccagcaaggtgaactgcctgctggtgacccagaccagcggcaagaacgccgccctgtacaccggcagcagcgaccacaccatcagatgctacaacgtgaagagcagagagtgcgtggagcagctgcagctggaggacagagtgctgtgcctgcacagcagatggagaatcctgtacgccggcctggccaacggcaccgtggtgaccttcaacatcaagaacaacaagagactggagatcttcgagtgccacggccccagagccgtgagctgcctggccaccgcccaggagggcgccagaaagctgctggtggtgggcagctacgactgcaccatcagcgtgagagacgccagaaacggcctgctgctgagaaccctggagggccacagcaagaccatcctgtgcatgaaggtggtgaacgacctggtgttcagcggcagcagcgaccagagcgtgcacgcccacaacatccacaccggcgagctggtgagaatctacaagggccacaaccacgccgtgaccgtggtgaacatcctgggcaaggtgatggtgaccgcctgcctggacaagttcgtgagagtgtacgagctgcagagccacgacagactgcaggtgtacggcggccacaaggacatgatcatgtgcatgaccatccacaagagcatgatctacaccggctgctacgacggcagcatccaggccgtgagactgaacctgatgcagaactacagatgctggtggcacggctgcagcctgatcttcggcgtggtggaccacctgaagcagcacctgctgaccgaccacaccaaccccaacttccagaccctgaagtgcagatggaagaactgcgacgccttcttcaccgccagaaagggcagcaagcaggacgccgccggccacatcgagagacacgccgaggacgacagcaagatcgacagctag

SEQ ID NO: 212298 - protein, 675 aa, Artificial Sequence
  derived and/or modified sequence
MTTSHMNGHVTEESDSEVKNVDLASPEEHQKHREMAVDCPGDLGTRMMPIRRSAQLERIRQQQEDMRRRREEEGKKQELDLNSSMRLKKLAQIPPKTGIDNPMFDTEEGIVLESPHYAVKILEIEDLFSSLKHIQHTLVDSQSQEDISLLLQLVQNKDFQNAFKIHNAITVHMNKASPPFPLISNAQDLAQEVQTVLKPVHHKEGQELTALLNTPHIQALLLAHDKVAEQEMQLEPITDERVYESIGQYGGETVKIVRIEKARDIPLGATVRNEMDSVIISRIVKGGAAEKSGLLHEGDEVLEINGIEIRGKDVNEVFDLLSDMHGTLTFVLIPSQQIKPPPAKETVIHVKAHFDYDPSDDPYVPCRELGLSFQKGDILHVISQEDPNWWQAYREGDEDNQPLAGLVPGKSFQQQREAMKQTIEEDKEPEKSGKLWCAKKNKKKRKKVLYNANKNDDYDNEEILTYEEMSLYHQPANRKRPIILIGPQNCGQNELRQRLMNKEKDRFASAVPHTTRSRRDQEVAGRDYHFVSRQAFEADIAAGKFIEHGEFEKNLYGTSIDSVRQVINSGKICLLSLRTQSLKTLRNSDLKPYIIFIAPPSQERLRALLAKEGKNPKPEELREIIEKTREMEQNNGHYFDTAIVNSDLDKAYQELLRLINKLDTEPQWVPSTWLR

SEQ ID NO: 212299 - protein, 641 aa, Artificial Sequence
  derived and/or modified sequence
MAVDCPGDLGTRMMPIRRSAQLERIRQQQEDMRRRREEEGKKQELDLNSSMRLKKLAQIPPKTGIDNPMFDTEEGIVLESPHYAVKILEIEDLFSSLKHIQHTLVDSQSQEDISLLLQLVQNKDFQNAFKIHNAITVHMNKASPPFPLISNAQDLAQEVQTVLKPVHHKEGQELTALLNTPHIQALLLAHDKVAEQEMQLEPITDERVYESIGQYGGETVKIVRIEKARDIPLGATVRNEMDSVIISRIVKGGAAEKSGLLHEGDEVLEINGIEIRGKDVNEVFDLLSDMHGTLTFVLIPSQQIKPPPAKETVIHVKAHFDYDPSDDPYVPCRELGLSFQKGDILHVISQEDPNWWQAYREGDEDNQPLAGLVPGKSFQQQREAMKQTIEEDKEPEKSGKLWCAKKNKKKRKKVLYNANKNDDYDNEEILTYEEMSLYHQPANRKRPIILIGPQNCGQNELRQRLMNKEKDRFASAVPHTTRSRRDQEVAGRDYHFVSRQAFEADIAAGKFIEHGEFEKNLYGTSIDSVRQVINSGKICLLSLRTQSLKTLRNSDLKPYIIFIAPPSQERLRALLAKEGKNPKPEELREIIEKTREMEQNNGHYFDTAIVNSDLDKAYQELLRLINKLDTEPQWVPSTWLR

SEQ ID NO: 212300 - protein, 149 aa, Artificial Sequence
  derived and/or modified sequence
MAVDCPGDLGTRMMPIRRSAQLERIRQQQEDMRRRREEEGKKQELDLNSSMRLKKLAQIPPKTGIDNPMFDTEEGIVLESPHYAVKILEIEDLFSSLKHIQHTLVDSQSQEDISLLLQLVQNKDFQNAFKIHNAITVHMNKASPPFPLI

SEQ ID NO: 212301 - DNA, 2028 bp, Artificial Sequence
  derived and/or modified sequence
atgaccacttctcacatgaatggccacgttaccgaagagagcgattcagaagtcaaaaacgtggacctggcttcgcctgaagagcatcagaagcatagagaaatggcagtggattgtcccggagatctcggcacgaggatgatgcccatacggcgcagtgcccaattggaacggatcaggcaacaacaggaggacatgcggaggcgacgcgaggaagagggtaagaagcaagaacttgacctaaatagttcaatgcgactgaagaaactcgcccagataccccctaaaaccggtatagacaacccaatgttcgatactgaggaggggatcgtgctcgaatcccctcactatgccgtcaagatcttggaaattgaagacctgttctcaagcctgaagcacatccagcacaccctagttgacagccagagccaggaggatatttctctgctgctgcagctggtacagaataaggatttccagaacgcttttaaaattcataacgcaattaccgttcatatgaataaagcctccccccccttcccactcatttccaacgcacaggatctggcacaggaggtgcagaccgtgctgaagcctgtccaccataaggaggggcaggaactcacagctttgctgaatacaccccatatccaggctctcctcctggctcacgataaagttgccgagcaagagatgcagctcgaacccatcaccgacgagagagtgtacgagtctatcggccagtatggtggggagactgtgaagatcgtcagaatcgagaaggctagggatatcccgctcggcgcgacagtgcgaaatgaaatggattctgtgatcatctcgcgcatcgtcaaggggggcgcagctgagaaatccggcctgctgcatgaaggtgatgaagttttagaaatcaatggtatagaaatccggggcaaagatgtgaatgaagtctttgatttgctgtctgacatgcatggaactttaacattcgtgctcattcccagccagcagattaagccgcccccggcaaaggagaccgtgattcatgtgaaggcacattttgactatgatccatcagatgacccatatgtgccatgtcgcgagctggggctgtcttttcagaaaggggatattctgcacgttatttcccaggaggatcccaattggtggcaggcatatagggagggagacgaggataatcagccgctggctggattggtcccgggaaaatcgttccagcagcagagggaggccatgaagcagactattgaggaggataaagagcccgaaaaatccgggaagctctggtgtgcgaaaaagaacaaaaagaagaggaagaaggtcctgtacaacgcaaacaaaaacgatgactacgacaatgaggaaatcctaacttacgaggaaatgtcactgtatcaccagcccgctaatagaaaaagaccaattattcttataggccctcagaactgtggtcaaaacgaacttcggcagaggttgatgaataaggagaaagatagatttgctagcgcagtgcctcataccaccagatcaagaagagaccaagaggtcgctggtcgcgactaccacttcgtcagtcgtcaggcttttgaagccgatatcgccgctggcaaattcatcgaacacggcgaatttgagaaaaacctgtacgggacctccattgatagcgtgaggcaggtcattaatagtggcaaaatatgcctcttgtctcttcggacccagtccctcaagaccctaagaaatagtgatttgaaaccgtacattatctttatcgcacccccatcgcaagagcggctgagagccctgttggcgaaagagggtaaaaacccaaagcctgaagagctgagagagatcatcgaaaaaacgagagagatggaacagaataatggacattatttcgacaccgctatagttaacagtgacctcgacaaggcatatcaggaacttttgcggttgatcaacaaactggacactgagccacagtgggtgccatcaacctggctgaggtag

SEQ ID NO: 212302 - DNA, 2028 bp, Artificial Sequence
  derived and/or modified sequence
atgaccaccagccacatgaatggacatgtgacagaggagagtgacagcgaggtgaagaatgtggacctggccagccctgaggagcaccagaagcaccgggagatggctgtggactgccctggggacctgggcaccaggatgatgcccatcagaagaagtgcccagctggagcgcatccggcagcagcaggaggacatgagaagaagaagagaggaggagggcaagaagcaggagctggacctgaacagctccatgaggctgaagaagctggcccagatcccccccaagacaggaattgacaaccccatgtttgacacagaggagggcatcgtgctggagagcccccactatgctgtgaagatcctggagattgaagatctcttcagcagcctgaagcacatccagcacaccctggtggacagccagagccaggaggacatcagcctgctgctgcagctggtgcagaacaaggacttccagaatgccttcaagatccacaatgccatcaccgtgcacatgaacaaggccagcccccccttccccctcatcagcaatgcccaggacctggcccaggaggtgcagacagtgctgaagcctgtgcaccacaaggagggccaggagctgacagccctgctgaacaccccccacatccaggccctgctgctggcccatgacaaggtggccgagcaggagatgcagctggagcccatcacagatgagcgggtgtatgagagcatcggccagtatggaggagaaacagtgaagatcgtgagaattgagaaggcccgggacatccccctgggcgccaccgtgagaaatgagatggattctgtcatcatcagcagaattgtgaagggcggcgctgctgagaagagcggcctgctgcacgagggagatgaggtgctggagatcaatggaattgagatccggggcaaggatgtgaatgaggtgtttgacctgctgagtgacatgcacggcaccctgacctttgtgctgatccccagccagcagatcaagcccccaccagccaaggagaccgtcatccacgtgaaggcccactttgattatgaccccagtgatgacccctacgtgccctgccgggagctgggcctgtccttccagaagggggacatcctgcacgtgatcagccaggaggaccccaactggtggcaggcctaccgggagggagatgaggacaaccagcccctggccggcctggtgcctgggaagagcttccagcagcagcgggaggccatgaagcagaccatcgaggaggacaaggagcctgagaagagcggcaagctgtggtgtgccaagaagaacaagaagaagaggaagaaggtgctgtacaatgccaacaagaatgatgattatgacaatgaggagatcctgacctatgaggagatgagcctgtaccaccagcctgccaacaggaagaggcccatcatcctgattggcccccagaactgtggccagaatgagctgcggcagaggctgatgaacaaggagaaggacagatttgccagcgctgtgccccacaccaccaggagccggcgggaccaggaggtggccggccgggactaccactttgtgtcccggcaggcctttgaggccgacattgctgctgggaagttcatcgagcacggggagtttgagaagaacctgtatggcaccagcattgacagcgtgcggcaggtgatcaacagcggcaagatctgcctgctgagcctgcggacccagagcctgaagaccctgaggaacagcgacctgaagccctacatcatcttcatcgccccacccagccaggagcggctgcgggccctgctggccaaggagggcaagaaccccaagccagaggagctgcgggagatcatcgagaagacccgggagatggagcagaacaacggccactactttgacacagccatcgtgaacagcgacctggacaaggcctaccaggagctgctgcggctcatcaacaagctggacacagagccccagtgggtgcccagcacctggctgaggtag

SEQ ID NO: 212303 - DNA, 5552 bp, Artificial Sequence
  derived and/or modified sequence
gttttagacttagaggcgcgcgactgcgcgcacccggctggagctgcggagaggaccaatgagcgggcgctctctccgctccggctcgggattgggcaagccgcgccagcctctcacgggcggggtgggactcggatccgcgcgcccactgcgccagagtcccgggggcgcgtgcgcggtctcgcggcggccgcaggggccggtctcgcgcggtctagaagtggagttgctggcggctgcggcggtgacggcggcgacggaggaggcaggcggtggggcgggggcggggactaaggattctgaggtggggagtcgggagtttctggattctttatccggaatttcaagggccgccggagggctgtcgcttctgcagtgcgtaggagcggccggggcgggaggctccgcggagccgaggcgtggagaataagaaagccttgagttttgtgaaaaaccggagaagagaaactaaaaggacagtagaaaaggcttttccagtttgcataatatttccttcatggatactttttcatagcattattatgtgatgtgagaagtttttttttttgaagtaacatggattttatactacagaatcaagagaattggcttataggaaaaattgatttataaaaagtggtacaggttttcatagataaccatgacaacatcccatatgaatgggcatgttacagaggaatcagacagcgaagtaaaaaatgttgatcttgcatcaccagaggaacatcagaagcaccgagagatggctgttgactgccctggagatttgggcaccaggatgatgccaatacgtcgaagtgcacagttggagcgtattcggcaacaacaggaggacatgaggcgtaggagagaggaagaagggaaaaagcaagaacttgaccttaattcttccatgagacttaagaaactagcccaaattcctccaaagaccggaatagataaccctatgtttgatacagaggaaggaattgtcttagaaagtcctcattatgctgtgaaaatattagaaatagaagacttgttttcttcacttaaacatatccaacatactttggtagattctcagagccaggaggatatttcactgcttttacaacttgttcaaaataaggatttccagaatgcatttaagatacacaatgccatcacagtacacatgaacaaggccagtcctccatttcctcttatctccaacgcacaagatcttgctcaagaggtacaaactgttttgaagccagttcatcataaggaaggacaagaactaactgctttgctgaatactccacatattcaggcacttttactggcccacgataaggttgctgagcaggaaatgcagctagagcccattacagatgagagagtttatgaaagtattggccagtatggaggagaaactgtaaaaatagttcgtatagaaaaggctcgtgatattccgttgggtgctacagttcgtaatgaaatggactctgtcatcattagccggatagtaaaagggggtgctgcagagaaaagtggtctgttgcatgaaggagatgaagttctagagattaatggcattgaaattcgggggaaagatgtcaatgaggtttttgacttgttgtctgatatgcatggtactttgacttttgtcctgattcccagtcaacagatcaagccgcctcctgccaaggaaacagtaatccatgtaaaagctcattttgactatgacccctcagatgacccttatgttccatgtcgagagttaggtctgtcttttcaaaaaggtgatatacttcatgtgatcagtcaagaagatccaaactggtggcaggcctacagggaaggggacgaagataatcaacctctagccgggcttgttccagggaaaagctttcagcagcaaagggaagccatgaaacaaaccatagaagaagataaggagccagaaaaatcaggaaaactgtggtgtgcaaagaagaataaaaagaagaggaaaaaggttttatataatgccaataaaaatgatgattatgacaacgaggagatcttaacctatgaggaaatgtcactttatcatcagccagcaaataggaagagacctatcatcttgattggtccacagaactgtggccagaatgaattgcgtcagaggctcatgaacaaagaaaaggaccgctttgcatctgcagttcctcatacaacccggagtaggcgagaccaagaagtagccggtagagattaccactttgtttcgcggcaagcattcgaggcagacatagcagctggaaagttcattgagcatggtgaatttgagaagaatttgtatggaactagcatagattctgtacggcaagtgatcaactctggcaaaatatgtcttttaagtcttcgtacacagtcattgaagactctccggaattcagatttgaaaccatatattatcttcattgcacccccttcacaagaaagacttcgggcattattggccaaagaaggcaagaatccaaagcctgaagagttgagagaaatcattgagaagacaagagagatggagcagaacaatggccactactttgatacggcaattgtgaattccgatcttgataaagcctatcaggaattgcttaggttaattaacaaacttgatactgaacctcagtgggtaccatccacttggctgaggtgaaagaaacatccattctgtggcatgttggacttgatctggcaaaaactgccaataggaggactgcccgacactgcagcaagattgaggataagatggaaggcagcagtataagctgtagatctgttcttagatctcttgaattagtgagacgacagttcccttaggcagtttgtgcatggcatcctttattctctatacatggctttagcggttcttgcctcattttgggattctaaatggaagctttcaacagagcattccattttgtcctgttaaaaccttttgttttcacctaaaccctttctgcttagttgtatctctgtgaaaaacttgtatacacaagcgtccatgtctcacacaaatattgatgtgattattcttaagtgttaaatcattaacacttaaatgacttcattgggaatattgagcagagggactgtgcttctatgcactgggcaaggcagtatttgcttaggaaactaatttagtcatcagagatactttcctaaaaaggaaaaataaaaaacaaaatggtgccactttgggttgaagctactttgttaggcttgaattcatttatatgtcttttgattcttaaaaaaacaaaaaacattccattagaagcaccagtttttttgctcagactttgtggatcagactctacactcaacacactctaatctacttaaaggtatacaaaatatgctgatcttttttaaattatgatttcctgaatttttttcttaagtcgtctcaactgatttactcacttagcttcccttccctcatcagcatagtataatagaatgtatgttacatttttatgaatggcaggtgttcattataatctgtattgacttaaaaagtttcttcctcatgatgctaatagttttttgtatacatgggaggatagcacatttgacagtttttgcatttttatgtatgagcacagtatcctatgactgtgctacgtatatataggtaataaactggaattctgttgatgaatatagctgctgtactgtatattaatatttaatagatcaacaaatggtcattgaaaacacttgtttagcattagaataaaattatatatgtccttgggaaatattatgacagttgactttaagatcaaaaggaagggaagacctgaaagtcatttgaacattttaggaaaagaatattggagagaaaaaggtattaaatatatagaaataggtttttaacctaacaaggtctgcctcttatgacgagaatgcaacagcttggtaaatcataaaagaaacatttaagctaataggattttcgtactgtctctatagctgtagctttaaaattcaacgtatataattggcatggaaacttaatttgcagtcttttcaagcctttaggatagtgtgatgtgtaacaaacaacctcaaatgtgaatgccttgattttatttttatggtgactttagctacagcatttcctatacccagagctaaacactggaataatactgacatcatttaatttaacataagcaattatgtttaaggagtaatttgtgtcatgtacatatttgattgattttttttcttctacataattttatttgaacaaatgtagacagtttatatgtcgcctttttctgttcaaatttgcatggcctattaagttggctggagagtgttttatgtggaaatattttcaagataatgttccttaggaagaaaataacattcttgggttgagggaaggaatgccatacactactgtctcttcagatctgaaatactccagtttagagccaggaaatttcacaggtcacaccgatttttagcattaaaaactaaggaatatacttagcacttacttaatcttttcagttttccagtttacgtctcaggaatgaagtgtagtctatggttgacaatggagttttgtgatcctgcttattgtaactgacaactgttttcaactccaagagctaaactattggcagttcatgttaagttagagtgagggtgtaggtagtgtcagtgagtggctcttgtgcctgctgtagacattaggcctgcactagggccatgtgctgtcaagattcaggaacatggctttaacaagcagatcttgtatcaaggcagaggtgatgccatgccatacttttaggaagtctgagatgataaatatttcaaggtcagtgaagtctatcaatcattctccccttcctcatcagcaatggtagatagaaatgtcctaaacttttctaaatcctagtgatgaggatgtgctgatattcaacatagtccttaaagtgaaaactgagttgttgctgacctccacaaaagaatatggaaaaaagccttgctgtacacctagttgtacagccactctggccaattccatttcctgtccctctgtggttctgactggagaccccagtgtgggggaggtcttaccatttaatatagaaatgatatcaataactaatgctatgtacttggaaaatccaaataaggaagttttaggttggtgcataactttgtttctcaaattttcgttgtcagaacaaatggaaggagaatattatttagactaatccagatttgctttctatgaaaatctaatgtctggattatcttccttttctcatggcctaagaaataaggatcaataaggaatgatttgaatgtaattttgtgaatgtgtggaaaatataaagcagggatttagccttaataaaggtaaccttctgacatctgttgttaatccccctttgtactcttttcctgtatctgcactgttattttgagatgtcatactgtacactgtattgtaaaaataaaaagtaaaattatatttcaaattttaaaagcca

SEQ ID NO: 212304 - DNA, 5006 bp, Artificial Sequence
  derived and/or modified sequence
gggagtttctggattctttatccggaatttcaagggccgccggagggctgtcgcttctgcagtgcgtaggagcggccggggcgggaggctccgcggagccgaggcgtggagaataagaaagccttgagttttgtgaaaaaccggagaagagaaactaaaaggacagtagaaaaggcttttccagtttgcataataggaacatcagaagcaccgagagatggctgttgactgccctggagatttgggcaccaggatgatgccaatacgtcgaagtgcacagttggagcgtattcggcaacaacaggaggacatgaggcgtaggagagaggaagaagggaaaaagcaagaacttgaccttaattcttccatgagacttaagaaactagcccaaattcctccaaagaccggaatagataaccctatgtttgatacagaggaaggaattgtcttagaaagtcctcattatgctgtgaaaatattagaaatagaagacttgttttcttcacttaaacatatccaacatactttggtagattctcagagccaggaggatatttcactgcttttacaacttgttcaaaataaggatttccagaatgcatttaagatacacaatgccatcacagtacacatgaacaaggccagtcctccatttcctcttatctccaacgcacaagatcttgctcaagaggtacaaactgttttgaagccagttcatcataaggaaggacaagaactaactgctttgctgaatactccacatattcaggcacttttactggcccacgataaggttgctgagcaggaaatgcagctagagcccattacagatgagagagtttatgaaagtattggccagtatggaggagaaactgtaaaaatagttcgtatagaaaaggctcgtgatattccgttgggtgctacagttcgtaatgaaatggactctgtcatcattagccggatagtaaaagggggtgctgcagagaaaagtggtctgttgcatgaaggagatgaagttctagagattaatggcattgaaattcgggggaaagatgtcaatgaggtttttgacttgttgtctgatatgcatggtactttgacttttgtcctgattcccagtcaacagatcaagccgcctcctgccaaggaaacagtaatccatgtaaaagctcattttgactatgacccctcagatgacccttatgttccatgtcgagagttaggtctgtcttttcaaaaaggtgatatacttcatgtgatcagtcaagaagatccaaactggtggcaggcctacagggaaggggacgaagataatcaacctctagccgggcttgttccagggaaaagctttcagcagcaaagggaagccatgaaacaaaccatagaagaagataaggagccagaaaaatcaggaaaactgtggtgtgcaaagaagaataaaaagaagaggaaaaaggttttatataatgccaataaaaatgatgattatgacaacgaggagatcttaacctatgaggaaatgtcactttatcatcagccagcaaataggaagagacctatcatcttgattggtccacagaactgtggccagaatgaattgcgtcagaggctcatgaacaaagaaaaggaccgctttgcatctgcagttcctcatacaacccggagtaggcgagaccaagaagtagccggtagagattaccactttgtttcgcggcaagcattcgaggcagacatagcagctggaaagttcattgagcatggtgaatttgagaagaatttgtatggaactagcatagattctgtacggcaagtgatcaactctggcaaaatatgtcttttaagtcttcgtacacagtcattgaagactctccggaattcagatttgaaaccatatattatcttcattgcacccccttcacaagaaagacttcgggcattattggccaaagaaggcaagaatccaaagcctgaagagttgagagaaatcattgagaagacaagagagatggagcagaacaatggccactactttgatacggcaattgtgaattccgatcttgataaagcctatcaggaattgcttaggttaattaacaaacttgatactgaacctcagtgggtaccatccacttggctgaggtgaaagaaacatccattctgtggcatgttggacttgatctggcaaaaactgccaataggaggactgcccgacactgcagcaagattgaggataagatggaaggcagcagtataagctgtagatctgttcttagatctcttgaattagtgagacgacagttcccttaggcagtttgtgcatggcatcctttattctctatacatggctttagcggttcttgcctcattttgggattctaaatggaagctttcaacagagcattccattttgtcctgttaaaaccttttgttttcacctaaaccctttctgcttagttgtatctctgtgaaaaacttgtatacacaagcgtccatgtctcacacaaatattgatgtgattattcttaagtgttaaatcattaacacttaaatgacttcattgggaatattgagcagagggactgtgcttctatgcactgggcaaggcagtatttgcttaggaaactaatttagtcatcagagatactttcctaaaaaggaaaaataaaaaacaaaatggtgccactttgggttgaagctactttgttaggcttgaattcatttatatgtcttttgattcttaaaaaaacaaaaaacattccattagaagcaccagtttttttgctcagactttgtggatcagactctacactcaacacactctaatctacttaaaggtatacaaaatatgctgatcttttttaaattatgatttcctgaatttttttcttaagtcgtctcaactgatttactcacttagcttcccttccctcatcagcatagtataatagaatgtatgttacatttttatgaatggcaggtgttcattataatctgtattgacttaaaaagtttcttcctcatgatgctaatagttttttgtatacatgggaggatagcacatttgacagtttttgcatttttatgtatgagcacagtatcctatgactgtgctacgtatatataggtaataaactggaattctgttgatgaatatagctgctgtactgtatattaatatttaatagatcaacaaatggtcattgaaaacacttgtttagcattagaataaaattatatatgtccttgggaaatattatgacagttgactttaagatcaaaaggaagggaagacctgaaagtcatttgaacattttaggaaaagaatattggagagaaaaaggtattaaatatatagaaataggtttttaacctaacaaggtctgcctcttatgacgagaatgcaacagcttggtaaatcataaaagaaacatttaagctaataggattttcgtactgtctctatagctgtagctttaaaattcaacgtatataattggcatggaaacttaatttgcagtcttttcaagcctttaggatagtgtgatgtgtaacaaacaacctcaaatgtgaatgccttgattttatttttatggtgactttagctacagcatttcctatacccagagctaaacactggaataatactgacatcatttaatttaacataagcaattatgtttaaggagtaatttgtgtcatgtacatatttgattgattttttttcttctacataattttatttgaacaaatgtagacagtttatatgtcgcctttttctgttcaaatttgcatggcctattaagttggctggagagtgttttatgtggaaatattttcaagataatgttccttaggaagaaaataacattcttgggttgagggaaggaatgccatacactactgtctcttcagatctgaaatactccagtttagagccaggaaatttcacaggtcacaccgatttttagcattaaaaactaaggaatatacttagcacttacttaatcttttcagttttccagtttacgtctcaggaatgaagtgtagtctatggttgacaatggagttttgtgatcctgcttattgtaactgacaactgttttcaactccaagagctaaactattggcagttcatgttaagttagagtgagggtgtaggtagtgtcagtgagtggctcttgtgcctgctgtagacattaggcctgcactagggccatgtgctgtcaagattcaggaacatggctttaacaagcagatcttgtatcaaggcagaggtgatgccatgccatacttttaggaagtctgagatgataaatatttcaaggtcagtgaagtctatcaatcattctccccttcctcatcagcaatggtagatagaaatgtcctaaacttttctaaatcctagtgatgaggatgtgctgatattcaacatagtccttaaagtgaaaactgagttgttgctgacctccacaaaagaatatggaaaaaagccttgctgtacacctagttgtacagccactctggccaattccatttcctgtccctctgtggttctgactggagaccccagtgtgggggaggtcttaccatttaatatagaaatgatatcaataactaatgctatgtacttggaaaatccaaataaggaagttttaggttggtgcataactttgtttctcaaattttcgttgtcagaacaaatggaaggagaatattatttagactaatccagatttgctttctatgaaaatctaatgtctggattatcttccttttctcatggcctaagaaataaggatcaataaggaatgatttgaatgtaattttgtgaatgtgtggaaaatataaagcagggatttagccttaataaaggtaaccttctgacatctgttgttaatccccctttgtactcttttcctgtatctgcactgttattttgagatgtcatactgtacactgtattgtaaaaataaaaagtaaaattatatttcaaattttaaaagcca

SEQ ID NO: 212305 - DNA, 567 bp, Artificial Sequence
  derived and/or modified sequence
ctttatccggaatttcaagggccgccggagggctgtcgcttctgcagtgcgtaggagcggccggggcgggaggctccgcggagccgaggcgtggagaggaacatcagaagcaccgagagatggctgttgactgccctggagatttgggcaccaggatgatgccaatacgtcgaagtgcacagttggagcgtattcggcaacaacaggaggacatgaggcgtaggagagaggaagaagggaaaaagcaagaacttgaccttaattcttccatgagacttaagaaactagcccaaattcctccaaagaccggaatagataaccctatgtttgatacagaggaaggaattgtcttagaaagtcctcattatgctgtgaaaatattagaaatagaagacttgttttcttcacttaaacatatccaacatactttggtagattctcagagccaggaggatatttcactgcttttacaacttgttcaaaataaggatttccagaatgcatttaagatacacaatgccatcacagtacacatgaacaaggccagtcctccatttcctcttatct

SEQ ID NO: 212306 - DNA, 2028 bp, Artificial Sequence
  derived and/or modified sequence
atgaccaccagccacatgaacggccacgtgaccgaggagagcgactcagaagtgaagaatgtggacctggcaagtcccgaagagcaccaaaagcacagagagatggcggtggattgtcccggggatctgggcactcggatgatgcccattaggagatcggctcagctggagcggatccggcagcagcaagaagatatgaggcgccgaagagaagaggaaggaaaaaagcaggagcttgatctgaattcctctatgagactgaagaaactcgcccagatcccaccaaagactggcatcgacaatcctatgtttgacacagaggaaggaatcgtactggagtctcctcactatgctgttaaaatcttggagatcgaggacctgtttagttccttaaagcacattcaacacacactggttgatagccagtcccaagaagacatctcgcttctactccagctcgtgcagaacaaagattttcagaacgcttttaaaatccataacgctatcacagttcacatgaataaagctagtccaccctttccactcatttctaacgcccaggatctggcgcaagaggtgcagactgtcctgaagcctgtgcaccataaggaaggccaagagctcaccgccttacttaatacaccccatatccaggcccttctgttggcccatgacaaagttgcagagcaggagatgcagcttgagccaatcactgacgaaagagtttatgagagcattggccagtacggcggagaaacagtgaagatcgtgaggattgagaaagcccgggacatcccactcggggccacagttagaaatgagatggattcagttataatttctcgcatagtgaaaggaggagctgccgaaaagtctggattgttacacgagggggacgaggtactggaaatcaacggcatcgaaatcaggggcaaagacgtgaacgaggtgtttgatctcctgtcagacatgcacggcaccctcaccttcgtcctcatcccatcccagcagatcaaacccccccccgcgaaggaaactgtaattcatgtgaaggctcatttcgactacgatccttcagacgatccctatgtgccatgtagggaattgggactgtctttccagaagggcgacatcttgcatgtgatttcccaggaagatcccaattggtggcaagcgtaccgcgagggggacgaagacaatcagcccctagccgggctggttcccgggaagagctttcaacaacagcgcgaggctatgaagcagacaatagaagaggataaagagccggaaaaaagtggtaagctatggtgtgccaaaaagaacaagaagaagaggaagaaggtgctctataacgccaataagaacgatgactacgacaacgaggagatcctgacctatgaggaaatgtctctttatcaccagccggctaatagaaaaagaccaataattctgatcggacctcaaaattgcgggcagaatgaacttcggcagcgactcatgaacaaggagaaagatcggttcgctagcgccgtgccccacaccacccgaagccggcgcgaccaggaagtcgccgggcgcgattaccacttcgtcagcaggcaagcattcgaggcagacatcgcagccggtaagtttattgaacacggcgagttcgagaagaacctgtatggaacctcgattgattccgtccgccaggtgataaactctggcaagatttgcctgctgtctctccgaacacaatctctgaaaaccctccgcaacagtgacttgaaaccctatataattttcattgcccctccttctcaggagagattacgagccctcctggccaaggaagggaaaaatccaaaaccggaagaattgagagagattatcgagaagacccgggagatggaacagaataacgggcattatttcgacaccgcgatcgtcaacagcgacctggacaaagcatatcaggaactgttgcgattgattaacaaactggacactgagccgcagtgggtgccttcaacctggctcagatag

SEQ ID NO: 212307 - DNA, 2028 bp, Artificial Sequence
  derived and/or modified sequence
atgactacgagccatatgaacgggcacgttaccgaagaaagtgactctgaagtgaaaaatgttgatttggcctcgccggaggagcatcagaagcaccgagaaatggcggtcgactgtcccggtgatcttggaacacgaatgatgccgatccggagatcagcccagctggagcgcatccggcagcaacaggaagacatgagacgtaggagagaggaggaaggaaaaaaacaggagctcgacttgaattcctctatgcgtctgaaaaagctggcccagattccccctaagacaggtatcgataatcccatgtttgacaccgaggagggcatcgtgttggagtcaccccactacgccgtcaagatactggagatcgaagatctgttctcctcactcaagcacattcaacataccctggtggactcacaaagccaggaggacatttctctactcctccagctagtgcagaataaggactttcagaacgctttcaaaattcacaatgctattacagtacatatgaacaaggcatccccgccttttccactcatctcaaacgctcaagaccttgcccaggaagtacaaaccgttctgaagcccgtgcatcataaagaagggcaagagctaactgccttgctcaacacaccccacatccaggccctgctgctggctcatgacaaggtggccgaacaggagatgcagctcgaacctattactgatgagagggtgtacgaaagtattggacaatacgggggagagactgtcaaaatagtgcgtatcgagaaggccagggacatacccctgggggctacagtgcgcaacgaaatggatagcgtaatcatctcccggatagtgaagggaggcgcagcggaaaagtccggattgctgcacgaaggagacgaagtgctggagattaatggcattgaaattcggggtaaagatgtgaacgaagtgtttgatctgctgtctgatatgcatggtacactgacatttgttctgattccctcccaacagatcaagccccctcctgcaaaggagaccgtgattcacgtgaaagcccacttcgactacgatccttcagacgatccatacgttccttgtcgcgagcttggactcagcttccagaagggtgatattttgcacgtgatcagtcaggaagaccctaactggtggcaggcctacagagaaggggatgaagataaccagccgctagcaggactggtgcctggaaaaagctttcagcagcagagggaagctatgaaacagaccatcgaagaggataaagagcctgagaagtccggtaagctctggtgtgctaaaaaaaataaaaaaaagcggaaaaaggtactgtacaatgctaataaaaatgatgattacgataacgaggagatcttgacatacgaagaaatgtctctgtaccatcaaccagctaatcgaaagcgccctatcatcctgattggtcctcagaattgtgggcagaacgagctccgccagagacttatgaacaaggaaaaggaccggttcgcttctgctgttccccataccactaggagccgccgtgaccaggaggtggcaggcagagattatcatttcgtgtcacgtcaggccttcgaagccgacatcgctgcagggaagttcatcgaacacggtgagttcgagaaaaatctgtatggcacctccatcgattctgtacggcaggtcattaatagtgggaagatctgcctcctcagcttgcgaacccaaagcctgaagactcttcgcaattcggatctgaagccctacattattttcatcgccccaccaagtcaggaacggctgcgcgcactactcgccaaggaaggcaagaaccccaagcctgaagagttaagagaaattattgaaaagacaagagagatggagcaaaataacgggcactacttcgatacggctattgtcaattcggacttagacaaggcttaccaggaactgctccgcctgatcaataagttagacactgagccacagtgggtcccttccacatggttgcggtag

SEQ ID NO: 212308 - DNA, 2028 bp, Artificial Sequence
  derived and/or modified sequence
atgaccaccagccacatgaacggccacgtgaccgaggagagcgacagcgaggtgaagaacgtggacctggccagccccgaggagcaccagaagcacagagagatggccgtggactgccccggcgacctgggcaccagaatgatgcccatcagaagaagcgcccagctggagagaatcagacagcagcaggaggacatgagaagaagaagagaggaggagggcaagaagcaggagctggacctgaacagcagcatgagactgaagaagctggcccagatcccccccaagaccggcatcgacaaccccatgttcgacaccgaggagggcatcgtgctggagagcccccactacgccgtgaagatcctggagatcgaggacctgttcagcagcctgaagcacatccagcacaccctggtggacagccagagccaggaggacatcagcctgctgctgcagctggtgcagaacaaggacttccagaacgccttcaagatccacaacgccatcaccgtgcacatgaacaaggccagcccccccttccccctgatcagcaacgcccaggacctggcccaggaggtgcagaccgtgctgaagcccgtgcaccacaaggagggccaggagctgaccgccctgctgaacaccccccacatccaggccctgctgctggcccacgacaaggtggccgagcaggagatgcagctggagcccatcaccgacgagagagtgtacgagagcatcggccagtacggcggcgagaccgtgaagatcgtgagaatcgagaaggccagagacatccccctgggcgccaccgtgagaaacgagatggacagcgtgatcatcagcagaatcgtgaagggcggcgccgccgagaagagcggcctgctgcacgagggcgacgaggtgctggagatcaacggcatcgagatcagaggcaaggacgtgaacgaggtgttcgacctgctgagcgacatgcacggcaccctgaccttcgtgctgatccccagccagcagatcaagcccccccccgccaaggagaccgtgatccacgtgaaggcccacttcgactacgaccccagcgacgacccctacgtgccctgcagagagctgggcctgagcttccagaagggcgacatcctgcacgtgatcagccaggaggaccccaactggtggcaggcctacagagagggcgacgaggacaaccagcccctggccggcctggtgcccggcaagagcttccagcagcagagagaggccatgaagcagaccatcgaggaggacaaggagcccgagaagagcggcaagctgtggtgcgccaagaagaacaagaagaagagaaagaaggtgctgtacaacgccaacaagaacgacgactacgacaacgaggagatcctgacctacgaggagatgagcctgtaccaccagcccgccaacagaaagagacccatcatcctgatcggcccccagaactgcggccagaacgagctgagacagagactgatgaacaaggagaaggacagattcgccagcgccgtgccccacaccaccagaagcagaagagaccaggaggtggccggcagagactaccacttcgtgagcagacaggccttcgaggccgacatcgccgccggcaagttcatcgagcacggcgagttcgagaagaacctgtacggcaccagcatcgacagcgtgagacaggtgatcaacagcggcaagatctgcctgctgagcctgagaacccagagcctgaagaccctgagaaacagcgacctgaagccctacatcatcttcatcgccccccccagccaggagagactgagagccctgctggccaaggagggcaagaaccccaagcccgaggagctgagagagatcatcgagaagaccagagagatggagcagaacaacggccactacttcgacaccgccatcgtgaacagcgacctggacaaggcctaccaggagctgctgagactgatcaacaagctggacaccgagccccagtgggtgcccagcacctggctgagatag

SEQ ID NO: 212309 - protein, 700 aa, Artificial Sequence
  derived and/or modified sequence
MLKMLSFKLLLLAVALGFFEGDAKFGERNEGSGARRRRCLNGNPPKRLKRRDRRMMSQLELLSGGEMLCGGFYPRLSCCLRSDSPGLGRLENKIFSVTNNTECGKLLEEIKCALCSPHSQSLFHSPEREVLERDLVLPLLCKDYCKEFFYTCRGHIPGFLQTTADEFCFYYARKDGGLCFPDFPRKQVRGPASNYLDQMEEYDKVEEISRKHKHNCFCIQEVVSGLRQPVGALHSGDGSQRLFILEKEGYVKILTPEGEIFKEPYLDIHKLVQSGIKGGDERGLLSLAFHPNYKKNGKLYVSYTTNQERWAIGPHDHILRVVEYTVSRKNPHQVDLRTARVFLEVAELHRKHLGGQLLFGPDGFLYIILGDGMITLDDMEEMDGLSDFTGSVLRLDVDTDMCNVPYSIPRSNPHFNSTNQPPEVFAHGLHDPGRCAVDRHPTDININLTILCSDSNGKNRSSARILQIIKGKDYESEPSLLEFKPFSNGPLVGGFVYRGCQSERLYGSYVFGDRNGNFLTLQQSPVTKQWQEKPLCLGTSGSCRGYFSGHILGFGEDELGEVYILSSSKSMTQTHNGKLYKIVDPKRPLMPEECRATVQPAQTLTSECSRLCRNGYCTPTGKCCCSPGWEGDFCRTAKCEPACRHGGVCVRPNKCLCKKGYLGPQCEQVDRNIRRVTRAGILDQIIDMTSYLLDLTSYIV

SEQ ID NO: 212310 - protein, 320 aa, Artificial Sequence
  derived and/or modified sequence
MLKMLSFKLLLLAVALGFFEGDAKFGERNEGSGARRRRCLNGNPPKRLKRRDRRMMSQLELLSGGEMLCGGFYPRLSCCLRSDSPGLGRLENKIFSVTNNTECGKLLEEIKCALCSPHSQSLFHSPEREVLERDLVLPLLCKDYCKEFFYTCRGHIPGFLQTTADEFCFYYARKDGGLCFPDFPRKQVRGPASNYLDQMEEYDKVEEISRKHKHNCFCIQEVVSGLRQPVGALHSGDGSQRLFILEKEGYVKILTPEGEIFKEPYLDIHKLVQSGIKVGFLNFIYFCAGYVNFILVLPSSLKVFLCNKRKNLAGENKGAT

SEQ ID NO: 212311 - DNA, 2103 bp, Artificial Sequence
  derived and/or modified sequence
atgctgaagatgctgagctttaagcttctgctgctggccgtcgcgctcgggtttttcgagggggacgctaaattcggggagaggaacgagggcagcggtgccaggcgacgtcgatgcctgaacggaaaccctcctaagagactcaagaggcgagacagaagaatgatgtcacagctggagctgctttccggcggcgaaatgctgtgcggcgggttctacccccgattaagctgctgcttgcggagcgacagtccaggactaggccggctggaaaacaagatcttttcggtcacaaacaacacggagtgcggtaaacttctcgaggagatcaagtgtgccctgtgcagcccccactcccagagcttattccactcgcctgaacgggaagtgctggaaagagatcttgtgttaccactgttatgcaaggactattgtaaggaatttttctatacctgcagagggcatattcctggcttcctccaaacgaccgccgacgagttttgcttttattacgcccggaaagacggtggtttatgctttcccgacttccctcgcaagcaggtacggggcccagcttctaactatctagatcagatggaggagtatgacaaggttgaggaaatttcacgcaagcacaagcacaactgtttctgtatccaggaagttgttagcgggcttcgacaacccgttggggctctgcattctggcgacggctctcagaggctgttcattttggaaaaggaaggatacgtcaagatcctgacacccgagggcgaaatatttaaggagccctatctggacatacacaagttggtccagagcggaattaaaggcggtgacgaacggggcttactgtcactcgcttttcacccaaattacaaaaagaacgggaaactttatgtctcttacaccaccaaccaggaacgatgggcaatcggccctcatgaccacattctgagggtggtggagtacaccgtttctaggaaaaatccgcatcaggtggatctacggaccgcgcgggttttcctggaggtcgccgaactgcaccgaaaacatctcgggggccagttgttgttcggcccagacggatttctgtacatcatcctcggggatgggatgataacactcgacgatatggaggagatggatggcctctctgacttcacaggttctgtgctacgcctggacgtagacaccgacatgtgcaatgtcccttacagcatcccgcgctcgaaccctcacttcaactctactaaccagccacctgaggtgttcgcacacggtctgcacgatcctggtcggtgcgcggtcgaccgacaccctactgatattaacattaatctcaccatcctatgtagcgatagcaacggtaagaaccggtcctccgctcgcatactgcagatcatcaaggggaaggactatgaatccgagccctcgctgttggagtttaagcctttcagcaacggcccactcgttggcggcttcgtatataggggatgccagtcggagaggctgtatggcagttatgtatttggggatagaaatggaaactttctgacactccaacaatctccagttacaaagcagtggcaggagaagccactctgtctaggaacgagtggaagctgccggggatatttctcaggccacatcctcgggttcggtgaggacgaattgggtgaagtgtatattttgtcttcctcaaagtctatgacgcagacccataatggaaagctctataagatcgtggaccctaaacgcccgctgatgcctgaagagtgcagggccaccgtccagccagcccagactctcactagcgagtgcagtcgtctgtgcagaaacggttattgcaccccgaccgggaaatgctgctgttcccccggttgggagggtgatttttgtcgtactgcaaagtgtgaacccgcatgccggcacgggggcgtttgcgtcaggcccaacaaatgcctttgtaagaagggctatctgggcccacaatgtgagcaggtagaccgaaacattcgacgtgtgacccgggcagggatcctggaccagatcattgatatgacctcttacctcctggacctcacgtcatacatcgtgtag

SEQ ID NO: 212312 - DNA, 10072 bp, Artificial Sequence
  derived and/or modified sequence
tcgcgcgggggccgccccctccccttccctccaccctgggcgggggcgcgcgagaagcggtgacgtcaaggggcgcgctgtggcagcacctccccgcgcgctagttaaaaagaagaagaaaagagggaacgaaacatgagaggctgtgtgagaagctgcagccgccggcagaggagacctcagcatcatctagagcccagcgctggccctgcctccgcctgccccgccgccgccgtcgccgtttctgttcctgctactgtcccacctaaacaactcccgttacacggacaagtgaacatctgtggctgtcctctccttttcttcctcctcttccaactccttctcctcctcccacttcccagccgcagcagaaagcccccaacccaactgacactggcacaactgcaaacggtgtcatccgcacaactttatctcgctcctcgggctcccctaaggcattggacccatcgccgcgtcttttattttttgcaaagttgcatcgctgtacatatttttgtccccgccacctccctctgtctctggagtgccctacagccccgcaaactcctcctggagctgcgccctagtgcccctgctgggcagtggcgttcccccccatcctcccgcgcccagcccctgctgctctgggcagacgatgctgaagatgctctcctttaagctgctgctgctggccgtggctctgggcttctttgaaggagatgctaagtttggggaaagaaacgaagggagcggagcaaggaggagaaggtgcctgaatgggaaccccccgaagcgcctgaaaaggagagacaggaggatgatgtcccagctggagctgctgagtgggggagagatgctgtgcggtggcttctaccctcggctgtcctgctgcctgcggagtgacagcccggggctagggcgcctggagaataagatattttctgttaccaacaacacagaatgtgggaagttactggaggaaatcaaatgtgcactttgctctccacattctcaaagcctgttccactcacctgagagagaagtcttggaaagagacctagtacttcctctgctctgcaaagactattgcaaagaattcttttacacttgccgaggccatattccaggtttccttcaaacaactgcggatgagttttgcttttactatgcaagaaaagatggtgggttgtgctttccagattttccaagaaaacaagtcagaggaccagcatctaactacttggaccagatggaagaatatgacaaagtggaagagatcagcagaaagcacaaacacaactgcttctgtattcaggaggttgtgagtgggctgcggcagcccgttggtgccctgcatagtggggatggctcgcaacgtctcttcattctggaaaaagaaggttatgtgaagatacttacccctgaaggagaaattttcaaggagccttatttggacattcacaaacttgttcaaagtggaataaagggaggagatgaaagaggactgctaagcctcgcattccatcccaattacaagaaaaatggaaagttgtatgtgtcctataccaccaaccaagaacggtgggctatcgggcctcatgaccacattcttagggttgtggaatacacagtatccagaaaaaatccacaccaagttgatttgagaacagccagagtctttcttgaagttgcagaactccacagaaagcatctgggaggacaactgctctttggccctgacggctttttgtacatcattcttggtgatgggatgattacactggatgatatggaagaaatggatgggttaagtgatttcacaggctcagtgctacggctggatgtggacacagacatgtgcaacgtgccttattccataccaaggagcaacccacacttcaacagcaccaaccagccccccgaagtgtttgctcatgggctccacgatccaggcagatgtgctgtggatagacatcccactgatataaacatcaatttaacgatactgtgttcagactccaatggaaaaaacagatcatcagccagaattctacagataataaaggggaaagattatgaaagtgagccatcacttttagaattcaagccattcagtaatggtcctttggttggtggatttgtataccggggctgccagtcagaaagattgtatggaagctacgtgtttggagatcgtaatgggaatttcctaactctccagcaaagtcctgtgacaaagcagtggcaagaaaaaccactctgtctcggcactagtgggtcctgtagaggctacttttccggtcacatcttgggatttggagaagatgaactaggtgaagtttacattttatcaagcagtaaaagtatgacccagactcacaatggaaaactctacaaaattgtagatcccaaaagacctttaatgcctgaggaatgcagagccacggtacaacctgcacagacactgacttcagagtgctccaggctctgtcgaaacggctactgcacccccacgggaaagtgctgctgcagtccaggctgggagggggacttctgcagaactgcaaaatgtgagccagcatgtcgtcatggaggtgtctgtgttagaccgaacaagtgcctctgtaaaaaaggatatcttggtcctcaatgtgaacaagtggacagaaacatccgcagagtgaccagggcaggtattcttgatcagatcattgacatgacatcttacttgctggatctaacaagttacattgtatagtttctgggactgtttgaatattctattccaatgggcatttattttttatcctgtcattaaaaaaaaaagactgttatcctgctacacactcctgtgatttcattctcttttattaatttaaaaataatttccagaaatgtgcagatcctctgtgtgtatgtcagcatgtttgttcacatatgcacatacacatactcataacccctatatgcgttgttgcataacagatgattttttaaaatatatacttccttatgcaaagtaatttacacagaaattccattgtaaattgataatggattttttatgttactagaagagattatttgacttcccaggaattttctgtctgtaatcactaaagtcaactttaatagagttttgaaacagtactgtgcaatccgatggatctaattaaaaaaaaggcaatatttttatattaaagtactatactaggagagaatgtttcagaactccctgatgaatttctaagtgagcaacttgatataaaattgtaatcttcatttttgtcagtgtatccagttacagaatgctacacacttacctttttattggctgagaaatctggttatttcatcttaatctcaagattgttttcaagtgttttataattaaatcataatagcatattttaaaatcaatcttcctaaaaggtctgcttttattgtatattttatttaacaataggcactgggtttgtgttacatatttatatattttattttatttttataatatagacatcacctagatgaaacacctttaccctgtcctgtaaaacactaaagttacatttttcaccaacttaattggaaagaaggggagtgagaaagcaaacagtctttaatgtgctgtggatctaatctagcaaggtatccttgtgccaacatgtaatcattaacgacggatgaaaaagcaagaaaacagccaatccttataaaattccagcattaaacatttgtaaagtgcttttcaccatagcaagactgtcagagtctatgttattagaatgttgcagatttccactgaatcgaacctcactggagaagagctcacttgtttttaaaaatcttggctatgtaagctgtcacctgtacaaatttttaacataataattcttgccaaatatgactttaaatgtacgtgttccttcagaactcaatgaaaatactctttggctaatgtatcaataaattttctgtaaatgttctgttcagggttttacagagatgacatgttctgacttaaaactgcaaaaagtctagtagatatttttcttcatggttttcaaagccagctctccacgtttggattttaacaaaatataaggcctctttgcactagtgaaaaaacacgtctactcatgacaagtgcacacccactatggctgtccttcttctgtaaacatccattcctctagaatctaaattgtagagcagtatagattatgcagcgccagctgactttctaaaccttctccttacctttaggaatacaagcctcaatttaaaaaatatattgtagctagtatttctctattgttttaaggtgagagatttgcaattaaagcccagtaagcatttatatagaagccacaatgtagaaagattggttaagtacactgctcttgtcttccatatatgattacttaagtttcaagtgacctcatgccaaatggaaatgggttgagaaatcttggttcagtgcttagtgaacaatagcctgcattaaaaagtgcatgcataattttgcacaatttagattcaattgacagtctattcaaagaagtctcaggattaaatgagcatggagaccaaattgccctcttaccccagaaaaggggtggtcccttctagtcacactaacacttcattggcccaacagtgtgacaaatcttgcaatgaaccatgcagtagcctgcatctgtaggttaatagcaatcttttgtctccattgctttctcttcatagcccttttactgaattccatcacagaaagttttacaattaaaaaaaaatgtcctgacaaccatttttgtaaatggaccttaccatctaattgtcccttattcaacgtgggtgacattaacaaaatgtgaacttcttgtgagggagccagctgtctaaatctgtcaaatcgtgcagttttattacacattctccaattcttcctagtttccctgaaaacaataaggatactgctatatattcagtaaaatctaaaaaaatcaagcattacttcttacatctttaaactttccatctcctccccaaaataaaaggtgttctattgccattagttctactgttttaaaatatctatattaagttgaccaggcccagattttttatacagctttttcccaagtgaaagattttcaagtgacttagaaaaacatatgtgccccaggtgtcattgccttttcttttgtgagtcattagaatgaaaggccaagttcttctcaagagaagatagcaagatccacggatattaagccaagcaaagaaagtaaaatcattggagtcatttctttctgttcttaggagaaaagtagatagcactggctaattgatggcaacatattttaaattaagtggtcaattcaaaaattctctttgaccttttctttcaagtagatttttttaaatgcatgactggagaattatcttcaatgattcatgatgagaggcaggtaggaattggttaagaagtatgagcaggaaaaaattattgtttaatcacatgaaaggcaacatctgttcagttcataaagcacacagtctcgaatggaagaaaaaaaggtccttcgtaagaatactgatgcataagataaagacgaaataatgaaaaagaaaaatgtatattattattcccttgtccattctcaagtttaagctgcggttgtcagttgaatgtgaaatgatgttatagttgttttaaatggttggaaataacctttctactactgtttctgccacactgttgtcctggttcatagaaccttgttttcttgacagttatttaaggtaataaaaggaacacaatttggcagatctttaagtgaaagagagaaaaaatttaagaaattgagtgatggctaaaagtaagtgcttccatccataacttttcttcttggatttttttcaatgtaattattgtaaaatatatttttttattttatcatgaagaatactcggaaggtttctcagattaatgagtatctcataaagagtagagaaaccaacacatacaatatatacacacaacctaaatagaaaactattttctttgtcatttgcatgccccagagaagttacttcttccctatttatttctttgaaaataattacaaaatagtatactaacaattttaatccatttgctgttttttttttttttttggtttctttttttttttttttgagacggagccttgctatgttgcccaggctgcagagcagcacaatctcagctcactacaacctccgcctcccgggttcaagcaattctcctgcctcagcctcccaagtagctgggattacaggtgcccgccaccacacccggctaatttttttgtgtttttagtagagacagggtttcaccatgttggccaggctgatttcaaactccagacttcaagtgatccagccccccaggcctcccaaagtgctaggattacaggcgtgagccaccatgcccagcttccatttgcttttgatattgtttttatctctgagttacaaactatacaagcttaccaggtataaggttagatgctacatctaggagcattcaagatatacattaatttaaacttttattagtctaactttctgttaagtctcttagctttgaaacataaaagagaaatcaagcccaaatttttagaggaaggctaaggtatactattggcagttgtagttttaattgtaattgactgattaaccaagtaatttataaaatgttacctatactgtcagtgttcacctcctctccctccctccttctctctctctctccccctctcgctctctcggctaatatatatgtgtatgtgtatatatatatgtatgtatatatatacacacacacacacacatacatacatacatacatatattctttttccttttaaccacttccctctcctacattttctattggttttgcctaaatagacatgttctcaatacacccatgttgaaggtatcctgggctagattgctgttgattttgctggttatgatcttttctttgtttttctgaaaaatagcctctcttgattccacattttctcaaattctatataacaaataatagtggatagtaaacaaatgacatactaggctgatctattacaatcattgaaagaaataaggaagagcagaaatcactaacagtccagaggctccaattcagctgctctagcatagatacaggaaagacatggagaataacactggggttagctaacagcagggaaagttagtagctatttcctagccaaggaacaaccttctctatggaataattttaagaaaattattccaaatctgtgaggaaaaaataagaagcagttcctcaatggagactttataaatcttaatttcctcacccctgggatgagatttgaagttgcagaggactcagaccaaagtcccatggcagaaaatgtacatatttttaaactactcccaggaagtaaactagtactgtgaatgctggcaataccatcagaaagtttatctttaaaatacctaaaaataaatatatatttgctatcttatcctctttttgtcacacaaacataaattggtcatatatatatttatatatatggttatatatatttggttatatatatatctttatatatatatcttatatatatatctttttatatatatcttatatatatatctttttatatatatcttatatatatatctttatatatatcttatatatatatcttatacatataagatatatgtatatatatatacattatatatatataatatatatatattatatatatataatatatatcttatatatatatatatcttaatacatatatataaccatggaacctgccaaacactaatcctagccaacttcaatccttctttctcttaactatcttctctgaataagttctggacttcaccttaaaataagtttttaggagagtaatatatattcatgggattgtgagggagcattgtagagctgttttcttctcagtcatagtggtggttttcctagctgctatggaaaggtttgttcacttatgagattaggacttttcttaaattcctcattaaatatgaacctaaggcatacccatcatttaccttgattcccatataatttgtataagtcatatataagtccattgacaaaataaaaaaataaataattggattccttgtatcaacagaaagccttgtgcttaaaacctgttattcttctttgagccagactaaacagtaacatttacaaaatggtatcagctcaacattaaatctaaggttacttctcacatacatcataaagtcagccatcatctttcatttaggatttcttggggttttctttttgcatatatagattatgtattacttaaatccaaaatacatgtgtgtatatatatacatatatatgtaacttaatataaatgtttgatgagttatctcaattgactataatcttctaagtcaaaaagaaaacatttaagtacataatataaaaagaactgaacattaacagtaatgggaaattcataatggctaaatatgaaataagctttgtctttgcagttacaaactaattcttgtacattttccttttcactaaaaaaataactaattgatagtttccattcacatgaacaagttataatcaggtttgggatagtatgcccaaaacctatgtttctttactttatattcttaaaatctgagacatgatttttctggaacaaattaagatttcatgtacaatagagtccctttcctaatactgttatgaagaaaccaagttgactaccttatgagagatcagatatttcccttatctcattatattcacagcatatgtttggacatgcgtttcaccaagaaccatgtagtaataagataaatggtaactgaggtactatggaatttttagaacttgattccccaggacatgctacagtaaactaaactatttattcaaaagtaacccaactaattaaagtgaaaaaaaattgttgaatcacaatgaacaaacataaaacaatacttaaatgagaattctgtgtcttttttggttttatctgtgatttattttgtccagtattaaggaatggttatctttatcattcttctaacatgttttggtttctctaatggttcattttcctttagcttgtgaaaattagggcagtttgtccagagccttactcgcaggagacaccagacccaacccatgcttagatttctgttaataaaagggagaagggtatttgaataggtagtaaaggcaggtacaagtttaagggagcagggctatcatatgtactaggtgagatttctataaatgtctgaaaagttacatgcatagtcattggctcaggtaatttctctgaatttgaacttatttgatttatttaaccaagttattataatatgcagttctctttaatcaatcttctattattcaatcatctatccatttattaattcaacaaatatttattaaagtgcctaccatgattatgtgctgtagaaaagacaaggacatttactagggggggattgtgggcccaatcggcatcataagcatgtctgaagcaaaagacaataatcacatccaacggcaccagttcagctcaactttagaattcagcagtaacagtacagatggcctaaagtacatctgtgtgtatctgtacgtgtgcacacacccatgtatatatatttatctatctgtacaaacactacatatgtatacacactatctatgtaaaatataatatatgtataatgcatataaattctaacaagtgtatttgtgttatctttaaaatagaacaattgtatcttgaagtggtaaatgcagagaattggttttattgttgatctgtggatttaatgatttctaggtgaaaaggacgtttaagtgtacaatttcttttcttaatttaatatatttatgtaaatgcatgcctgaaatttggttagattggctgtgttttgtgtcttttaacatgatcaaatgattaaactttatcttatgacttga

SEQ ID NO: 212313 - DNA, 2103 bp, Artificial Sequence
  derived and/or modified sequence
atgctgaagatgctgtccttcaagctgctgctgctggccgtggccctgggcttctttgaaggagatgccaagtttggagagagaaatgaaggcagcggggccaggagaagacgctgcctgaatggaaacccccccaagaggctgaagaggcgggacaggaggatgatgagccagctggagctgctgtctggaggagagatgctgtgtggcggcttctacccccggctgagctgctgcctgcggagtgacagccctggcctgggccgcctggagaacaagatcttctctgtgaccaacaacacagaatgtgggaagctgctggaggagatcaagtgtgccctgtgcagcccccacagccagagcctcttccacagccctgagcgggaggtgctggagcgggacctggtgctgcccctgctgtgcaaggactactgcaaggagttcttctacacctgccggggccacatccctggcttcctgcagaccacagcagatgagttctgcttctactatgccaggaaggatggcggcctgtgcttcccagacttccccaggaagcaggtgcggggccctgccagcaactacctggaccagatggaggagtatgacaaggtggaggagatcagcaggaagcacaagcacaactgcttctgcatccaggaggtggtgtctggcctgcggcagcctgtgggcgccctgcacagcggagatggcagccagaggctcttcatcctggagaaggagggctacgtgaagatcctgaccccagagggggagatcttcaaggagccctacctggacatccacaagctggtgcagagcggcatcaagggaggagatgagcggggcctgctgagcctggccttccaccccaactacaagaagaatggcaagctgtatgtgtcctacaccaccaaccaggagcgctgggccatcggcccccatgaccacatcctgcgggtggtggagtacacagtgtccaggaagaacccccaccaggtggacctgaggacagcccgggtcttcctggaggtggccgagctgcacaggaagcacctgggcggccagctgctgtttggaccagatggcttcctgtacatcatcctgggagatggcatgatcaccctggatgacatggaggagatggatggcctgagtgacttcaccggctctgtgctgcggctggatgtggacacagacatgtgcaatgtgccctacagcatccccaggagcaacccccacttcaacagcaccaaccagcccccagaggtgtttgcccacggcctgcatgaccccggccgctgtgctgtggacagacaccccacagacatcaacatcaacctgaccatcctgtgcagcgacagcaatggcaagaacagaagcagcgcccgcatcctgcagatcatcaagggcaaggactatgagagcgagcccagcctgctggagttcaagcccttcagcaatggccccctggtgggcggctttgtgtaccggggctgccagagcgagcggctgtatggcagctatgtgtttggagacagaaatggaaacttcctgaccctgcagcagagccctgtgaccaagcagtggcaggagaagcccctgtgcctgggcaccagcggcagctgccggggctacttcagcggccacatcctgggctttggagaagatgagctgggggaggtgtacatcctgagcagcagcaagtccatgacccagacccacaacgggaagctgtacaagatcgtggaccccaagaggcccctgatgccagaagaatgtcgggccaccgtgcagcctgcccagaccctgaccagtgaatgttcccggctgtgcagaaatggctactgcacccccaccgggaagtgctgctgcagccctggctgggagggggacttctgcaggacagccaagtgtgagcccgcctgcagacatggaggagtgtgtgtgcggcccaacaagtgcctgtgcaagaagggctacctgggcccccagtgtgagcaggtggacaggaacatccggcgggtgaccagggctggcatcctggaccagatcatcgacatgaccagctacctgctggacctgaccagctacatcgtgtag

SEQ ID NO: 212314 - DNA, 2103 bp, Artificial Sequence
  derived and/or modified sequence
atgctgaagatgctgagcttcaagctgctgctgctggccgtggccctgggctttttcgaaggagatgctaagtttggtgaacggaacgaaggctctggcgcaaggcgcaggcggtgtctgaacggtaaccctcctaagaggctcaaacggcgggataggcgaatgatgtcacaattggagctcctgtcaggcggagagatgctttgtggcgggttttacccaagacttagctgctgccttagatctgactctccaggtctcggtcggctggagaacaagatcttcagtgtcacgaataacacagagtgtggcaagctgcttgaggaaatcaagtgcgccttatgttccccccactcccagtctctatttcactcccccgaacgggaagtgctggagagggacctggtgctgcccctactgtgtaaagactactgtaaagaatttttctacacgtgcagaggtcacatcccaggttttctccaaactactgctgacgaattctgtttctactacgctcgcaaagacggtggactatgttttcctgacttcccacggaagcaggtgcgtggtccggcctccaattacctcgatcagatggaggaatacgataaggtggaagagatcagtcgcaaacacaaacataattgcttctgcattcaggaggtggtgtccggactccggcagccagtgggagccctgcacagcggcgatggtagtcagcggctgttcatcctggagaaggaaggctacgtaaaaattcttacccctgaaggagagatttttaaagagccttatctagatatacacaagctggtgcagtccgggatcaaggggggcgatgaaaggggcctgttgagcctcgcatttcatcccaactataagaaaaatggaaagctgtacgtatcctataccaccaatcaggaacgctgggcgatcggtccccatgaccacatccttagagtggtagagtacactgtgtcaagaaagaatcctcatcaggtagacctcaggactgcccgcgttttcctagaagtggccgagttacaccggaaacacctcggagggcagctgctgttcggccccgatggttttctgtacattatcctgggcgacggaatgatcacactagacgacatggaggagatggatggtctctctgactttacaggtagtgtcctgagactggacgtggataccgacatgtgcaacgttccttatagtattccccggagcaacccccacttcaattccacgaaccagcctccagaggtgtttgctcacggtttacatgatcctggccgctgcgcagttgatcgtcaccctacggatataaatattaaccttacaatactctgttctgactccaatggcaaaaatcgctcctccgctcgaatccttcaaataatcaaggggaaagactacgagtctgagccaagcctgttggagtttaagccgtttagcaatggccctttggtgggtggcttcgtctaccgggggtgtcagagtgagcgcctctatgggtcctatgtcttcggcgatcgtaacggaaactttctgacactgcagcagagcccagtcacaaagcagtggcaggaaaaacctctttgtcttgggacgtccgggtcctgtagaggctacttctcgggccatattttagggtttggtgaggacgaactgggtgaggtatacatactgagctcttcgaagtctatgactcagactcataacggtaaactgtacaaaattgtcgaccccaaacggccgctgatgcccgaggagtgtcgcgctacagtgcagcccgcacagacacttacttcggagtgctcccgtctgtgccggaacgggtattgcacccccaccggaaagtgttgttgcagcccggggtgggagggggacttctgcagaacagctaagtgcgagcctgcgtgtagacacgggggcgtctgtgttaggcccaataaatgcttgtgtaaaaagggctacctggggccacagtgcgaacaggttgataggaacatccgacgggttacccgagcaggcattctggatcagatcattgacatgacctcctacctgctggatttgacttcatatatcgtgtag

SEQ ID NO: 212315 - DNA, 2103 bp, Artificial Sequence
  derived and/or modified sequence
atgctcaagatgcttagctttaaacttctcctcctggccgtggccctgggttttttcgagggtgatgccaaattcggagaacggaacgagggatcaggagcccgtaggcggagatgcctcaatggcaacccgccaaagaggctgaagaggcgcgataggaggatgatgtcccagttagaactgttgtccgggggagagatgctgtgcgggggtttctaccctcgactgtcctgttgcctccggtccgattccccaggactgggacgtctggagaacaagatcttcagcgtgaccaataacacagaatgtggcaaactcctggaggaaatcaaatgtgctttgtgtagcccccatagccagtcgctgttccattccccagagcgagaagttctggaaagagaccttgtactgccccttctttgcaaagactattgtaaagagtttttctacacttgtcgcggacacattcccggatttctccaaactactgctgatgaattttgcttctactacgctcgcaaggacggcggactctgtttcccagattttcctagaaaacaggtgcggggtccagcgtccaactacctcgaccagatggaggaatacgacaaagtcgaagagatctcccggaaacacaagcacaattgcttttgcattcaggaagttgtgtcgggactgcgacaacccgtcggcgctctgcactcaggagacggctctcagcgcctattcattctggagaaggaaggttacgtgaagattctcacccccgaaggtgagatttttaaagaaccctaccttgacattcataagcttgtgcagtccggcatcaaaggcggtgacgagaggggcttattgagcctcgcctttcaccctaactataaaaagaatggaaagttgtacgtatcatatacaacaaaccaagagcggtgggctattggtccacatgatcatatacttcgggtggtggagtacactgtcagtcggaaaaatccacaccaggtggatctgaggactgccagagtctttctcgaggtagcagagctgcatagaaagcacttgggaggacagctcctgtttggccctgacggattcctgtacattatacttggtgatggcatgatcacactggatgatatggaggagatggacggcctgagcgattttacagggtcagtgctacggctggacgttgacaccgacatgtgtaacgtgccctacagcattcctcggtctaacccccactttaatagcaccaatcagcccccagaagtcttcgcccacggcttgcatgaccctggtaggtgtgccgttgaccggcaccctaccgatattaacatcaatcttactatcctgtgcagcgacagtaacggcaagaaccggtcaagtgcccgaatcttgcagataataaagggtaaagactatgagagcgaaccaagtctcctggagttcaaacccttctcaaacggaccattggtcggaggatttgtgtaccgtgggtgccagagcgagaggctctacggatcttacgttttcggcgaccgcaatggaaatttcctgaccctgcaacagtcccctgtgaccaagcagtggcaagagaagccactgtgcttgggaacatcaggatcatgtagaggatatttttccggccatattttgggcttcggtgaagacgagttaggggaagtgtacattctgtccagctccaaatcaatgacccagacacataatggcaagctgtacaagatcgtggaccctaagcggccactgatgccagaagagtgtagggcaactgtacagccggcacagactcttacatctgagtgttcccggttgtgccggaacgggtattgtactcccactggcaagtgttgctgtagcccaggctgggagggggatttctgtcgcacagccaagtgtgaacccgcttgtcggcatgggggagtctgcgttcgccctaataaatgcctgtgcaagaagggctacttgggaccccagtgcgaacaggtagaccggaatatccgcagggttacacgggctggcatcttagaccagatcatagacatgacatcttaccttctggacttgacaagctacattgtgtag

SEQ ID NO: 212316 - DNA, 2103 bp, Artificial Sequence
  derived and/or modified sequence
atgctgaagatgctgagcttcaagctgctgctgctggccgtggccctgggcttcttcgagggcgacgccaagttcggcgagagaaacgagggcagcggcgccagaagaagaagatgcctgaacggcaacccccccaagagactgaagagaagagacagaagaatgatgagccagctggagctgctgagcggcggcgagatgctgtgcggcggcttctaccccagactgagctgctgcctgagaagcgacagccccggcctgggcagactggagaacaagatcttcagcgtgaccaacaacaccgagtgcggcaagctgctggaggagatcaagtgcgccctgtgcagcccccacagccagagcctgttccacagccccgagagagaggtgctggagagagacctggtgctgcccctgctgtgcaaggactactgcaaggagttcttctacacctgcagaggccacatccccggcttcctgcagaccaccgccgacgagttctgcttctactacgccagaaaggacggcggcctgtgcttccccgacttccccagaaagcaggtgagaggccccgccagcaactacctggaccagatggaggagtacgacaaggtggaggagatcagcagaaagcacaagcacaactgcttctgcatccaggaggtggtgagcggcctgagacagcccgtgggcgccctgcacagcggcgacggcagccagagactgttcatcctggagaaggagggctacgtgaagatcctgacccccgagggcgagatcttcaaggagccctacctggacatccacaagctggtgcagagcggcatcaagggcggcgacgagagaggcctgctgagcctggccttccaccccaactacaagaagaacggcaagctgtacgtgagctacaccaccaaccaggagagatgggccatcggcccccacgaccacatcctgagagtggtggagtacaccgtgagcagaaagaacccccaccaggtggacctgagaaccgccagagtgttcctggaggtggccgagctgcacagaaagcacctgggcggccagctgctgttcggccccgacggcttcctgtacatcatcctgggcgacggcatgatcaccctggacgacatggaggagatggacggcctgagcgacttcaccggcagcgtgctgagactggacgtggacaccgacatgtgcaacgtgccctacagcatccccagaagcaacccccacttcaacagcaccaaccagccccccgaggtgttcgcccacggcctgcacgaccccggcagatgcgccgtggacagacaccccaccgacatcaacatcaacctgaccatcctgtgcagcgacagcaacggcaagaacagaagcagcgccagaatcctgcagatcatcaagggcaaggactacgagagcgagcccagcctgctggagttcaagcccttcagcaacggccccctggtgggcggcttcgtgtacagaggctgccagagcgagagactgtacggcagctacgtgttcggcgacagaaacggcaacttcctgaccctgcagcagagccccgtgaccaagcagtggcaggagaagcccctgtgcctgggcaccagcggcagctgcagaggctacttcagcggccacatcctgggcttcggcgaggacgagctgggcgaggtgtacatcctgagcagcagcaagagcatgacccagacccacaacggcaagctgtacaagatcgtggaccccaagagacccctgatgcccgaggagtgcagagccaccgtgcagcccgcccagaccctgaccagcgagtgcagcagactgtgcagaaacggctactgcacccccaccggcaagtgctgctgcagccccggctgggagggcgacttctgcagaaccgccaagtgcgagcccgcctgcagacacggcggcgtgtgcgtgagacccaacaagtgcctgtgcaagaagggctacctgggcccccagtgcgagcaggtggacagaaacatcagaagagtgaccagagccggcatcctggaccagatcatcgacatgaccagctacctgctggacctgaccagctacatcgtgtag

SEQ ID NO: 212317 - protein, 292 aa, Artificial Sequence
  derived and/or modified sequence
MNPFWSMSTSSVRKRSEGEEKTLTGDVKTSPPRTAPKKQLPSIPKNALPITKPTSPAPAAQSTNGTHASYGPFYLEYSLLAEFTLVVKQKLPGVYVQPSYRSALMWFGVIFIRHGLYQDGVFKFTVYIPDNYPDGDCPRLVFDIPVFHPLVDPTSGELDVKRAFAKWRRNHNHIWQVLMYARRVFYKIDTASPLNPEAAVLYEKDIQLFKSKVVDSVKVCTARLFDQPKIEDPYAISFSPWNPSVHDEAREKMLTQKKPEEQHNKSVHVAGLSWVKPGSVQPFSKEEKTVAT

SEQ ID NO: 212318 - DNA, 879 bp, Artificial Sequence
  derived and/or modified sequence
atgaatcctttctggagtatgtctacctcatcagttagaaaacgaagcgagggggaagagaaaaccctgaccggggatgtcaaaaccagtcctccgagaacagcccctaagaaacaacttccgtcgatcccgaaaaacgcgcttcccatcacgaagcctactagtcccgcccccgctgctcagtctaccaacggcacacacgcctcatacggccctttctacctggaatatagcctcttagccgagttcacacttgtagtgaagcagaagctgccaggcgtctacgtacagccttcttaccggtcagccctcatgtggtttggcgtcatatttatccgccacggcttgtaccaggatggagtattcaaattcaccgtttatatccccgacaattaccccgacggagattgcccccgattagtctttgacatacccgtgtttcaccctctggttgacccaacctcaggggagctggatgtgaaacgcgcctttgccaagtggcgccggaatcacaatcacatttggcaggtgttgatgtatgccaggagagtgttttacaagattgacacagcttcacctcttaacccagaggccgctgtcctttacgaaaaggacatacaactgttcaagtctaaggtagttgattcagtcaaagtgtgtacggcacggttgtttgaccaaccaaaaatcgaggacccctacgccattagtttctcaccctggaacccttcggtccacgatgaagccagagaaaagatgctcacccagaagaaacctgaagaacagcacaataaatcggtgcacgtggctgggctgtcctgggtaaaaccaggttcagtgcagccgttcagcaaagaagaaaagaccgtcgctacttag

SEQ ID NO: 212319 - DNA, 879 bp, Artificial Sequence
  derived and/or modified sequence
atgaaccccttttggagcatgagcacgtcctctgttagaaaaagatccgagggtgaagagaagacactgaccggagatgtgaagacttcccctcccagaacagccccgaagaagcagctgccctcgatcccaaagaacgctctgccaatcactaagcctacttcccctgcccccgctgcccagtcaactaacgggacacatgcatcgtacggacccttttacttagaatactctctgctggctgaatttactctggtggtaaagcagaaattacctggcgtctatgtgcagccatcttacagatctgccttgatgtggttcggcgtgatttttatccggcatggcttataccaagatggtgtgtttaaatttaccgtgtatatccctgacaactatccagatggcgattgccctcggttggtgttcgacatccctgtgttccaccccctggtcgatcctacttcaggcgaacttgacgtgaagcgcgccttcgccaagtggagaaggaatcataaccacatctggcaggtgcttatgtacgcccgacgggttttttataaaatcgacaccgccagccccttgaatccggaagccgcggtcctgtatgagaaggacatccagctgtttaagtccaaggtggtggacagcgtgaaggtgtgtactgccaggctattcgaccagcctaagatcgaggatccttacgctatctctttctccccttggaacccatctgtgcatgacgaggctcgcgaaaagatgctaacgcaaaagaagccagaggagcagcacaataagtctgtacacgtcgccgggctctcatgggtgaagcccggtagcgttcagcccttcagtaaggaggagaaaacagtcgcgacatag

SEQ ID NO: 212320 - DNA, 879 bp, Artificial Sequence
  derived and/or modified sequence
atgaaccccttctggagcatgagcaccagctctgtgaggaagaggtctgagggggaggagaagaccctgactggagatgtgaagaccagcccccccaggacagcccccaagaagcagctgcccagcatccccaagaatgccctgcccatcaccaagcccaccagccctgccccagctgcccagagcaccaacggcacccacgccagctatggccccttctacctggagtacagcctgctggccgagttcaccctggtggtgaagcagaagctgcccggggtgtatgtgcagcccagctaccgcagcgccctgatgtggtttggagtcatcttcatccgccacggcctgtaccaggatggagtcttcaagttcaccgtgtacatcccagacaactacccagatggagactgcccccggctggtgtttgacatccctgtgttccaccccctggtggaccccaccagcggggagctggatgtgaagagggcctttgccaagtggaggaggaaccacaaccacatctggcaggtgctgatgtatgcccggcgggtcttctacaagattgacacagccagccccctgaaccctgaggccgctgtgctgtatgagaaggacatccagctgttcaagagcaaggtggtggacagcgtgaaggtgtgcacagcccggctgtttgaccagcccaagattgaggacccctatgccatctccttcagcccctggaaccccagcgtgcatgatgaggcccgggagaagatgctgacccagaagaagccagaggagcagcacaacaagtctgtgcacgtggccggcctgtcctgggtgaagccaggctctgtgcagcccttcagcaaggaggagaagacagtggccacctag

SEQ ID NO: 212321 - DNA, 2222 bp, Artificial Sequence
  derived and/or modified sequence
ggggtggggcggggcggggatcaagcaggggcagggctggcgctgcggcgggagatgctgtcgggccgcggcggcgcttggcagccaggagctctgcattgaaggcactggggtgaggcttactgcccggcaggctggtgggtaaagtgaatgccgaagacagaagatttggatgatacaccactgactttctttgtttggaatacacgttatgaaccctttctggagcatgtctacaagctctgtacgcaaacgatctgaaggtgaagagaagacattaacaggggacgtgaaaaccagtcctccacgaactgcaccaaagaaacagctgccttctattcccaaaaatgctttgcccataactaagcctacatctcctgccccagcagcacagtcaacaaatggcacgcatgcgtcctatggacccttctacctggaatactctcttcttgcagaatttaccttggttgtgaagcagaagctaccaggcgtctatgtgcagccatcttatcgctctgcattaatgtggtttggagtaatattcatacggcatggactttaccaagatggcgtatttaagtttacagtttacatccctgataactatccagatggtgactgtccacgcttggtgttcgatattcctgtctttcacccgctagttgatcccacctcaggtgagctggatgtgaagagagcatttgcaaaatggaggcggaaccataatcatatttggcaggtattaatgtatgcaaggagagttttctacaagattgatacagcaagccccctgaacccagaggctgcagtactgtatgaaaaagatattcagctttttaaaagtaaagttgttgacagtgttaaggtgtgcactgctcgtttgtttgaccaacctaaaatagaagacccctatgcaattagcttttctccatggaatccttctgtacatgatgaagccagagaaaagatgctgactcagaaaaagcctgaagaacagcacaataaaagtgttcatgttgctggcctgtcatgggtaaagcctggctcagtacagcctttcagtaaagaagagaaaacagtggcgacttaagagatggtgaatctggtgcaccatgcactttcctgctagactctggcctagttcaagctgaccaatggcagaggactgcctgaagagtaaaactgtgtgaacaatgactgactgccagtgttttccatgtatgcataggttctaacagcagggtttggaaacctgtctctaagtaatgcattacttctgtcagaagtgtcttagggtggttatctagttcagtactccaaattattggggaccttgaggcttaagtaagtatttttctgaatataatgctaaaggtaagttgcattcatttaaactaatagagcagacagaattcagcactacttaatagtttataaatcagtggtttcagttgtatatatgttaggaaatggagaggtatagagagagcaggttccatagctcagcacttttaagtggaagatcatttgaatctcagtcttcagcctgcactgatttgtagcctgcactgtcttactgatttacaaactgaaatcactgagaaatgtctttagttcagtgagaagaaaccagaacacttgttcctagtgttgtgttgttttttttaagcaaattacttactgtatttttatggcaggagggagaaaaagtgttacaacggtttctaatgaagtccggtatttaaatgataaatgactaatgtgtttagtagagacaaaataaaccaataaatgattgttctttgccatttatgcaggaaactacccttttctcaatataaccaaacaaaggctaatttataaatgctttattgaaaaatacacttatcttcatataaaattacagtagcagtatcttgagaagttttataaatatttttgcagaacactattctaattgaacaatgtaagttccatatttctctcagcaatatgaagttacctagtaactttgtttatactgattcaatttacaattgaattttctccctaataagattattaatttgacttgaaaactgctggaacaatagtgattaataaagatatgtatagataattcagctgttaaataacattttctaatttgtataaatggtactatggtactaataaaaacctaaattctccaaccaatttttttaaactgccaggaacaccca

SEQ ID NO: 212322 - DNA, 2426 bp, Artificial Sequence
  derived and/or modified sequence
ggcggggcggggatcaagcaggggcagggctggcgctgcggcgggagatgctgtcgggccgcggcggcgcttggcagccaggagctctgcattgaaggcactggggtaaagtgaatgccgaagacagaagatttggatgatacaccactgactttctttgtttggaatacacgttatgaaccctttctggagcatgtctacaagctctgtacgcaaacgatctgaaggtgaagagaagacattaacaggggacgtgaaaaccagtcctccacgaactgcaccaaagaaacagctgccttctattcccaaaaatgctttgcccataactaagcctacatctcctgccccagcagcacagtcaacaaatggcacgcatgcgtcctatggacccttctacctggaatactctcttcttgcagaatttaccttggttgtgaagcagaagctaccaggcgtctatgtgcagccatcttatcgctctgcattaatgtggtttggagtaatattcatacggcatggactttaccaagatggcgtatttaagtttacagtttacatccctgataactatccagatggtgactgtccacgcttggtgttcgatattcctgtctttcacccgctagttgatcccacctcaggtgagctggatgtgaagagagcatttgcaaaatggaggcggaaccataatcatatttggcaggtattaatgtatgcaaggagagttttctacaagattgatacagcaagccccctgaacccagaggctgcagtactgtatgaaaaagatattcagctttttaaaagtaaagttgttgacagtgttaaggtgtgcactgctcgtttgtttgaccaacctaaaatagaagacccctatgcaattagcttttctccatggaatccttctgtacatgatgaagccagagaaaagatgctgactcagaaaaagcctgaagaacagcacaataaaagtgttcatgttgctggcctgtcatgggtaaagcctggctcagtacagcctttcagtaaagaagagaaaacagtggcgacttaagagatggtgaatctggtgcaccatgcactttcctgctagactctggcctagttcaagctgaccaatggcagaggactgcctgaagagtaaaactgtgtgaacaatgactgactgccagtgttttccatgtatgcataggttctaacagcagggtttggaaacctgtctctaagtaatgcattacttctgtcagaagtgtcttagggtggttatctagttcagtactccaaattattggggaccttgaggcttaagtaagtatttttctgaatataatgctaaaggtaagttgcattcatttaaactaatagagcagacagaattcagcactacttaatagtttataaatcagtggtttcagttgtatatatgttaggaaatggagaggtatagagagagcaggttccatagctcagcacttttaagtggaagatcatttgaatctcagtcttcagcctgcactgatttgtagcctgcactgtcttactgatttacaaactgaaatcactgagaaatgtctttagttcagtgagaagaaaccagaacacttgttcctagtgttgtgttgttttttttaagcaaattacttactgtatttttatggcaggagggagaaaaagtgttacaacggtttctaatgaagtccggtatttaaatgataaatgactaatgtgtttagtagagacaaaataaaccaataaatgattgttctttgccatttatgcaggaaactacccttttctcaatataaccaaacaaaggctaatttataaatgctttattgaaaaatacacttatcttcatataaaattacagtagcagtatcttgagaagttttataaatatttttgcagaacactattctaattgaacaatgtaagttccatatttctctcagcaatatgaagttacctagtaactttgtttatactgattcaatttacaattgaattttctccctaataagattattaatttgacttgaaaactgctggaacaatagtgattaataaagatatgtatagataattcagctgttaaataacattttctaatttgtataaatggtactatggtactaataaaaacctaaattctccaaccaatttttttaaactgccaggaacacccaaaaatatttttaaatatatcaccttaatagacatttcttttagataactccctcctaaaggaagaggtcataagttttcatattaatcccctcaattcaacttgattaaaatcttttcttagctggttgatccctatataacaaaaaactggagaatttaaaacattcccaaaaggtggctataggggttttaacattttaaaaaaatataaaagcattaaagaaaatattggatgttta

SEQ ID NO: 212323 - DNA, 879 bp, Artificial Sequence
  derived and/or modified sequence
atgaaccccttctggagcatgagcaccagcagcgtgcggaagcggagtgagggagaagagaagaccctgactggagatgtgaaaacgtctccccccagaaccgctcctaagaagcagctcccctccattcccaagaatgccctccctattacaaagccaactagccctgcccctgctgcacagagtaccaatggcacacacgcatcatatggtccgttttacctggagtacagcttattggcagagttcacgctcgtagtgaagcaaaaactgccaggcgtgtacgtgcagcctagctaccgttcagcactcatgtggttcggggttatctttatccggcatggtctgtatcaggatggagtcttcaagttcacagtgtacattcccgataattatcctgacggagactgccctcggctggtgtttgatatcccggtctttcacccacttgtggacccaacctccggggaactcgatgtgaagagggcttttgcaaaatggcgcagaaaccacaatcatatatggcaggtcttgatgtacgcgcgtcgagtattttataagattgatacagccagccctctgaaccccgaggctgccgtactctacgagaaagacattcagctgttcaagagcaaggtagttgattcagttaaagtttgcactgctaggctgtttgaccaaccaaagatcgaagacccatatgccattagcttttccccatggaatccgagcgttcacgatgaggctcgagagaaaatgctgacgcagaaaaagccagaagagcaacacaataaatctgtacacgtggctggcctgtcctgggtgaagcccggatccgtccagccctttagtaaggaagaaaagacggtcgccacttag

SEQ ID NO: 212324 - DNA, 879 bp, Artificial Sequence
  derived and/or modified sequence
atgaaccccttctggagcatgagcaccagcagcgtgcggaagcggtctgaaggggaagaaaaaactctgacaggagatgtgaagacttcccctccgcggactgcccctaaaaagcagctgcctagtattccgaagaacgccttgcccattacaaaaccaactagtcccgctcctgctgcacagagtacaaatggaacccacgcttcctacgggcccttctatttggagtactctctccttgctgaatttacgctggtggtgaagcagaagttgccgggcgtgtatgtccagccttcttaccgtagtgcccttatgtggttcggcgtcattttcatccggcacgggctgtatcaggacggagtgttcaagtttaccgtgtacatcccagataattaccccgatggggattgcccacgtttggtgttcgatattcccgtattccaccctctcgtcgaccctacatccggggagctcgacgtcaagagggctttcgcaaagtggcggcgaaaccacaatcacatctggcaggtgctgatgtacgcacgacgcgtcttctataaaattgatactgccagcccactcaatcctgaagccgccgttttgtatgagaaagatatccaattgtttaagtccaaagtggtcgatagtgtgaaggtgtgtaccgcccgtctttttgaccagcctaagattgaggatccgtatgcgatttcctttagcccgtggaatcctagcgtccacgatgaagccagagaaaagatgttaacccagaagaagcccgaagaacagcataataagtcggtacacgtggcggggcttagctgggtgaagccaggatctgtgcaaccgtttagcaaggaagagaagactgttgctacgtag

SEQ ID NO: 212325 - DNA, 879 bp, Artificial Sequence
  derived and/or modified sequence
atgaatccattttggtctatgtctacaagctccgtacggaagaggtccgaaggcgaggaaaagaccttgactggagacgtgaaaacctcgcctccgaggacagcgcctaagaagcagctgcccagtataccaaagaacgccctccccattactaagccaacatcacccgctccagccgcacaatccactaacgggacccatgcgtcctatgggccattttatctggaatactctctgctggccgaattcaccctggtcgtgaagcaaaaactgcccggagtctatgttcagccgagttatcggtccgcactgatgtggtttggagtgatctttattaggcatgggctttatcaggacggggtgtttaaattcacagtgtacatacccgataattacccagatggagactgcccaagactggttttcgacatccctgtgttccacccattggtggacccgacctccggtgagctggatgtcaaaagggccttcgctaaatggaggcgcaaccataaccacatttggcaggtcctgatgtatgcccgtagagtgttctacaaaatcgacaccgcctcaccattgaaccctgaggcggcagttctgtacgagaaagacattcagctcttcaagagcaaggtggttgattccgtgaaggtgtgcacagcacggctgtttgaccaaccaaagattgaggacccctacgctatttcattcagtccgtggaaccctagtgtgcacgacgaggctcgggagaagatgcttacccagaagaagcctgaagagcagcacaacaagtccgtccacgttgccggactctcgtgggtcaagccaggatcagtgcaaccattctctaaagaggagaagaccgtggctacttag

SEQ ID NO: 212326 - DNA, 879 bp, Artificial Sequence
  derived and/or modified sequence
atgaacccgttctggtctatgtccacctcttccgtgaggaaaaggtcagagggagaggaaaaaactcttacgggcgatgttaagacctcacccccaagaacagccccaaaaaaacaattgccaagtattcctaagaacgcactcccgatcactaaaccaaccagtcccgctcccgctgctcagtccacgaatggcacccacgcttcatacggccctttctacctcgaatactccctgttggccgaatttactctcgttgtaaagcagaaattacccggagtgtatgtgcaaccctcttacaggagtgccctgatgtggtttggagtgatttttatcaggcacgggctctatcaagacggggtctttaagtttactgtgtatattcccgataactaccccgatggcgactgtcccaggctggtttttgatatcccagtttttcacccactggtcgaccctacaagtggggagttagatgtcaagagggcattcgctaaatggcgacgcaaccacaaccatatttggcaggttctcatgtacgcgcgtagggtgttctacaaaatcgacaccgccagcccactaaatcccgaggccgctgttttatacgaaaaagacatccaattgttcaaatctaaggtcgtggattccgtgaaagtatgtaccgccaggctttttgatcaaccaaagatcgaggacccgtacgccattagcttctccccctggaatccttcggtacacgacgaggcaagagaaaaaatgctgacgcagaagaaacctgaggaacagcacaataagtctgtacatgttgcagggctctcgtgggtaaagcccggtagtgtgcaaccctttagcaaggaagagaagacagttgctacctag

SEQ ID NO: 212327 - DNA, 879 bp, Artificial Sequence
  derived and/or modified sequence
atgaaccccttctggagcatgagcaccagcagcgtgagaaagagaagcgagggcgaggagaagaccctgaccggcgacgtgaagaccagcccccccagaaccgcccccaagaagcagctgcccagcatccccaagaacgccctgcccatcaccaagcccaccagccccgcccccgccgcccagagcaccaacggcacccacgccagctacggccccttctacctggagtacagcctgctggccgagttcaccctggtggtgaagcagaagctgcccggcgtgtacgtgcagcccagctacagaagcgccctgatgtggttcggcgtgatcttcatcagacacggcctgtaccaggacggcgtgttcaagttcaccgtgtacatccccgacaactaccccgacggcgactgccccagactggtgttcgacatccccgtgttccaccccctggtggaccccaccagcggcgagctggacgtgaagagagccttcgccaagtggagaagaaaccacaaccacatctggcaggtgctgatgtacgccagaagagtgttctacaagatcgacaccgccagccccctgaaccccgaggccgccgtgctgtacgagaaggacatccagctgttcaagagcaaggtggtggacagcgtgaaggtgtgcaccgccagactgttcgaccagcccaagatcgaggacccctacgccatcagcttcagcccctggaaccccagcgtgcacgacgaggccagagagaagatgctgacccagaagaagcccgaggagcagcacaacaagagcgtgcacgtggccggcctgagctgggtgaagcccggcagcgtgcagcccttcagcaaggaggagaagaccgtggccacctag

SEQ ID NO: 212328 - protein, 363 aa, Artificial Sequence
  derived and/or modified sequence
MDELQDVQLTEIKPLLNDKEHDIETTHGVVHVTIRGLPKGNRPVILTYHDIGLNHKSCFNAFFNFEDMQEITQHFAVCHVDAPGQQEGAPSFPTGYQYPTMDELAEMLPPVLTHLSLKSIIGIGVGAGAYILSRFALNHPELVEGLVLINVDPCAKGWIDWAASKLSGLTTNVVDIILAHHFGQEELQANLDLIQTYRMHIAQDINQDNLQLFLNSYNGRRDLEIERPILGQNDNKSKTLKCSTLLVVGDNSPAVEAVVECNSRLNPINTTLLKMADCGGLPQVVQPGKLTEAFKYFLQGMGYIPSASMTRLARSRTHSTSSSLGSGESPFSRSVTSNQSDGTQESCESPDVLDRHQTMEVSC

SEQ ID NO: 212329 - protein, 271 aa, Artificial Sequence [sequence omitted]

SEQ ID NO: 212330 - DNA, 1092 bp, Artificial Sequence
  derived and/or modified sequence
atggacgagctgcaggacgtgcagctgaccgagatcaagcccctgctgaacgacaaggagcacgacatcgagaccacccacggcgtggtgcacgtgaccatcagaggcctgcccaagggcaacagacccgtgatcctgacctaccacgacatcggcctgaaccacaagagctgcttcaacgccttcttcaacttcgaggacatgcaggagatcacccagcacttcgccgtgtgccacgtggacgcccccggccagcaggagggcgcccccagcttccccaccggctaccagtaccccaccatggacgagctggccgagatgctgccccccgtgctgacccacctgagcctgaagagcatcatcggcatcggcgtgggcgccggcgcctacatcctgagcagattcgccctgaaccaccccgagctggtggagggcctggtgctgatcaacgtggacccctgcgccaagggctggatcgactgggccgccagcaagctgagcggcctgaccaccaacgtggtggacatcatcctggcccaccacttcggccaggaggagctgcaggccaacctggacctgatccagacctacagaatgcacatcgcccaggacatcaaccaggacaacctgcagctgttcctgaacagctacaacggcagaagagacctggagatcgagagacccatcctgggccagaacgacaacaagagcaagaccctgaagtgcagcaccctgctggtggtgggcgacaacagccccgccgtggaggccgtggtggagtgcaacagcagactgaaccccatcaacaccaccctgctgaagatggccgactgcggcggcctgccccaggtggtgcagcccggcaagctgaccgaggccttcaagtacttcctgcagggcatgggctacatccccagcgccagcatgaccagactggccagaagcagaacccacagcaccagcagcagcctgggcagcggcgagagccccttcagcagaagcgtgaccagcaaccagagcgacggcacccaggagagctgcgagagccccgacgtgctggacagacaccagaccatggaggtgagctgctag

SEQ ID NO: 212331 - DNA, 1092 bp, Artificial Sequence
  derived and/or modified sequence
atggacgagctacaagatgtgcagttgacagagatcaaacctttgttaaatgataaggagcacgatatcgaaaccacccacggagtggtccatgtgacgattcgagggctgccaaagggaaatcgtccagttatcttgacataccacgacattggactgaaccataagtcgtgcttcaatgctttctttaactttgaggatatgcaagaaatcacacagcatttcgctgtgtgtcacgttgatgcccccggacagcaagaaggggctccaagttttccaactggctaccagtaccccacgatggacgaactggctgaaatgctcccccccgtcctcacccacttatctctcaaatctatcatcggtattggggtcggcgctggtgcgtacatcctttcaaggtttgcattaaatcacccggaactggttgaagggctcgtcctcatcaacgtggacccgtgtgctaaaggctggatagattgggcagccagcaagctgtctggattgactacaaatgttgtggatataattctcgctcaccacttcggccaggaggaattacaggccaatctggacctgatccaaacatatcgcatgcatatcgcacaggatatcaaccaagataacctccagctgtttcttaacagctacaatgggcggagagacctcgagatcgaaagacccatacttggacagaacgataacaagtctaagacactgaagtgtagcacgctactggtggtaggtgacaactctcctgcagtggaagctgtggtcgaatgtaatagcaggctcaatccaataaatactacactacttaaaatggctgactgcggagggttgccccaggttgttcagcccggaaaattgacggaagcctttaagtattttttacaaggtatgggctatattccatcagcgtccatgacaaggcttgcgagatcaaggacacattccacgtccagttccttaggatccggagagtctccatttagtagatcagttacgtctaatcaaagcgacggaacccaagagtcctgcgaatcaccggatgttctcgaccgccatcagaccatggaagtgtcttgctag

SEQ ID NO: 212332 - DNA, 1092 bp, Artificial Sequence
  derived and/or modified sequence
atggatgagctgcaggatgtgcagctgacagagatcaagcccctgctgaatgacaaggagcatgacatcgagaccacccatggagtggtgcacgtgaccatccggggcctgcccaagggcaacagacctgtgatcctgacctaccatgacatcggcctgaaccacaagagctgcttcaatgccttcttcaactttgaggacatgcaggagatcacccagcactttgctgtgtgccacgtggatgcccctggccagcaggagggcgcccccagcttccccaccggctaccagtaccccaccatggatgagctggccgagatgctgccccctgtgctgacccacctgagcctgaagagcatcattggaattggagtgggcgctggggcctacatcctgagcagatttgccctgaaccaccctgagctggtggagggcctggtgctgatcaacgtggacccctgtgccaagggctggattgactgggccgccagcaagctgagcggcctgaccaccaacgtggtggacatcatcctggcccaccacttcggccaggaggagctgcaggccaacctggacctgatccagacctacaggatgcacatcgcccaggacatcaaccaggacaacctgcagctgttcctgaacagctacaacggccggcgggacctggagattgagcggcccatcctgggccagaatgacaacaagagcaagaccctgaagtgcagcaccctgctggtggtgggggacaacagccctgctgtggaggccgtggtggagtgcaacagccggctgaaccccatcaacaccaccctgctgaagatggctgactgtggcggcctgccccaggtggtgcagcccgggaagctgacagaggccttcaagtacttcctgcagggcatgggctacatccccagcgcctccatgacccggctggcccggagcaggacccacagcaccagcagcagcctgggcagcggggagagccccttcagccgctctgtgaccagcaaccagagtgatggcacccaggagagctgtgagagcccagatgtgctggacagacaccagaccatggaggtgtcctgctag

SEQ ID NO: 212333 - DNA, 1092 bp, Artificial Sequence
  derived and/or modified sequence
atggacgagctgcaggacgtgcagctgaccgagatcaagcccctgctaaacgataaggagcacgatatcgaaaccacacatggtgttgtgcacgttacaatcagaggactgcctaaggggaatcgcccagtgatcctgacctatcatgatatcggccttaatcacaagtcgtgctttaacgccttctttaacttcgaagacatgcaggagatcactcaacattttgctgtgtgccacgtggacgccccggggcagcaggagggcgctcccagcttcccgaccggctaccagtaccccacaatggacgaattggcagaaatgctcccacctgtgttgacacatctctctctcaagtctataatcggcataggtgtaggtgccggagcgtacatcctgtcccggtttgcacttaaccatccagagctcgtggaaggcctggtgctgatcaatgttgatccatgcgccaaaggatggattgattgggcagcctctaaactgtccggtctgaccaccaacgtggtggacatcatcctggcccatcacttcgggcaagaggagctgcaagcgaatctggatttaattcagacttaccgcatgcacatcgcccaggatataaaccaggacaatctgcagctgtttctcaactcctataacggcaggcgggacctagaaatcgagcgacccatactgggccagaatgataacaagtccaaaactctcaagtgctcaacgctgctggtggtaggagataactctcccgcagtggaggccgtcgtggagtgcaactccaggctgaatccaatcaacacgaccttgctaaaaatggccgattgtggcggtctgcctcaagtggtccaaccagggaaattaaccgaagccttcaagtattttctgcaggggatgggctacattccgagcgcttccatgacccgactcgcgcgttcccgtacgcacagtacttccagttcactggggtccggggagtctcctttttcaagatctgtcacctcaaatcagagcgatggcacacaagagagttgcgagagccctgacgtcctagataggcaccaaaccatggaggttagctgctag

SEQ ID NO: 212334 - DNA, 2917 bp, Artificial Sequence
  derived and/or modified sequence
gacggcgggtgcccgcgcctcagagttactgatttattcttgagattcctctactctcgttatctgacctcatggatgaacttcaggatgttcagctcacagagatcaaaccacttctaaatgataaggaacatgatatagaaacaactcatggtgtggtccacgtcactataagaggcttacccaaaggaaacagaccagttatactaacatatcatgacattggcctcaaccataaatcctgtttcaatgcattctttaactttgaggatatgcaagagatcacccagcactttgctgtctgtcatgtggatgccccaggccagcaggaaggtgcaccctctttcccaacagggtatcagtaccccacaatggatgagctggctgaaatgctgcctcctgttcttacccacctaagcctgaaaagcatcattggaattggagttggagctggagcttacatcctcagcagatttgcactcaaccatccagagcttgtggaaggccttgtgctcattaatgttgacccttgcgctaaaggctggattgactgggcagcttccaaactctctggcctgacaaccaatgttgtggacattattttggctcatcactttgggcaggaagagttacaggccaacctggacctgatccaaacctacagaatgcatattgcccaagacatcaaccaagacaacctgcagctcttcttgaattcctacaatggacgcagagacctggagatcgaaagacccatactgggccaaaatgataacaaatcaaaaacattaaagtgttctactttactggtggtaggggacaattcgcctgcagttgaggctgtggtcgaatgcaattcccgcctgaaccctataaatacaactttgctaaagatggcggactgtgggggactgccccaggtagttcagcctgggaagctcaccgaggccttcaagtactttttgcagggaatgggctacataccatctgccagcatgactcggctcgcccgatcacgaacccactcaacctcgagtagcctcggctctggagaaagtcccttcagccggtctgtcaccagcaatcagtcagatggaactcaagaatcctgtgagtcccctgatgtcctggacagacaccagaccatggaggtgtcctgctaagcagatgctcctcccctggaccattgcaagtccatccttcaaatgaccactccataatataacatttcatccagtaaactggcctctactatctttaactcatgcatggccactgaacctctctctagtagcctggatttatcattctctctgcctgcccacccccttttttgtatagcccaagaaccacttccatgccatactgtaacattccaacatctttagctgatcagatctctccatatcctctcttgccagctttttcccgtgctcccccaactatgtatcagataagattctttgatcccgactctgtgtgtgcgagcacgcgtgtctgtgtttgtgtgtgcatagttctgtggttttagacacgctttcttgtagtgcttctgcaaaaaacaaaaaagggacttattttgcattctcaatggtgtttttaagggaattaggcagaacagatttctaggttgggtaggccactgcattctcttttgtttgcaaattggtcaacaaaatttgcaaagtgatttcaggagagagcagctttgaggaatgtggaaaatcataattgccgtctggaccattgattgattgtgaccagtagcagaagggtgcctgttacatagagaggctccttctgtccaaatgaatttctgtatactcttctataaataaaagggaggaatatattctgctggaagcccatgaaccatcgctgaggttctgatacaacatagagttttttccaaggagtgaatgtggtttaattactggactctcttagcacaggaaggtggaaacaaaatgccaggcctctgctctgaagagcaaaactgctgtcgctgcagtatctgataccagacatccacatatccacaagaagtgcctcttaggtctgtgacagagagtgtgtctccattcctcagttcccagaaaggggagaggtttggcctaaaaagcatgtagatgggggagaaatgggtggggggagaggaacagccattaacacagtatcatgtttaacaagtatagccttgatttcagtagatgtaatggaagccaaattaaattgatacagaacccatttctcagagtctttttttttttttgagacagagtctcgctgttacccaggctggagtgcaatggcgcaaacttggctcactgcaacctctgccccctgggttcaagcgattctcctgcctcagcctcccgagtagctgagactacaggcacctgccaccatacccagctaagttatgtatttttagtagagatggagtttcaccatgttggccaggctggtctcaaactcctgacctcaggtgatccacctgcctcagcctcccaaagtgctgggattacaggcatgagtcattgctcccagccattagaaagattgttaatcctatgaactcccttttgtaggagagaaagggccaatctgtaggggtagccctgtccaggtaaagttgttttcagcctcatgtctactgttaggtgagggagtcacagccagacagagagtattgctggagggtgagagaattgtggagaccaactaccacatagcaagagcccagctcttgggagcattgagatgtaagctcagggttacacagttccaaatcttgggaaggggcttttcagacagactgtttgctttctgctgagataaggaatgcatcactctgccagagtatgactttttacagattattaaataaagctgcatatgtctcattgttacctga

SEQ ID NO: 212335 - DNA, 1092 bp, Artificial Sequence
  derived and/or modified sequence
atggacgaactacaagacgttcagctgactgagatcaagccgctgctgaacgataaagaacatgacatcgagaccactcatggagtagtgcatgtgactataagagggttgccgaaaggaaacaggccagttatattaacatatcatgacattggccttaatcataagtcttgctttaatgcctttttcaattttgaagatatgcaggaaatcactcaacatttcgctgtgtgtcatgttgacgcacctgggcagcaggaaggcgcaccctcgttccccacagggtaccagtacccgacgatggacgagctggccgaaatgttgccccctgtgctgacacacctgagcctgaaatccattatcggcattggggtcggggctggcgcttatatcctgtccaggttcgccctgaatcaccccgaactggtagaaggactggtgctcattaacgtggatccttgcgctaaaggttggattgactgggcggcatccaagctgagcgggctaactactaacgtagtggacatcattctcgcccatcactttggtcaggaggagctccaagctaacctggatctcatccagacttatagaatgcacatcgcgcaggacatcaatcaggacaacctgcagctcttcctgaacagttataacggcagacgagatctggagattgaacggccaattctgggacagaacgataacaaatccaagacccttaaatgttcaaccttactcgtcgttggtgacaactcccccgcagttgaggctgtcgtggagtgcaattctaggctcaatcctattaacacaaccctgctgaaaatggcagattgcggaggactcccccaggtcgtacaacctggaaaattaaccgaggctttcaagtacttccttcaaggcatgggatacattccctctgccagtatgacccggctcgcgaggagccgcacacattcgacctccagttccctgggttccggggagtctccattctcccggtctgttaccagcaatcaaagcgacgggacacaggaatcatgcgaatctcccgatgtgctcgacagacaccaaacaatggaggtgtcgtgttag

SEQ ID NO: 212336 - protein, 598 aa, Artificial Sequence
  derived and/or modified sequence
MASLRRVKVLLVLNLIAVAGFVLFLAKCRPIAVRSGDAFHEIRPRAEVANLSAHSASPIQDAVLKRLSLLEDIVYRQLNGLSKSLGLIEGYGGRGKGGLPATLSPAEEEKAKGPHEKYGYNSYLSEKISLDRSIPDYRPTKCKELKYSKDLPQISIIFIFVNEALSVILRSVHSAVNHTPTHLLKEIILVDDNSDEEELKVPLEEYVHKRYPGLVKVVRNQKREGLIRARIEGWKVATGQVTGFFDAHVEFTAGWAEPVLSRIQENRKRVILPSIDNIKQDNFEVQRYENSAHGYSWELWCMYISPPKDWWDAGDPSLPIRTPAMIGCSFVVNRKFFGEIGLLDPGMDVYGGENIELGIKVWLCGGSMEVLPCSRVAHIERKKKPYNSNIGFYTKRNALRVAEVWMDDYKSHVYIAWNLPLENPGIDIGDVSERRALRKSLKCKNFQWYLDHVYPEMRRYNNTVAYGELRNNKAKDVCLDQGPLENHTAILYPCHGWGPQLARYTKEGFLHLGALGTTTLLPDTRCLVDNSKSRLPQLLDCDKVKSSLYKRWNFIQNGAIMNKGTGRCLEVENRGLAGIDLILRSCTGQRWTIKNSIK

SEQ ID NO: 212337 - DNA, 1797 bp, Artificial Sequence
  derived and/or modified sequence
atggccagcctgagaagagtgaaggtgctgctggtgctgaacctgatcgccgtggccggcttcgtgctgttcctggccaagtgcagacccatcgccgtgagaagcggcgacgccttccacgagatcagacccagagccgaggtggccaacctgagcgcccacagcgccagccccatccaggacgccgtgctgaagagactgagcctgctggaggacatcgtgtacagacagctgaacggcctgagcaagagcctgggcctgatcgagggctacggcggcagaggcaagggcggcctgcccgccaccctgagccccgccgaggaggagaaggccaagggcccccacgagaagtacggctacaacagctacctgagcgagaagatcagcctggacagaagcatccccgactacagacccaccaagtgcaaggagctgaagtacagcaaggacctgccccagatcagcatcatcttcatcttcgtgaacgaggccctgagcgtgatcctgagaagcgtgcacagcgccgtgaaccacacccccacccacctgctgaaggagatcatcctggtggacgacaacagcgacgaggaggagctgaaggtgcccctggaggagtacgtgcacaagagataccccggcctggtgaaggtggtgagaaaccagaagagagagggcctgatcagagccagaatcgagggctggaaggtggccaccggccaggtgaccggcttcttcgacgcccacgtggagttcaccgccggctgggccgagcccgtgctgagcagaatccaggagaacagaaagagagtgatcctgcccagcatcgacaacatcaagcaggacaacttcgaggtgcagagatacgagaacagcgcccacggctacagctgggagctgtggtgcatgtacatcagcccccccaaggactggtgggacgccggcgaccccagcctgcccatcagaacccccgccatgatcggctgcagcttcgtggtgaacagaaagttcttcggcgagatcggcctgctggaccccggcatggacgtgtacggcggcgagaacatcgagctgggcatcaaggtgtggctgtgcggcggcagcatggaggtgctgccctgcagcagagtggcccacatcgagagaaagaagaagccctacaacagcaacatcggcttctacaccaagagaaacgccctgagagtggccgaggtgtggatggacgactacaagagccacgtgtacatcgcctggaacctgcccctggagaaccccggcatcgacatcggcgacgtgagcgagagaagagccctgagaaagagcctgaagtgcaagaacttccagtggtacctggaccacgtgtaccccgagatgagaagatacaacaacaccgtggcctacggcgagctgagaaacaacaaggccaaggacgtgtgcctggaccagggccccctggagaaccacaccgccatcctgtacccctgccacggctggggcccccagctggccagatacaccaaggagggcttcctgcacctgggcgccctgggcaccaccaccctgctgcccgacaccagatgcctggtggacaacagcaagagcagactgccccagctgctggactgcgacaaggtgaagagcagcctgtacaagagatggaacttcatccagaacggcgccatcatgaacaagggcaccggcagatgcctggaggtggagaacagaggcctggccggcatcgacctgatcctgagaagctgcaccggccagagatggaccatcaagaacagcatcaagtag

SEQ ID NO: 212338 - DNA, 1797 bp, Artificial Sequence
  derived and/or modified sequence
atggcctccctgcggagggtaaaagtgctgctggttttgaatctcatagccgtcgcaggcttcgtgctattcctcgccaagtgtcgccccattgccgtgaggagcggggacgcattccacgagataaggccacgggccgaagtcgcaaacctgtccgcccactcagcaagcccgatacaggacgcagtgcttaaacgcctatcgctcctcgaggacatcgtatacagacagctgaacggcctgtcaaagtccctgggattaattgagggctacggagggcgcgggaaaggggggctgccagcaaccctgtcccctgccgaggaagagaaggctaaaggaccgcatgagaagtacggttacaacagttatctctccgaaaagatctccttagaccggtccatccccgattatcgccctaccaagtgcaaggaactgaagtacagtaaagacctcccacaaattagcatcatatttatcttcgtcaatgaggcattatccgtgatcctcaggagtgtccacagtgctgtgaaccatacacctacccatctccttaaagagatcatcctggtggatgacaactcggacgaggaggaattaaaggtgcctctggaagagtacgtgcataaaaggtaccccggccttgtcaaagtggtgaggaaccagaaacgcgagggtctgatcagagcccgcattgagggctggaaagtggctaccgggcaggtgaccggcttcttcgacgcccacgttgagtttacagctggatgggcagagcctgtacttagcaggatccaagagaaccgtaagagagtcatcctccctagtatagataatatcaagcaagacaatttcgaggtccagagatatgaaaacagcgcacatggctactcatgggaactatggtgcatgtatatttcccccccgaaagattggtgggacgcgggagacccttctctgcccatcagaaccccagcgatgataggctgttcctttgtagtaaataggaagttcttcggagagatcgggctcctggatcctggtatggacgtttatggaggggagaacattgagttgggtattaaggtgtggctgtgcgggggctcgatggaagttcttccctgtagcagggttgcccacatagagcgaaagaaaaaaccctacaactccaacatcggcttctacaccaaacgaaatgccctcagggtggctgaagtctggatggacgactacaaaagtcatgtctacattgcgtggaacctgcctttggagaatccaggcatcgacattggagatgtgagtgagcggcgcgcccttcgcaagagtctgaagtgtaaaaactttcagtggtacctcgaccacgtgtacccggaaatgcgaagatataataacacagtagcttacggagaacttaggaacaataaggcaaaggacgtgtgtctggatcagggcccattagagaaccacactgcaatattgtatccctgtcacggctgggggccacaactcgcccgatataccaaagagggctttctgcatcttggagcactggggacaactactctgctaccagatactcgctgcttggttgacaactccaaatcacgcctgccccagttgttggactgcgataaggtgaagtcatcactgtacaaacggtggaactttatccagaatggagcaatcatgaataaggggactggtcgttgcctggaagtggagaaccgcggactggcgggcattgacttgatcctcagatcttgcacaggacagaggtggacaatcaagaatagtatcaaatag

SEQ ID NO: 212339 - DNA, 1797 bp, Artificial Sequence
  derived and/or modified sequence
atggccagcctgcggcgggtgaaggtgctgctggtgctgaacctgattgctgtggccggctttgtgctcttcctggccaagtgccggcccatcgctgtgcgctctggagatgccttccacgagatccggcccagggctgaggtggccaacctgagcgcccacagcgccagccccatccaggatgctgtgctgaagaggctgagcctgctggaggacatcgtgtaccggcagctgaatggcctgagcaagagcctgggcctcatcgagggctatggaggccggggcaagggcggcctgcctgccaccctgagccctgctgaggaggagaaggccaagggcccccatgagaagtatggctacaacagctacctgtctgagaagatcagcctggacaggagcatcccagactaccggcccaccaagtgcaaggagctgaagtacagcaaggacctgccccagatcagcatcatcttcatctttgtgaatgaggccctgagcgtcatcctgcggtctgtgcacagcgctgtgaaccacacccccacccacctgctgaaggagatcatcctggtggatgacaacagtgatgaggaggagctgaaggtgcccctggaggagtatgtgcacaagcgctacccaggcctggtgaaggtggtgaggaaccagaagcgggagggcctcatccgggccagaattgagggctggaaggtggccaccggccaggtgacaggcttctttgatgcccacgtggagttcaccgctggctgggccgagcctgtgctgagccgcatccaggagaacaggaagagggtcatcctgcccagcattgacaacatcaagcaggacaactttgaggtgcagagatatgaaaattctgcccacggctacagctgggagctgtggtgcatgtacatcagcccccccaaggactggtgggatgctggggaccccagcctgcccatccgcaccccagccatgattggctgcagctttgtggtgaacaggaagttctttggagagatcggcctgctggaccccggcatggatgtgtatggaggagaaaatattgagctgggcatcaaggtgtggctgtgtggcggctccatggaggtgctgccctgcagccgggtggcccacattgaaaggaagaagaagccctacaacagcaacatcggcttctacaccaagagaaatgccctgcgggtggccgaggtgtggatggatgactacaagagccacgtgtacatcgcctggaacctgcccctggagaaccctggcatcgacattggagatgtgtctgagcggcgggccctgaggaagagcctgaagtgcaagaacttccagtggtacctggaccacgtgtacccagagatgaggcgctacaacaacacagtggcctacggggagctgaggaacaacaaggccaaggatgtgtgcctggaccagggccccctggagaaccacacagccatcctgtacccctgccacggctggggcccccagctggcccgctacaccaaggagggcttcctgcacctgggcgccctgggcaccaccaccctgctgcctgacacccgctgcctggtggacaacagcaagagccggctgccccagctgctggactgtgacaaggtgaagagcagcctgtacaagcgctggaacttcatccagaatggagccatcatgaacaagggcaccggccgctgcctggaggtggagaacagaggcctggccggcatcgacctgatcctgcggagctgcaccggccagcgctggaccatcaagaacagcatcaagtag

SEQ ID NO: 212340 - DNA, 1797 bp, Artificial Sequence
  derived and/or modified sequence
atggccagcctgcggcgggtgaaggtgctgctggtgctgaacctgattgctgtcgcaggcttcgtgctgttcctcgctaagtgcaggccgatcgcggtgcggtctggggacgctttccatgaaatcagaccaagagccgaggtcgcaaacttgtctgcgcactcagcatcaccaattcaggacgcggtgctgaaaaggctatcactgctggaggacatcgtttaccgacagctcaatggcctgtctaaatcactcgggctgattgagggatacggaggtcggggcaagggaggtttgcccgcaactctgtccccagccgaggaggaaaaggcaaaggggcctcacgagaagtacggctacaattcttatcttagcgaaaaaattagccttgaccggtctatccccgattaccggcctactaaatgtaaagagcttaaatattccaaggatcttccgcaaatcagcattatattcatattcgtgaacgaggccttgagtgtgatcctccgttccgtgcatagtgcagtcaaccacacacccacccatctgctgaaggagatcatcctcgtcgatgataattcggatgaagaggaacttaaagtaccactggaggaatatgtgcacaagagataccccggcttggtcaaggtcgtcagaaaccagaagagagagggcttgatcagagctcggatcgagggttggaaggtggccactggtcaggtaaccgggttctttgacgctcacgtcgagttcactgccggatgggcagaacctgtgttgagtagaattcaggaaaatcgtaaacgggtcattctcccctcaatcgataacattaagcaggataatttcgaggtccagagatatgagaattcagcccatggttatagctgggagctttggtgtatgtatatttctccaccaaaggattggtgggacgctggagacccgtccttacctatcaggacgccggcaatgattggatgttccttcgttgttaatcgaaagttcttcggggaaatcggactgttggatcccggaatggatgtttatggaggtgagaacattgaactgggcattaaagtctggttgtgcgggggttccatggaagttttgccatgctcacgggtcgcccatatcgagcggaagaagaagccctataatagcaacattggcttttacacaaaaaggaacgccctcagggtggcagaagtctggatggacgattataagagccacgtctacattgcctggaacctacccctggagaaccccgggatcgacattggggacgtttcagaacgaagggcccttcgcaagagccttaagtgcaaaaacttccagtggtatctggatcatgtctacccagaaatgcgtcgctacaacaataccgtggcatacggtgagctgcgtaacaataaagctaaagacgtgtgcttggatcaaggtcctctggaaaaccacaccgcaattttgtacccttgtcacgggtggggaccccagctggccagatatacaaaggagggttttcttcacctgggggccctaggcaccactactctattacctgacacccggtgccttgttgataattccaaaagccgtctcccacagctgctggattgtgataaagtgaagagctccctgtacaaacggtggaacttcattcagaacggtgctatcatgaacaaaggcaccgggaggtgtctggaagttgaaaatcgcggtttggccggaatcgacctgatcctacgctcttgcactggtcagagatggaccatcaagaactccatcaagtag

SEQ ID NO: 212341 - DNA, 1797 bp, Artificial Sequence
  derived and/or modified sequence
atggccagcctgcgaagagtgaaagttctcctagtgctcaacctaattgctgtggccggattcgtgctcttcctggcaaagtgcaggcccatcgctgtcagatcaggggacgcattccatgaaatcagaccgcgagcagaggtggcaaacctgagtgcccattccgcaagtcctatacaggacgcagtgctaaaacggctgtccctgctggaagatatcgtttaccgacagctcaatggcctctcaaagtctcttgggctcattgagggttatgggggtcggggaaaaggcggtttgcccgctactttgtcacccgctgaagaggaaaaagccaagggcccacacgagaaatatggctacaactcctacctctcagagaagatttccctggaccgttctatccctgattatcgccctaccaagtgcaaggagctaaaatatagcaaagacctgcctcagatcagtatcattttcatttttgtgaacgaagccttgagtgtgattctcaggagtgtccatagtgcggtaaaccacacacccacccatctcctgaaagaaatcattttggttgacgataattcagatgaagaggagctcaaagtgcccttagaggagtacgttcacaagcggtaccccggactcgtcaaggttgttaggaaccagaagagagaaggcttgatacgggctcggatcgaagggtggaaggtggccaccggccaggtcacaggcttctttgacgcccatgtggagtttaccgcagggtgggcagaaccagtgctcagccgtatccaagagaacagaaagagagttattttgccgtccatcgacaatattaagcaggacaatttcgaggtccagaggtacgaaaactccgcccacggttattcttgggagctgtggtgtatgtatatctccccgcctaaggattggtgggacgccggagaccctagtttacctataagaacgcctgccatgatagggtgttcatttgttgtcaataggaaattcttcggggagattggtctgctggatcctggtatggacgtttacggaggcgagaacatcgaacttgggatcaaagtttggctatgcggaggcagcatggaggtgctcccctgcagccgcgttgcccatatcgaaagaaagaagaagccttacaactccaatattggattctacaccaaaaggaacgcgcttcgcgtggccgaggtgtggatggatgattacaagagccatgtgtacatcgcttggaaccttcccctcgaaaatcccggaatagacatcggcgatgtcagcgaacgtagagccctcaggaagtccctgaagtgtaaaaatttccagtggtacctggatcatgtgtatccagagatgcgaaggtataataataccgtagcttacggcgaactgcgcaataacaaagcaaaagatgtttgtctggatcagggccctctggaaaaccacaccgccatattatatccttgtcatggatggggtcctcagttggcaaggtatacaaaggagggcttccttcatctcggcgctctcggaactacaacactactgccggatacaagatgtttggtcgataattctaaatctagactaccccagcttctagactgcgacaaggtgaaaagcagtctgtataaacggtggaactttatccagaatggggctattatgaataaaggaacagggaggtgcctcgaagtggagaaccgcggtctggccggaattgaccttatcctgcggagctgcactgggcagagatggacgattaaaaactccatcaagtag

SEQ ID NO: 212342 - DNA, 3884 bp, Artificial Sequence
  derived and/or modified sequence
tggaggatgcgggctccccgagcgggcttcccctctgcccggcgcgatggagcgggtcggtgagcggaacaaaggcgcctgcccgggggagcgggtcttccgctgaagagcgcgggtggcgcgccgcgacggccgcctgcgggccaaggtgggaggctgtgcggccccaggcgcggcgcgctccgccgtgggcgggcggcgatccctgagtccggcacctgtgcgccgctccctctgtgcctcccgggcagccccgcctgccggcctcggagtccgcggcgccggcggctagaggtccagaggcgaaccacttgctggtgcagaagagaaaccctcaaatccctggcctttcgcggagacgcctggacggggccgtgcgccgtggactgagcaggcgtctcggggagcacttctgcagagcgaggacttccatgtgagcgattccgttctccccaccaccaatccgacctcccagccgtctccgccgcccgagcatccttgaggtgggacgagcaggggcttggatccctgccggccgtctggtgtgtgaggcttgcacggcccctggctgccccgcgcctcgccggagcccgagggggcgcaggtccggggcgagggccggccgggctgtttgatggcttcactgagaagagtcaaagtgctgttggtgttgaacttgatcgcggtagccggcttcgtgctcttcctggccaagtgccggcccatcgcggtgcgcagcggagacgccttccacgagatccggccgcgcgccgaggtggccaacctcagcgcgcacagcgccagccccatccaggatgcggtcctgaagcgcctgtcgctgctggaggacatcgtgtaccggcagctgaatggcttatccaaatcccttgggctcattgaaggttatggtgggcggggtaaagggggccttccggctactctttccccggctgaagaagaaaaggctaagggaccccatgagaagtatggctacaattcatacctcagtgaaaaaatttcactggaccgttccattccggattatcgtcccaccaagtgtaaggagctcaagtactccaaggacctgccccagatatccatcatattcatcttcgtgaacgaggccctgtcggtgatcctgcggtccgtgcacagtgccgtcaatcacacgcccacacacctgctgaaggaaatcattctggtggatgacaacagcgacgaagaggagctgaaggtccccctagaggagtatgtccacaaacgctaccccgggctggtgaaggtggtaagaaatcagaagagggaaggcctgatccgcgctcgcattgagggctggaaggtggctaccgggcaggtcactggcttctttgatgcccacgtggaattcaccgctggctgggctgagccggttctatcccgcatccaggaaaaccggaagcgtgtgatcctcccctccattgacaacatcaaacaggacaactttgaggtgcagcggtacgagaactcggcccacgggtacagctgggagctgtggtgcatgtacatcagccccccaaaagactggtgggacgccggagacccttctctccccatcaggaccccagccatgataggctgctcgttcgtggtcaacaggaagttcttcggtgaaattggtcttctggatcctggcatggatgtatacggaggagaaaatattgaactgggaatcaaggtatggctctgtgggggcagcatggaggtccttccttgctcacgggtggcccacattgagcggaagaagaagccatataatagcaacattggcttctacaccaagaggaatgctcttcgcgttgctgaggtctggatggacgattacaagtctcatgtgtacatagcgtggaacctgccgctggagaatccgggaattgacatcggtgatgtctccgaaagaagagcattaaggaaaagtttaaagtgtaagaatttccagtggtacctggaccatgtttacccagaaatgagaagatacaataataccgttgcttacggggagcttcgcaacaacaaggcaaaagacgtctgcttggaccaggggccgctggagaaccacacagcaatattgtatccgtgccatggctggggaccacagcttgcccgctacaccaaggaaggcttcctgcacttgggtgccctggggaccaccacactcctccctgacacccgctgcctggtggacaactccaagagtcggctgccccagctcctggactgcgacaaggtcaagagcagcctgtacaagcgctggaacttcatccagaatggagccatcatgaacaagggcacgggacgctgcctggaggtggagaaccggggcctggctggcatcgacctcatcctccgcagctgcacaggtcagaggtggaccattaagaactccatcaagtagagggagggagctggggcactggagcctggcccccaggacatggctgctccccccaacatctggaccagctgccctggcggagagacagcaaggggccggcaggtgctcgatgggccccccagggcttctccagggcagcacagggaccccggatgaagactctgtcccccctcaggcattcagctgcccacaagtttcctgcaccctggaaaagccccccacccttcctctgggaaactgacagctgtcttccacagcctctgatgtggacctggtactgaggagcaagactgtccagttctcctccacatctcccatcccagaatcaggatctgggactggcagggtcccctcctgtgtctcatctcttgcagcagcagctgctgaactccagccatcaacacggtgggaggcagcgggggcttcagccatgtcctagctccccgccctaaaaggaggcagtgaggaccaggcactatttcctccgaggttacttctacccagatgacacctgcctgttcacgccccaaggcagctactgcccctaacccttcccaccagggtagctttgggcactgcagctctggacttttctggcccctcctgagatgacctgatggagctgatgctttctctcctaatccctgggcactaggctcttatcagtgtgcttgggccagctctcctgcctgtgtctagaggaagccagagacagaaataggctaagcctgcagtaggatctcagccacaagggccccgcaggatggagctgggtcaaggaccagggagccctgactcccagaggctgccaccggggagaagcagcggtcctccatccagaacctaagggctgaagcaaaggctgccaggacccttgaagatgcttttggctcacctcatttcaccccacgctctgctggctggcagaggagaaggcagtcgtttcctctctgaagagtatttttttcgattgccctctggttagggtgcacatataaatcagagttaatatatgaacgcgtgtgcatgcacaagtgtgtgtgtgcctgcgtgctgtgcgtggcagggtgtgtgtgtgtgtgtctggctgtgcgttccggagtgtgtgacgatgctgacctagctgtgtggccttgggcttgctgcttcattactcacctggatggggacgagggatgagaagggtgtgggtttggccccatgtcactggccggaaggatgtgtctcagccctgccctgtggggtgcccccgatgggaggctgtcccatctcccagtccccatctctttttccccacactgtccctggccaagccctgcccagagctgaaccctgtagctgcccccttgccctgtgtgggattcgcagtgtctcatttggtgacgtcttactggtgatcatctcctcaccccatctcccaccttgtggaataaatacatgttagcacttccca

SEQ ID NO: 212343 - protein, 589 aa, Artificial Sequence
  derived and/or modified sequence
MSVSVHETRKSRSSTGSMNVTLFHKASHPDCVLAHLNTLRKHCMFTDVTLWAGDRAFPCHRAVLAASSRYFEAMFSHGLRESRDDTVNFQDNLHPEVLELLLDFAYSSRIAINEENAESLLEAGDMLQFHDVRDAAAEFLEKNLFPSNCLGMMLLSDAHQCRRLYEFSWRMCLVHFETVRQSEDFNSLSKDTLLDLISSDELETEDERVVFEAILQWVKHDLEPRKVHLPELLRSVRLALLPSDCLQEAVSSEALLMADERTKLIMDEALRCKTRILQNDGVVTSPCARPRKAGHTLLILGGQTFMCDKIYQVDHKAKEIIPKADLPSPRKEFSASAIGCKVYVTGGRGSENGVSKDVWVYDTVHEEWSKAAPMLIARFGHGSAELENCLYVVGGHTSLAGVFPASPSVSLKQVEKYDPGANKWMMVAPLRDGVSNAAVVSAKLKLFVFGGTSIHRDMVSKVQCYDPSENRWTIKAECPQPWRYTAAAVLGSQIFIMGGDTEFTAASAYRFDCETNQWTRIGDMTAKRMSCHALASGNKLYVVGGYFGTQRCKTLDCYDPTSDTWNCITTVPYSLIPTAFVSTWKHLPA

SEQ ID NO: 212344 - protein, 558 aa, Artificial Sequence
  derived and/or modified sequence
MSVSVHETRKSRSSTGSMNVTLFHKASHPDCVLAASSRYFEAMFSHGLRESRDDTVNFQDNLHPEVLELLLDFAYSSRIAINEENAESLLEAGDMLQFHDVRDAAAEFLEKNLFPSNCLGMMLLSDAHQCRRLYEFSWRMCLVHFETVRQSEDFNSLSKDTLLDLISSDELETEDERVVFEAILQWVKHDLEPRKVHLPELLRSVRLALLPSDCLQEAVSSEALLMADERTKLIMDEALRCKTRILQNDGVVTSPCARPRKAGHTLLILGGQTFMCDKIYQVDHKAKEIIPKADLPSPRKEFSASAIGCKVYVTGGRGSENGVSKDVWVYDTVHEEWSKAAPMLIARFGHGSAELENCLYVVGGHTSLAGVFPASPSVSLKQVEKYDPGANKWMMVAPLRDGVSNAAVVSAKLKLFVFGGTSIHRDMVSKVQCYDPSENRWTIKAECPQPWRYTAAAVLGSQIFIMGGDTEFTAASAYRFDCETNQWTRIGDMTAKRMSCHALASGNKLYVVGGYFGTQRCKTLDCYDPTSDTWNCITTVPYSLIPTAFVSTWKHLPA

SEQ ID NO: 212345 - DNA, 1770 bp, Artificial Sequence
  derived and/or modified sequence
atgagcgtgagcgtgcacgagaccagaaagagcagaagcagcaccggcagcatgaacgtgaccctgttccacaaggccagccaccccgactgcgtgctggcccacctgaacaccctgagaaagcactgcatgttcaccgacgtgaccctgtgggccggcgacagagccttcccctgccacagagccgtgctggccgccagcagcagatacttcgaggccatgttcagccacggcctgagagagagcagagacgacaccgtgaacttccaggacaacctgcaccccgaggtgctggagctgctgctggacttcgcctacagcagcagaatcgccatcaacgaggagaacgccgagagcctgctggaggccggcgacatgctgcagttccacgacgtgagagacgccgccgccgagttcctggagaagaacctgttccccagcaactgcctgggcatgatgctgctgagcgacgcccaccagtgcagaagactgtacgagttcagctggagaatgtgcctggtgcacttcgagaccgtgagacagagcgaggacttcaacagcctgagcaaggacaccctgctggacctgatcagcagcgacgagctggagaccgaggacgagagagtggtgttcgaggccatcctgcagtgggtgaagcacgacctggagcccagaaaggtgcacctgcccgagctgctgagaagcgtgagactggccctgctgcccagcgactgcctgcaggaggccgtgagcagcgaggccctgctgatggccgacgagagaaccaagctgatcatggacgaggccctgagatgcaagaccagaatcctgcagaacgacggcgtggtgaccagcccctgcgccagacccagaaaggccggccacaccctgctgatcctgggcggccagaccttcatgtgcgacaagatctaccaggtggaccacaaggccaaggagatcatccccaaggccgacctgcccagccccagaaaggagttcagcgccagcgccatcggctgcaaggtgtacgtgaccggcggcagaggcagcgagaacggcgtgagcaaggacgtgtgggtgtacgacaccgtgcacgaggagtggagcaaggccgcccccatgctgatcgccagattcggccacggcagcgccgagctggagaactgcctgtacgtggtgggcggccacaccagcctggccggcgtgttccccgccagccccagcgtgagcctgaagcaggtggagaagtacgaccccggcgccaacaagtggatgatggtggcccccctgagagacggcgtgagcaacgccgccgtggtgagcgccaagctgaagctgttcgtgttcggcggcaccagcatccacagagacatggtgagcaaggtgcagtgctacgaccccagcgagaacagatggaccatcaaggccgagtgcccccagccctggagatacaccgccgccgccgtgctgggcagccagatcttcatcatgggcggcgacaccgagttcaccgccgccagcgcctacagattcgactgcgagaccaaccagtggaccagaatcggcgacatgaccgccaagagaatgagctgccacgccctggccagcggcaacaagctgtacgtggtgggcggctacttcggcacccagagatgcaagaccctggactgctacgaccccaccagcgacacctggaactgcatcaccaccgtgccctacagcctgatccccaccgccttcgtgagcacctggaagcacctgcccgcctag

SEQ ID NO: 212346 - DNA, 3758 bp, Artificial Sequence
  derived and/or modified sequence
cttttctgcggctgcactgaagggttcggctgcccatccgtcacagaggcgatgcctctgattggctgctgctcttcgggccgggaggcggggcgggaaggccggagaaactagtttgttggcggcgcctaggctgtatcgcagcgagagcgtttttgcctgtggagagccggccgacgggagccgcggcggagcctgttgagctcgcgcgggctgccgggagtggtctctgaggcggcggcggcggcggggatcgtctccggcactgacgcaccatgtcggtcagtgtccatgagacccgcaagtcgcggagcagcacggggtccatgaacgtcaccctcttccacaaggcctcccacccggactgtgtgctggcccacctcaacacgcttcgcaagcactgcatgttcaccgacgtcacactctgggcgggcgaccgtgccttcccctgtcaccgtgccgtgctggccgcctctagccgctattttgaggccatgttcagccatggccttcgggagagccgggatgacactgtcaacttccaggacaacctgcacccggaggtgctggagctgctgctggactttgcctactcctcacgcatcgccatcaacgaggagaacgctgagtcactgctggaggcaggcgacatgctgcagttccacgatgtgcgggatgctgccgccgagttcctggagaagaaccttttcccctccaactgcctgggcatgatgctgctctcggacgcccaccagtgccgccggctgtatgagttctcctggcgcatgtgcctggtgcactttgagacggtgaggcagagcgaggacttcaacagcctgtccaaggacacactgctggacctcatctcgagtgatgagctggagaccgaggacgagcgggtggtcttcgaggccatcctccagtgggtgaagcacgacctggagccacggaaggtccacttgcccgagctcctccgcagcgtgcgtctggccttgctgccgtccgactgcctgcaggaggccgtctccagcgaggccctcctcatggcagacgagcgcaccaagcttatcatggatgaggccctgcgctgcaagaccaggatcctgcagaatgatggcgtggtcaccagcccctgtgcccggccacgcaaggcgggccacacgctactcatcctggggggccagaccttcatgtgtgacaagatctaccaggtggaccacaaggccaaggagatcatccccaaggccgacctgcccagcccccggaaggagttcagcgcctcagcgatcggctgcaaggtctatgtgacggggggcaggggctccgagaacggggtctccaaggatgtctgggtgtacgacaccgtacatgaggaatggtccaaggcggcgcccatgctgattgcccgctttggccatggctcagctgagctggagaactgcctctatgtggtggggggacacacatccctggcaggggtcttcccggcctcgccttctgtctccctgaaacaagtggagaaatacgaccctggggccaacaagtggatgatggtggcccccttgcgggatggcgtcagcaatgccgcagtggtgagtgccaagctgaagctctttgttttcggaggaaccagcatccaccgggacatggtgtccaaggtccagtgctatgacccctcggagaacaggtggacgatcaaggccgagtgcccccagccttggcggtacacagccgctgccgtcctgggcagccagatcttcatcatgggaggtgacacggaattcacagccgcctcggcctaccgctttgactgtgagaccaaccagtggacgcggattggggacatgactgccaagcgcatgtcctgccatgccctggcttccggcaacaagctctatgtggtcgggggctactttgggacccagaggtgtaagactctggactgctatgaccccacttcagatacatggaactgcatcaccacagtgccctactcacttatccccacggcctttgtcagcacctggaagcacctgcccgcgtgaggagcacctgctgagcccagccagaccgcggccttcagtgtcacagcgtggccttgcttgtctgccacagcgggagctaagccggccctgggccagcactccgagaggtggaaggggccctgccagctctggggagcagcagccttgggctgttctgagctttaggcaagagaagagaagcatctcttgcatccgtgcccctgggggcctcttcagctttgcagtggtttgtgggaagacatacctcccagaggggcatggactgccaccaggactgaccctggcgtcggggagaaggacacttgcagagccttgagatcacctgtttggcaggtcctggactggggccgggcaggcaggggcagggaggcgccccgggtgggctttggggctgcggcactgccacacatcctttccctcctggcctgccctgctggggctctactgccatctatagatggtgtcctgggcctgggaaactaggttcccaggggttgagaccagaaaggtgaccaagacagattttttaaggtgcagaaactgcaggggggcctcagtgacatccatgaggccttattagcaaaggacacccagacctccaaggtttgtgggccccttccacaaagctgtaagtcccagcccacctactcagggccttgctcagtgctgtggcccggtggggacacagttgctcgtggccactcagtggagctgggcctgcagcagactcaaggctccgagtgccctgggggtcacccctcccctcccctcctcagagcccaccctgagaggcagcagtgacccccatggcacacacctgccaacagcactgggggcttctccccaggagaccacgctgccctccaagaccaggagcagctgtgagctggagacagcagagggaccccagggtgtcccctgcagatcccaccagggccgcatccatctcagtgtggaggacagtgacgggaccctcaccatcctcttgcgttttggcccccatttgctccctgagctccaagataagaatggccccgagagaactgctgaacatttgttcattgctgtcacctcctgagtcactggggtccctcaccagcacctccctgacacctgggctatggagaggttggcgcctgtcagtgaccatcctaatgcctctcgctcactcccaagccaccatttgagagggaggggtgttggtgccctgacagggactgggcagggtgtccaaacttggggcttcccaggcacctgcagtgtgaacactgcttggctggctcaagattagggccgcggagggggctgtgcacataccagttacttaagcagccacgagtgtcccccatgccttggtgcgggtcctggaggcctcttgggggtgggacctttgggcagggtttgcccactgacacgcccgccatggggcactggctgcatggggctccttggaccctgtagacccagcagaccccgcctgtgtcaggccagctgcccgaaggcacttggctgtggtcccaggggacggctctgctggcacactcaggagcctggccgcggggactgcagggagggtgcctggacccgtggggttgcttcattgagataaagcacacttatcacatagcacaaaggacgtgccatggtgctttccccaaaagttgtgttgcttttatcagttttctaacttaataaaaagagttgagaaaattc

SEQ ID NO: 212347 - DNA, 1677 bp, Artificial Sequence
  derived and/or modified sequence
atgagcgtgagcgtgcacgagaccagaaagagcagaagcagcaccggcagcatgaacgtgaccctgttccacaaggccagccaccccgactgcgtgctggccgccagcagcagatacttcgaggccatgttcagccacggcctgagagagagcagagacgacaccgtgaacttccaggacaacctgcaccccgaggtgctggagctgctgctggacttcgcctacagcagcagaatcgccatcaacgaggagaacgccgagagcctgctggaggccggcgacatgctgcagttccacgacgtgagagacgccgccgccgagttcctggagaagaacctgttccccagcaactgcctgggcatgatgctgctgagcgacgcccaccagtgcagaagactgtacgagttcagctggagaatgtgcctggtgcacttcgagaccgtgagacagagcgaggacttcaacagcctgagcaaggacaccctgctggacctgatcagcagcgacgagctggagaccgaggacgagagagtggtgttcgaggccatcctgcagtgggtgaagcacgacctggagcccagaaaggtgcacctgcccgagctgctgagaagcgtgagactggccctgctgcccagcgactgcctgcaggaggccgtgagcagcgaggccctgctgatggccgacgagagaaccaagctgatcatggacgaggccctgagatgcaagaccagaatcctgcagaacgacggcgtggtgaccagcccctgcgccagacccagaaaggccggccacaccctgctgatcctgggcggccagaccttcatgtgcgacaagatctaccaggtggaccacaaggccaaggagatcatccccaaggccgacctgcccagccccagaaaggagttcagcgccagcgccatcggctgcaaggtgtacgtgaccggcggcagaggcagcgagaacggcgtgagcaaggacgtgtgggtgtacgacaccgtgcacgaggagtggagcaaggccgcccccatgctgatcgccagattcggccacggcagcgccgagctggagaactgcctgtacgtggtgggcggccacaccagcctggccggcgtgttccccgccagccccagcgtgagcctgaagcaggtggagaagtacgaccccggcgccaacaagtggatgatggtggcccccctgagagacggcgtgagcaacgccgccgtggtgagcgccaagctgaagctgttcgtgttcggcggcaccagcatccacagagacatggtgagcaaggtgcagtgctacgaccccagcgagaacagatggaccatcaaggccgagtgcccccagccctggagatacaccgccgccgccgtgctgggcagccagatcttcatcatgggcggcgacaccgagttcaccgccgccagcgcctacagattcgactgcgagaccaaccagtggaccagaatcggcgacatgaccgccaagagaatgagctgccacgccctggccagcggcaacaagctgtacgtggtgggcggctacttcggcacccagagatgcaagaccctggactgctacgaccccaccagcgacacctggaactgcatcaccaccgtgccctacagcctgatccccaccgccttcgtgagcacctggaagcacctgcccgcctag

SEQ ID NO: 212348 - DNA, 1770 bp, Artificial Sequence
  derived and/or modified sequence
atgtcagtgtctgttcatgaaaccagaaagtcaaggtcgtctacaggctcaatgaatgttaccttgtttcataaggcttcccaccccgactgcgtgctcgcccatctgaatacactgaggaaacactgcatgtttactgatgtgaccctttgggcaggcgaccgggctttcccctgccacagggctgtgctggcagcttcctcccggtactttgaggccatgtttagccacggactgagggagtccagagatgacacggtgaactttcaggacaacctgcaccccgaggttctggagctcttgctggacttcgcatacagctccaggatcgccatcaatgaggagaacgccgagtccctgctggaagcaggggatatgctgcagttccacgacgtgcgtgacgccgctgctgaattcctagagaaaaacctcttcccctccaactgtctgggtatgatgctcttgtctgacgcccatcagtgccgcagactctatgagttctcctggcgaatgtgtctggttcacttcgagaccgttcgacagtccgaggattttaactccctcagtaaagacactcttctcgatctcatctcaagtgacgagttagagactgaagatgagcgtgttgttttcgaagccatcttacagtgggtcaagcacgacctcgagccgagaaaggtgcatcttcccgagctgctcaggtccgtgaggttagccctgctgccttccgactgcttacaagaagcggtgtcatctgaggcactcctaatggctgacgagagaacaaagttgatcatggacgaggccctgcgatgtaaaacaaggatcctgcagaatgacggagtggttacctccccttgcgcccggcctcgcaaggctggacatacactcctgattttgggcggacagacttttatgtgtgacaagatttatcaggtcgaccataaagctaaggagattattcctaaggccgatctgccctccccccgaaaggaattctccgcaagcgctattggatgtaaagtgtacgttacaggtggacgcggatccgaaaatggggtgagcaaggatgtttgggtctacgataccgttcatgaggaatggtccaaagctgcacctatgctcattgccagatttgggcatggatctgctgaacttgagaactgcctgtacgtggttggcggacatacatctctggctggtgtgtttcctgcatccccctccgtgtctctcaagcaggtggaaaagtacgatcccggagctaataagtggatgatggttgccccgctgcgcgacggggtgtcaaatgccgcagtggtgtcagctaagctgaagttgttcgtatttggggggacaagcatacacagagatatggtgagcaaagtgcagtgctatgatccttctgagaatcgctggactatcaaggcggaatgcccacaaccctggagatatacagccgccgctgttctgggatctcaaatcttcattatggggggtgatacggaattcaccgctgcgtcggcatacaggtttgattgtgaaaccaatcagtggactcgcataggcgatatgaccgctaagcgcatgagttgtcatgccctggcgtcagggaataagttgtatgtggttggaggatactttggcacacagcgctgtaaaacacttgattgttatgaccctacatcagacacatggaattgtattactactgtgccctattctctcatccccacggctttcgtgtccacttggaaacatctgcctgcttag

SEQ ID NO: 212349 - DNA, 1770 bp, Artificial Sequence
  derived and/or modified sequence
atgagcgtgtccgttcatgagacccgcaagtcaagaagtagcacgggatcaatgaatgtgacactattccacaaagcctcgcaccctgattgcgtgctggcccacctgaatacattgcgaaaacattgcatgtttaccgacgtgaccctgtgggctggggatcgagctttcccctgccatcgggcagtacttgcagctagtagcaggtacttcgaagcgatgttctcccatggcttgcgggagagccgcgacgatactgtgaacttccaggacaacctgcaccccgaagttctggaactcttactcgatttcgcttactcgtctcgaatcgcaataaatgaggagaatgccgaatcccttctggaggcaggggacatgctccaatttcacgacgtgcgcgatgctgcagccgagtttctggagaagaacctattcccttcaaactgcctggggatgatgcttctctccgatgcccatcagtgccggcgactttacgagttttcctggagaatgtgtttggtgcatttcgagacagtccgacagtccgaggactttaatagtctctccaaggacaccctcttggacctgatatcatcagatgagttggagacagaggacgaacgcgtggttttcgaggcaattttacaatgggttaagcatgacttggagccccgcaaggtacacctgccggaactcctgcggagcgtgcggctggccctcttgccctctgactgcttacaggaagccgtgtcttctgaagcccttctgatggccgacgagcgtaccaaactgataatggacgaagccttacgatgcaagacccggatccttcaaaatgacggcgtcgtaacctcaccttgtgcccgcccgaggaaagccggtcacaccctgctcatcctcgggggtcagaccttcatgtgtgacaagatatatcaggtcgaccacaaggccaaagagatcattcccaaagctgacctcccaagcccgagaaaggagttctccgcatcagctataggatgcaaagtttatgtaaccggaggacgggggtccgagaatggcgtctcaaaagacgtgtgggtatacgataccgtgcatgaagagtggtccaaagctgctcctatgttaattgcccggtttggtcatggcagcgcggaactcgagaattgcctttatgtggtgggagggcacacttctctggctggggtgtttcctgctagcccatcagtgagccttaaacaagtggagaaatacgacccgggcgcaaataagtggatgatggtagccccactccgcgacggagtatccaatgctgctgtggtctcagccaagctgaagctgttcgtgttcggagggacatccatacatcgggatatggttagtaaagttcagtgctatgatccctctgagaaccgatggactataaaagcagagtgtccgcaaccctggagatacacagccgcggcggtcctgggaagccagatctttatcatgggcggcgatacggagtttacagcagccagcgcctaccgatttgattgcgaaacgaaccaatggacaagaatcggtgatatgactgccaagcggatgtcatgccacgcactggcatccgggaacaagctgtacgtggtcggtggctattttggaacccagcgctgcaaaactttggactgttacgatccaactagcgacacctggaattgtattacaacagtaccatacagcctaatacccactgctttcgtgtctacatggaagcacttgcctgcctag

SEQ ID NO: 212350 - DNA, 1677 bp, Artificial Sequence
  derived and/or modified sequence
atgagtgtatctgttcacgagacacggaaaagccgctcctcaaccggaagtatgaatgtgacgctttttcataaagcctcccacccagactgcgtgctcgccgctagcagtcggtactttgaagcgatgttctcccacggactgagagagtcgcgggacgatacagtgaatttccaggataacttacacccagaagtcctggagctgttgctggacttcgcatactcgtccaggattgccattaacgaggagaatgcagaatcgctgctggaggctggagacatgctgcaatttcacgacgtgcgcgatgccgcagccgagttcctggaaaaaaacctctttccttcaaattgtcttgggatgatgctgctgagcgacgcccatcagtgcaggcgtttgtacgaattttcctggagaatgtgcttggtccacttcgagaccgtgcgccagtctgaggactttaactcattgtccaaagacactctgctcgatcttatctcgtccgatgagttagagacagaagacgaacgggtggttttcgaggcgatactgcagtgggtaaagcacgatttggagcccaggaaggtgcatctcccagagctactgcgcagcgttcgactcgccctcctccctagtgactgcttacaggaagctgtctcaagtgaagcgctgctcatggctgacgaacgaactaaactgatcatggatgaggctttgcgatgtaagaccaggatcctgcagaacgacggggtggtaacaagcccctgcgctcggcctaggaaggctgggcatactctcctgattcttggggggcaaacatttatgtgcgataagatttaccaggtagatcacaaggccaaagagataattccgaaggcggatctgccctcacctcgaaaagagttctcagcctccgcgatcggatgtaaggtgtacgttaccggcggaaggggctctgaaaatggtgtcagcaaggacgtgtgggtgtacgacactgtacatgaggagtggtccaaagcagctcctatgctgattgcacgattcgggcatggctccgcggagttagagaactgcctttacgtcgtgggcggacacacctccctggcgggtgtgttcccggcctcccccagcgtatctctcaaacaggtggagaagtatgatcccggggccaacaagtggatgatggtggccccgttaagggacggagtctctaatgccgccgtcgtgagtgcaaaactgaaactcttcgtattcggcggtacttccatccacagagatatggttagcaaggtccaatgttatgatccttcagaaaacaggtggactatcaaagcggaatgtccacagccctggcggtataccgccgccgccgtgctaggctcacagatcttcattatgggaggcgatacagagttcaccgctgcgtccgcttaccggttcgattgtgagacaaatcagtggactcgtatcggagatatgaccgctaaacggatgagttgtcacgccttggcatcaggaaataagctttacgtcgtcggaggttacttcgggacccagcggtgcaagacgttggactgctacgatccaacgtccgacacctggaattgtattactacagtaccctatagcttgattcctaccgccttcgttagcacttggaagcacttgcccgcttag

SEQ ID NO: 212351 - DNA, 1770 bp, Artificial Sequence
  derived and/or modified sequence
atgtctgtgtctgtgcatgagaccaggaagagccgcagcagcacaggctccatgaatgtgaccctcttccacaaggccagccacccagactgtgtgctggcccacctgaacaccctgaggaagcactgcatgttcacagatgtgaccctgtgggccggggaccgggccttcccctgccacagagctgtgctggccgccagcagccgctactttgaggccatgttcagccacggcctgcgggagagcagagatgacacagtgaacttccaggacaacctgcaccctgaggtgctggagctgctgctggactttgcctacagcagccgcatcgccatcaatgaagaaaatgctgagagcctgctggaggccggggacatgctgcagttccatgatgtgagagatgctgctgctgagttcctggagaagaacctcttccccagcaactgcctgggcatgatgctgctgagtgatgcccaccagtgccggcggctgtatgagttctcctggaggatgtgcctggtgcactttgagaccgtgcggcagagcgaggacttcaacagcctgagcaaggacaccctgctggacctgatcagcagtgatgagctggagacagaagatgagcgggtggtgtttgaggccatcctgcagtgggtgaagcatgacctggagcccaggaaggtgcacctgcctgagctgctgcggtctgtgcggctggccctgctgcccagcgactgcctgcaggaggccgtgagcagcgaggccctgctgatggctgatgagaggaccaagctgatcatggatgaggccctgcgctgcaagacccgcatcctgcagaatgatggagtggtgaccagcccctgtgcccggcccaggaaggccggccacaccctgctgatcctgggcggccagaccttcatgtgtgacaagatctaccaggtggaccacaaggccaaggagatcatccccaaggctgacctgcccagccccaggaaggagttcagcgccagcgccatcggctgcaaggtgtatgtgactggaggccggggctctgaaaatggagtgtccaaggatgtgtgggtgtatgacacagtgcatgaggagtggagcaaggccgcccccatgctgattgccaggtttggacatggcagcgctgagctggagaactgcctgtatgtggtgggcggccacaccagcctggccggggtcttccctgccagccccagcgtgtccctgaagcaggtggagaagtatgaccccggggccaacaagtggatgatggtggcccccctgagagatggagtgtccaatgctgctgtggtgtctgccaagctgaagctgtttgtgtttggaggcaccagcatccaccgggacatggtgtccaaggtgcagtgctatgaccccagtgaaaatcgctggaccatcaaggcagaatgtccccagccctggagatacacagctgctgctgtgctgggcagccagatcttcatcatgggcggggacacagagttcaccgctgccagcgcctacagatttgactgtgagaccaaccagtggaccagaattggagacatgacagccaagaggatgagctgccacgccctggccagcggcaacaagctgtatgtggtgggcggctacttcggcacccagcgctgcaagaccctggactgctatgaccccaccagtgacacctggaactgcatcaccaccgtgccctacagcctcatccccacagcctttgtgtccacctggaagcacctgcctgcctag

SEQ ID NO: 212352 - DNA, 1677 bp, Artificial Sequence
  derived and/or modified sequence
atgtctgtgtctgtgcatgagaccaggaagagccgcagcagcacaggctccatgaatgtgaccctcttccacaaggccagccacccagactgtgtgctggccgccagcagccgctactttgaggccatgttcagccacggcctgcgggagagcagagatgacacagtgaacttccaggacaacctgcaccctgaggtgctggagctgctgctggactttgcctacagcagcagaattgccatcaatgaggagaatgctgagagcctgctggaggccggggacatgctgcagttccatgatgtgagagatgctgctgctgagttcctggagaagaacctcttccccagcaactgcctgggcatgatgctgctgagtgatgcccaccagtgccggcggctgtatgagttctcctggaggatgtgcctggtgcactttgaaacagtgcggcagagcgaggacttcaacagcctgagcaaggacaccctgctggacctgatcagcagtgatgagctggagacagaagatgagcgggtggtgtttgaggccatcctgcagtgggtgaagcatgacctggagcccaggaaggtgcacctgcctgagctgctgcggtctgtgcggctggccctgctgcccagcgactgcctgcaggaggccgtgtcctctgaggccctgctgatggctgatgagaggaccaagctgatcatggatgaggccctgcgctgcaagacccgcatcctgcagaatgatggagtggtgaccagcccctgtgcccggcccaggaaggccggccacaccctgctgatcctgggcggccagaccttcatgtgtgacaagatctaccaggtggaccacaaggccaaggagatcatccccaaggctgacctgcccagccccaggaaggagttcagcgccagcgccatcggctgcaaggtgtatgtgactggaggccggggctctgaaaatggagtgtccaaggatgtgtgggtgtatgacacagtgcatgaggagtggagcaaggccgcccccatgctgattgcccgcttcggccacggcagcgctgagctggagaactgcctgtatgtggtgggcggccacaccagcctggccggggtcttccctgccagccccagcgtgtccctgaagcaggtggagaagtatgaccccggggccaacaagtggatgatggtggcccccctgagagatggagtgtccaatgctgctgtggtgtctgccaagctgaagctgtttgtgtttggaggcaccagcatccaccgggacatggtgtccaaggtgcagtgctatgaccccagcgagaaccgctggaccatcaaggccgagtgcccccagccctggagatacacagctgctgctgtgctgggcagccagatcttcatcatgggcggggacacagagttcaccgctgccagcgcctacagatttgactgtgagaccaaccagtggacccgcatcggggacatgacagccaagaggatgagctgccacgccctggccagcggcaacaagctgtatgtggtgggcggctacttcggcacccagcgctgcaagaccctggactgctatgaccccaccagtgacacctggaactgcatcaccaccgtgccctacagcctcatccccacagcctttgtgtccacctggaagcacctgcctgcctag

SEQ ID NO: 212353 - DNA, 1770 bp, Artificial Sequence
  derived and/or modified sequence
atgagcgtgagcgtgcacgagacccggaagagccggagcagcaccggctccatgaatgtaacgttgtttcacaaggcctctcaccctgactgcgtgctagcccacttgaacactctgagaaaacactgtatgttcacagatgtgacactctgggctggcgaccgggcttttccttgccatcgcgcagtgctggcagcaagcagcagatattttgaggcgatgttttcgcacggcttacgtgagtcccgggacgataccgtgaactttcaagacaatttgcaccccgaagtattagagttactgctagactttgcctattcttcacgcatcgccatcaacgaggagaatgctgagagcctgttagaggctggcgacatgctacagttccatgatgttcgcgacgcggcagccgagttcttggagaagaatctgtttccttcaaactgtctgggaatgatgctcctcagtgacgcccaccaatgccggcggctgtacgaattttcatggaggatgtgccttgtgcactttgagaccgtgaggcaaagcgaagacttcaactctctttctaaggacactctcttggacttgataagcagtgatgagctggaaacagaagacgagagagtggtgttcgaggcaatcctccagtgggtcaaacatgacttagaacccagaaaggtgcatctgcctgaactgctgcgcagcgttcggctcgcactgctgccatcagactgcctgcaggaggccgtgtcctctgaagcattgttgatggccgacgaacggaccaagctgatcatggacgaagcactccgctgcaagactcgtatactacagaacgatggcgtcgttacaagtccttgtgcccgccccagaaaggcggggcacacactgctgatactgggaggacagaccttcatgtgcgataagatctaccaggtcgaccacaaagctaaggagatcataccaaaggccgaccttccatctccgcggaaggagttctcagcatccgctattggctgcaaggtgtatgtgaccggcggccgaggctcagagaatggcgtgtccaaggacgtgtgggtctatgacacggttcatgaggagtggagcaaagcagccccaatgctgattgcaaggtttggacacgggagcgcagaactggaaaattgcctgtacgtcgtaggaggccatacttccctcgcaggcgtgtttccagcaagccccagtgtatctttgaaacaggtagagaagtatgaccctggcgccaataaatggatgatggtggccccactgcgagatggagtgtccaatgcagccgtggtatctgcaaagctgaagctgtttgtattcggcggcacctcgatccatcgcgacatggtctccaaagtgcagtgttatgacccgagtgagaacagatggaccatcaaagccgaatgtcctcagccgtggcgctacaccgctgcagccgttctaggcagccaaattttcattatgggcggagataccgaattcacggccgcaagcgcgtatcgttttgattgcgagacgaatcagtggacaagaatcggagacatgaccgctaagaggatgtcctgtcacgctcttgcctctggaaacaaactttatgtggtaggggggtatttcggaacccaacgttgcaagacactggactgctacgacccaacttccgacacatggaattgcattaccaccgttccatattctctgatcccaactgctttcgtttctacttggaaacatttgccagcgtag

SEQ ID NO: 212354 - DNA, 1770 bp, Artificial Sequence
  derived and/or modified sequence
atgagcgtgagcgtgcacgagacccggaagagccggagcagcaccggttcaatgaatgtcactctgtttcacaaggcctcccacccagattgcgtcctggctcacttaaatacactacgcaaacactgcatgttcactgatgtgacactttgggcgggcgatagagcttttccatgtcacagggcagtgctcgccgcttcctctagatattttgaagccatgttctcccacggtttgcgcgaaagcagagatgacacggtgaacttccaggacaacctgcatcctgaggtattagaactgctgctcgattttgcctacagctcccgcatcgctattaatgaggaaaatgcagagtcactgttggaggcaggtgatatgctccagttccacgacgtgcgggacgctgctgctgagtttctagagaaaaacctctttccgtctaattgccttgggatgatgcttttatctgacgcgcaccaatgtcggagactgtacgaattcagctggaggatgtgtcttgtccactttgagacagtccgtcagagcgaggactttaacagcctatctaaggatactctgcttgatctcattagtagcgacgagctagaaactgaagatgaaagggtggtttttgaggcaattcttcagtgggttaagcatgatctggagccccgaaaagtccacctgcccgaacttctccggagcgtgcgtcttgctctgcttccctccgattgtcttcaggaggctgtaagctcagaggccctgcttatggccgacgagcgcaccaagctgatcatggatgaagctctgaggtgcaaaacccgcatcttacagaacgacggcgtggtcaccagcccatgcgctcgcccccgtaaagccggccacactctcctaattttaggaggccagaccttcatgtgtgataagatttatcaagttgatcacaaggccaaagagatcatcccgaaggcggacctccctagtccaagaaaggagtttagcgcatccgctattgggtgtaaagtatacgtcaccggcgggagaggaagtgaaaatggggttagcaaggatgtatgggtgtatgacacagttcatgaggagtggtccaaggcggcacccatgctgatcgccaggtttgggcatggctccgcagagctagagaattgcctctatgttgttggagggcacacttcactggccggtgtgttccccgccagcccaagtgtgtcattgaaacaagtcgaaaaatacgacccgggggcaaacaaatggatgatggtggcgcccctcagggacggagtgagtaatgccgctgtggtatccgccaaactcaagctgtttgttttcggcggcacatctattcatagggatatggtctccaaagttcagtgttatgacccaagcgagaaccgttggaccattaaagccgagtgcccacagccctggcggtacacagcagccgccgttttggggtctcagattttcattatggggggcgatactgaatttacggccgcctcagcttatagattcgactgcgagaccaaccaatggacccggatcggagacatgactgcgaaaagaatgtcctgtcatgccctggcttcggggaacaaactgtacgtggtcggcggatactttggtactcaaaggtgtaaaactttggattgctatgatccaactagtgatacttggaattgcatcactacggtcccctactctctgataccaactgcatttgttagcacttggaagcacctgccagcatag

SEQ ID NO: 212355 - DNA, 1677 bp, Artificial Sequence
  derived and/or modified sequence
atgagcgtgagcgtgcacgagacccggaagagccggagcagcaccggatctatgaatgttaccttgtttcacaaggcctcgcatcccgactgcgtgctggcggctagcagcagatacttcgaagcaatgttctcacacggactgagggagagccgcgacgatactgtgaattttcaggacaatctccaccctgaggtcctcgaattgctgttggattttgcctattcttctaggattgccatcaacgaggaaaacgctgagtccctcctggaggccggcgacatgctgcagtttcatgacgtccgtgacgccgccgctgagttcctcgaaaaaaacctgtttccctcaaattgtctggggatgatgctattaagtgacgcgcaccagtgtagacggctctatgagttctcctggaggatgtgtctggttcactttgagacagtgcggcagtccgaagattttaacagcttgtccaaagatacacttctggacttaatcagtagtgacgaactcgagaccgaggatgagagagtcgtgtttgaagcaatcctccaatgggtgaaacatgacctggaaccccggaaggtccaccttccagaactgctacgatctgtgcgcctcgcattgcttccttctgactgcctccaggaggccgtgtcttccgaggcgctgttaatggctgacgagaggacaaaactgattatggatgaggcactgcggtgtaagacacgcatcttgcagaatgacggagtggtaacctcgccgtgcgctcggccacgtaaagccgggcatacactacttattcttggaggtcagacatttatgtgtgacaagatttaccaagtcgaccataaagcaaaggaaattatcccgaaagccgaccttccatctccaaggaaagagttctcagcgagcgccatcggctgtaaagtatatgtgaccggggggcggggttccgagaacggcgtgtccaaggacgtgtgggtctatgatactgtccatgaagagtggtcaaaggctgctccgatgttgatcgcgcgtttcgggcacggctcagctgagttggagaattgtctgtatgttgtaggcgggcacactagcctggccggggtattcccggctagcccctcggtgagtttaaagcaggtggaaaaatacgaccccggagctaataaatggatgatggtggcccccctccgcgacggtgtaagcaacgcagccgtggtgtctgctaagcttaagctgttcgtattcggcggcacaagtattcatcgggacatggtctccaaagttcagtgttacgatccatcagagaatagatggactattaaagctgaatgcccacagccttggaggtatacagccgccgctgtcctgggctcacagatttttattatgggaggtgacaccgaatttaccgcggccagcgcttatcgattcgactgtgagaccaaccagtggacacgcatcggtgacatgaccgccaaaaggatgtcatgccatgcactcgcatccgggaataagctgtacgtcgtcggaggctacttcgggactcagaggtgcaagaccctggactgctatgacccaaccagtgacacttggaactgtattacaacagtgccctattcacttatccctacagccttcgtttccacgtggaagcatctgcccgcatag

SEQ ID NO: 212356 - DNA, 1770 bp, Artificial Sequence
  derived and/or modified sequence
atgagtgtttctgtccatgaaaccaggaaaagccggtctagcactggctccatgaatgtcacactcttccacaaggcctctcaccccgattgtgtattagcgcacctcaacacactcagaaagcactgcatgtttactgacgttactctttgggccggtgaccgggcttttccatgccatagagctgtactggcggcatcgtctaggtatttcgaggccatgttcagccacggtcttagggagtccagagatgacaccgtgaactttcaggacaacctgcatccagaagtgcttgaactcctgttggatttcgcctatagcagccgcatagcaatcaatgaggagaacgccgagagtctgctagaagccggtgacatgctccagttccacgacgtgcgtgatgccgcagccgaatttctggagaagaacctttttccatccaactgcttgggaatgatgttactgagcgacgctcaccaatgtaggaggttgtatgagttcagttggagaatgtgcctggtacatttcgagacagtgcggcagagtgaggattttaactcgctgtctaaggacaccctgttggacttgatctcctccgatgaactcgagacggaggatgagcgggtggtgtttgaggcgattctgcagtgggtcaaacacgatcttgaaccacgtaaagttcacctgcccgagcttctgcgctccgtgaggctggcgctcctgccttctgactgtctacaggaagcggttagttccgaggctctattgatggccgacgagcggaccaagctcattatggatgaggcactgagatgtaaaacccggatcctgcagaatgacggcgtggttaccagtccctgcgctcgccctcgaaaggccggtcacacactccttatcttgggagggcagacattcatgtgtgataagatctaccaggtggaccataaggcaaaagaaattatccctaaagctgatctgccgtcaccccgtaaagagttttccgcttcagctatcgggtgcaaggtgtacgtgacgggaggccgtggatctgagaacggggtgtccaaagacgtgtgggtatatgataccgtgcacgaggagtggtctaaagccgctccaatgcttattgcaagattcggccatgggtccgcagaactcgaaaactgcctgtacgtcgtgggaggccacacttctctggcaggagtgttccccgcatctccttccgtgtccctgaagcaagtcgaaaagtacgatcccggtgctaataaatggatgatggtcgcaccactcagagatggcgtctcgaacgcagcagttgtcagcgcaaaattgaaacttttcgtctttgggggaacatcgatccatcgggatatggtatcaaaagtccagtgctacgatccctcggagaacagatggacaataaaggccgagtgccctcagccctggcgctataccgcggcagccgttctgggcagccagatattcattatgggtggcgacactgagttcacagccgctagtgcttatcgttttgactgtgaaaccaatcagtggactcgaattggcgacatgaccgccaagcggatgagctgtcacgcactagcatcaggtaacaaactatatgtggtcggtggctatttcggaactcaacggtgcaaaaccttggactgttacgatccgacttcagacacatggaattgcatcaccaccgtgccctattctcttattcccaccgcatttgtgtcaacctggaaacacctccctgcttag

SEQ ID NO: 212357 - DNA, 1770 bp, Artificial Sequence
  derived and/or modified sequence
atgtccgtttccgtgcatgaaactcggaagtcaagaagctcaactggatcgatgaatgttacactgttccacaaagcttcccatcccgactgcgtcctggcccacctaaatacgctgcgcaagcattgtatgttcaccgacgtgaccttgtgggccggtgatcgggcattcccatgccatagggccgtgctggcggcttcttctcggtacttcgaggccatgttcagtcacggactgagggagtctagggacgacactgtgaattttcaagacaacctacaccccgaagtgctcgaactcctgcttgattttgcctactcttcacgcatcgccattaacgaagagaatgccgaaagcttgttggaggctggagatatgctgcagtttcatgacgtgcgagatgccgcagccgagttccttgaaaagaacctctttcccagcaattgtctcgggatgatgcttctgtcagacgctcaccagtgtaggaggttatatgaattctcctggagaatgtgtttagtacatttcgagacggtgaggcagtcagaggactttaacagcctgagtaaagatacactgctggatctcatctcttccgatgagttggagacggaggatgaaagagttgtctttgaagccatcctgcaatgggtgaaacatgatctggagcctagaaaggtccacctcccagagctgctgaggagcgtgcgactcgctctactgccctctgattgtctccaagaggctgtgagctccgaggctctacttatggcggatgaacgaaccaaattgatcatggatgaggcccttcgttgtaaaacgcgcatcctgcagaacgatggagttgttacatccccgtgcgccagacctaggaaggctgggcatacccttctcatcctgggagggcagactttcatgtgtgataaaatataccaggttgaccataaagccaaagagattattccaaaggcagatctacccagcccaaggaaggaattctcggcaagtgccatcggttgtaaagtgtacgtgacgggcggacgaggatcagagaatggagtctcgaaggatgtgtgggtgtacgatactgtccacgaggaatggtcaaaggccgcaccaatgctgattgccaggttcggtcatggcagtgctgagcttgagaactgcttatacgtggtcggcggacataccagcctggctggcgtctttcccgcaagcccttccgttagccttaagcaggtagagaagtacgaccccggagctaataagtggatgatggtagctccactgagggacggggtgtctaatgccgcagttgtcagtgcgaaactcaaactgtttgtgttcggcggaacttcaatccaccgagatatggtctcaaaagtgcaatgctatgacccatctgagaatcggtggactatcaaagcagaatgtccccaaccctggaggtatactgccgcagccgtgctgggttcccagatattcattatgggtggtgacaccgagtttacagccgcatctgcctatagatttgattgtgaaacaaaccaatggactcgcatcggagacatgactgcgaaacggatgagttgtcatgctttggctagtggtaataaactgtacgtcgtgggtggatattttggaacccaacgctgcaagactctggattgttatgacccaactagcgatacgtggaactgtatcaccactgtgccatattcactcattcctactgcttttgtcagcacatggaaacacctcccagcctag

SEQ ID NO: 212358 - DNA, 1677 bp, Artificial Sequence
  derived and/or modified sequence
atgtccgtcagtgtccacgaaaccaggaagagccgatcttccactggctccatgaatgtgacattgttccacaaggccagccaccccgattgcgtgctcgcagcgtctagtcgctatttcgaggccatgtttagtcacggcctgagagagtcgcgggatgacacggttaatttccaggacaatctgcatcctgaggtccttgagttactgctggattttgcatactcaagccggatagcaatcaatgaggaaaacgctgagagcctgctggaggcaggagatatgttgcaatttcacgatgtccgggatgccgctgctgagttcctcgagaagaatctgttccccagtaactgtctgggtatgatgcttctcagtgacgctcaccaatgccggaggctgtacgagtttagctggcggatgtgcttggtccatttcgagacagtgcgccagtcagaggacttcaactccctctccaaagatactcttctcgatctaatatcaagtgacgagctggagaccgaggacgaacgtgtagtcttcgaagcaatcctgcagtgggtaaaacatgacttggagccccgtaaagtccaccttcctgagctgctgaggagtgttcgcttggcactgctcccatcggattgtctgcaggaggctgtgtcttctgaggctctgcttatggccgacgaacgcacaaagttgatcatggacgaggccttgaggtgcaagaccaggattctgcagaatgacggtgttgttacctccccgtgtgcaaggccaaggaaggctggacacaccctgttgatactggggggtcagacatttatgtgtgataagatatatcaggttgatcataaggcaaaagaaattatccccaaggctgatctgccttctcctcgcaaggagttctccgcttctgctatcggttgcaaagtttacgtgaccggcggtcggggtagtgagaacggggtgtccaaggacgtctgggtctatgatactgtgcacgaagaatggtcaaaggctgccccaatgctgattgcacggttcggacatggatctgctgaactggagaattgcctttatgtagttggtggccacacatcgctggccggtgtgttccctgcttccccctctgtgagtctcaaacaggtcgagaaatacgatccgggtgcaaacaaatggatgatggtggcaccgctgcgcgacggggtgtctaacgccgcagtagtgagcgcaaagcttaagctgttcgtgtttggcggtactagtattcacagagatatggtaagcaaggtacagtgctatgacccctctgagaaccgctggaccattaaggcagagtgtccccagccttggcgctacacagccgctgctgtcctcggtagccaaatctttatcatgggcggtgacaccgagtttacagctgcgtcagcctatcggtttgattgcgagactaaccaatggacccggattggagacatgaccgcaaaaagaatgagttgtcatgcactcgcatcgggaaataagttgtacgtggtaggcggttattttgggacgcagagatgtaagactttggattgctatgatcccacatctgatacttggaattgtattaccacagttccatacagcctcattccaactgcatttgtgtccacatggaaacatctgcctgcatag

SEQ ID NO: 212359 - DNA, 3498 bp, Artificial Sequence
  derived and/or modified sequence
gtggagagccggccgacgggagccgcggcggagcctgttgagctcgcgcgggctgccgggagtggtctctgaggcggcggcggcggcggggatcgtctccggcactgacgcaccatgtcggtcagtgtccatgagacccgcaagtcgcggagcagcacggggtccatgaacgtcaccctcttccacaaggcctcccacccggactgtgtgctggcccacctcaacacgcttcgcaagcactgcatgttcaccgacgtcacactctgggcgggcgaccgtgccttcccctgtcaccgtgccgtgctggccgcctctagccgctattttgaggccatgttcagccatggccttcgggagagccgggatgacactgtcaacttccaggacaacctgcacccggaggtgctggagctgctgctggactttgcctactcctcacgcatcgccatcaacgaggagaacgctgagtcactgctggaggcaggcgacatgctgcagttccacgatgtgcgggatgctgccgccgagttcctggagaagaaccttttcccctccaactgcctgggcatgatgctgctctcggacgcccaccagtgccgccggctgtatgagttctcctggcgcatgtgcctggtgcactttgagacggtgaggcagagcgaggacttcaacagcctgtccaaggacacactgctggacctcatctcgagtgatgagctggagaccgaggacgagcgggtggtcttcgaggccatcctccagtgggtgaagcacgacctggagccacggaaggtccacttgcccgagctcctccgcagcgtgcgtctggccttgctgccgtccgactgcctgcaggaggccgtctccagcgaggccctcctcatggcagacgagcgcaccaagcttatcatggatgaggccctgcgctgcaagaccaggatcctgcagaatgatggcgtggtcaccagcccctgtgcccggccacgcaaggcgggccacacgctactcatcctggggggccagaccttcatgtgtgacaagatctaccaggtggaccacaaggccaaggagatcatccccaaggccgacctgcccagcccccggaaggagttcagcgcctcagcgatcggctgcaaggtctatgtgacggggggcaggggctccgagaacggggtctccaaggatgtctgggtgtacgacaccgtacatgaggaatggtccaaggcggcgcccatgctgattgcccgctttggccatggctcagctgagctggagaactgcctctatgtggtggggggacacacatccctggcaggggtcttcccggcctcgccttctgtctccctgaaacaagtggagaaatacgaccctggggccaacaagtggatgatggtggcccccttgcgggatggcgtcagcaatgccgcagtggtgagtgccaagctgaagctctttgttttcggaggaaccagcatccaccgggacatggtgtccaaggtccagtgctatgacccctcggagaacaggtggacgatcaaggccgagtgcccccagccttggcggtacacagccgctgccgtcctgggcagccagatcttcatcatgggaggtgacacggaattcacagccgcctcggcctaccgctttgactgtgagaccaaccagtggacgcggattggggacatgactgccaagcgcatgtcctgccatgccctggcttccggcaacaagctctatgtggtcgggggctactttgggacccagaggtgtaagactctggactgctatgaccccacttcagatacatggaactgcatcaccacagtgccctactcacttatccccacggcctttgtcagcacctggaagcacctgcccgcgtgaggagcacctgctgagcccagccagaccgcggccttcagtgtcacagcgtggccttgcttgtctgccacagcgggagctaagccggccctgggccagcactccgagaggtggaaggggccctgccagctctggggagcagcagccttgggctgttctgagctttaggcaagagaagagaagcatctcttgcatccgtgcccctgggggcctcttcagctttgcagtggtttgtgggaagacatacctcccagaggggcatggactgccaccaggactgaccctggcgtcggggagaaggacacttgcagagccttgagatcacctgtttggcaggtcctggactggggccgggcaggcaggggcagggaggcgccccgggtgggctttggggctgcggcactgccacacatcctttccctcctggcctgccctgctggggctctactgccatctatagatggtgtcctgggcctgggaaactaggttcccaggggttgagaccagaaaggtgaccaagacagattttttaaggtgcagaaactgcaggggggcctcagtgacatccatgaggccttattagcaaaggacacccagacctccaaggtttgtgggccccttccacaaagctgtaagtcccagcccacctactcagggccttgctcagtgctgtggcccggtggggacacagttgctcgtggccactcagtggagctgggcctgcagcagactcaaggctccgagtgccctgggggtcacccctcccctcccctcctcagagcccaccctgagaggcagcagtgacccccatggcacacacctgccaacagcactgggggcttctccccaggagaccacgctgccctccaagaccaggagcagctgtgagctggagacagcagagggaccccagggtgtcccctgcagatcccaccagggccgcatccatctcagtgtggaggacagtgacgggaccctcaccatcctcttgcgttttggcccccatttgctccctgagctccaagataagaatggccccgagagaactgctgaacatttgttcattgctgtcacctcctgagtcactggggtccctcaccagcacctccctgacacctgggctatggagaggttggcgcctgtcagtgaccatcctaatgcctctcgctcactcccaagccaccatttgagagggaggggtgttggtgccctgacagggactgggcagggtgtccaaacttggggcttcccaggcacctgcagtgtgaacactgcttggctggctcaagattagggccgcggagggggctgtgcacataccagttacttaagcagccacgagtgtcccccatgccttggtgcgggtcctggaggcctcttgggggtgggacctttgggcagggtttgcccactgacacgcccgccatggggcactggctgcatggggctccttggaccctgtagacccagcaggagcctggccgcggggactgcagggagggtgcctggacccgtggggttgcttcattgagataaagcacacttatcacatagcacaaaggacgtgccatggtgctttccccaaaagttgtgttgcttttatcagttttctaactt

SEQ ID NO: 212360 - DNA, 3505 bp, Artificial Sequence
  derived and/or modified sequence
atcgcagcgagagcgtttttgcctgtggagagccggccgacgggagccgcggcggagcctgttgagctcgcgcgggctgccgggagtggtctctgaggcggcggcggcggcggggatcgtctccggcactgacgcaccatgtcggtcagtgtccatgagacccgcaagtcgcggagcagcacggggtccatgaacgtcaccctcttccacaaggcctcccacccggactgtgtgctggccgcctctagccgctattttgaggccatgttcagccatggccttcgggagagccgggatgacactgtcaacttccaggacaacctgcacccggaggtgctggagctgctgctggactttgcctactcctcacgcatcgccatcaacgaggagaacgctgagtcactgctggaggcaggcgacatgctgcagttccacgatgtgcgggatgctgccgccgagttcctggagaagaaccttttcccctccaactgcctgggcatgatgctgctctcggacgcccaccagtgccgccggctgtatgagttctcctggcgcatgtgcctggtgcactttgagacggtgaggcagagcgaggacttcaacagcctgtccaaggacacactgctggacctcatctcgagtgatgagctggagaccgaggacgagcgggtggtcttcgaggccatcctccagtgggtgaagcacgacctggagccacggaaggtccacttgcccgagctcctccgcagcgtgcgtctggccttgctgccgtccgactgcctgcaggaggccgtctccagcgaggccctcctcatggcagacgagcgcaccaagcttatcatggatgaggccctgcgctgcaagaccaggatcctgcagaatgatggcgtggtcaccagcccctgtgcccggccacgcaaggcgggccacacgctactcatcctggggggccagaccttcatgtgtgacaagatctaccaggtggaccacaaggccaaggagatcatccccaaggccgacctgcccagcccccggaaggagttcagcgcctcagcgatcggctgcaaggtctatgtgacggggggcaggggctccgagaacggggtctccaaggatgtctgggtgtacgacaccgtacatgaggaatggtccaaggcggcgcccatgctgattgcccgctttggccatggctcagctgagctggagaactgcctctatgtggtggggggacacacatccctggcaggggtcttcccggcctcgccttctgtctccctgaaacaagtggagaaatacgaccctggggccaacaagtggatgatggtggcccccttgcgggatggcgtcagcaatgccgcagtggtgagtgccaagctgaagctctttgttttcggaggaaccagcatccaccgggacatggtgtccaaggtccagtgctatgacccctcggagaacaggtggacgatcaaggccgagtgcccccagccttggcggtacacagccgctgccgtcctgggcagccagatcttcatcatgggaggtgacacggaattcacagccgcctcggcctaccgctttgactgtgagaccaaccagtggacgcggattggggacatgactgccaagcgcatgtcctgccatgccctggcttccggcaacaagctctatgtggtcgggggctactttgggacccagaggtgtaagactctggactgctatgaccccacttcagatacatggaactgcatcaccacagtgccctactcacttatccccacggcctttgtcagcacctggaagcacctgcccgcgtgaggagcacctgctgagcccagccagaccgcggccttcagtgtcacagcgtggccttgcttgtctgccacagcgggagctaagccggccctgggccagcactccgagaggtggaaggggccctgccagctctggggagcagcagccttgggctgttctgagctttaggcaagagaagagaagcatctcttgcatccgtgcccctgggggcctcttcagctttgcagtggtttgtgggaagacatacctcccagaggggcatggactgccaccaggactgaccctggcgtcggggagaaggacacttgcagagccttgagatcacctgtttggcaggtcctggactggggccgggcaggcaggggcagggaggcgccccgggtgggctttggggctgcggcactgccacacatcctttccctcctggcctgccctgctggggctctactgccatctatagatggtgtcctgggcctgggaaactaggttcccaggggttgagaccagaaaggtgaccaagacagattttttaaggtgcagaaactgcaggggggcctcagtgacatccatgaggccttattagcaaaggacacccagacctccaaggtttgtgggccccttccacaaagctgtaagtcccagcccacctactcagggccttgctcagtgctgtggcccggtggggacacagttgctcgtggccactcagtggagctgggcctgcagcagactcaaggctccgagtgccctgggggtcacccctcccctcccctcctcagagcccaccctgagaggcagcagtgacccccatggcacacacctgccaacagcactgggggcttctccccaggagaccacgctgccctccaagaccaggagcagctgtgagctggagacagcagagggaccccagggtgtcccctgcagatcccaccagggccgcatccatctcagtgtggaggacagtgacgggaccctcaccatcctcttgcgttttggcccccatttgctccctgagctccaagataagaatggccccgagagaactgctgaacatttgttcattgctgtcacctcctgagtcactggggtccctcaccagcacctccctgacacctgggctatggagaggttggcgcctgtcagtgaccatcctaatgcctctcgctcactcccaagccaccatttgagagggaggggtgttggtgccctgacagggactgggcagggtgtccaaacttggggcttcccaggcacctgcagtgtgaacactgcttggctggctcaagattagggccgcggagggggctgtgcacataccagttacttaagcagccacgagtgtcccccatgccttggtgcgggtcctggaggcctcttgggggtgggacctttgggcagggtttgcccactgacacgcccgccatggggcactggctgcatggggctccttggaccctgtagacccagcagaccccgcctgtgtcaggccagctgcccgaaggcacttggctgtggtcccaggggacggctctgctggcacactcaggagcctggccgcggggactgcagggagggtgcctggacccgtggggttgcttcattgagataaagcacacttatcacatagcacaaaggacgtgccatggtgctttccccaaaagttgtgttgcttttatcagttttctaactt

SEQ ID NO: 212361 - protein, 1544 aa, Artificial Sequence
  derived and/or modified sequence
MAAPQDLDIAVWLATVHLEQYADTFRRHGLATAGAARGLGHEELKQLGISATGHRKRILRLLQTGTEEGSLDPKSDSAMEPSPSPAPQAQPPKPVPKPRTVFGGLSGPATTQRPGLSPALGGPGVSRSPEPSPRPPPLPTSSSEQSSALNTVEMMPNSIYFGLDSRGRAQAAQDKAPDSSQISAPTPALRPTTGTVHIMDPGCLYYGVQPVGTPGAPDRRESRGVCQGRAEHRLSRQDLEAREDAGYASLELPGDSTLLSPTLETEETSDDLISPYASFSFTADRLTPLLSGWLDKLSPQGNYVFQRRFVQFNGRSLMYFGSDKDPFPKGVIPLTAIEMTRSSKDNKFQVITGQRVFVFRTESEAQRDMWCSTLQSCLKEQRLLGHPRPPQPPRPLRTGMLELRGHKAKVFAALSPGELALYKSEQAFSLGIGICFIELQGCSVRETKSRSFDLLTPHRCFSFTAESGGARQSWAAALQEAVTETLSDYEVAEKIWSNRANRQCADCGSSRPDWAAVNLGVVICKQCAGQHRALGSGISKVQSLKLDTSVWSNEIVQLFIVLGNDRANRFWAGTLPPGEGLHPDATPGPRGEFISRKYRLGLFRKPHPQYPDHSQLLQALCAAVARPNLLKNMTQLLCVEAFEGEEPWFPPAPDGSCPGLLPSDPSPGVYNEVVVRATYSGFLYCSPVSNKAGPSPPRRGRDAPPRLWCVLGAALEMFASENSPEPLSLIQPQDIVCLGVSPPPTDPGDRFPFSFELILAGGRIQHFGTDGADSLEAWTSAVGKWFSPLSCHQLLGPGLLRLGRLWLRSPSHTAPAPGLWLSGFGLLRGDHLFLCSAPGPGPPAPEDMVHLRRLQEISVVSAADTPDKKEHLVLVETGRTLYLQGEGRLDFTAWNAAIGGAAGGGGTGLQEQQMSRGDIPIIVDACISFVTQHGLRLEGVYRKGGARARSLRLLAEFRRDARSVKLRPGEHFVEDVTDTLKRFFRELDDPVTSARLLPRWREAAELPQKNQRLEKYKDVIGCLPRVNRRTLATLIGHLYRVQKCAALNQMCTRNLALLFAPSVFQTDGRGEHEVRVLQELIDGYISVFDIDSDQVAQIDLEVSLITTWKDVQLSQAGDLIMEVYIEQQLPDNCVTLKVSPTLTAEELTNQVLEMRGTAAGMDLWVTFEIREHGELERPLHPKEKVLEQALQWCQLPEPCSASLLLKKVPLAQAGCLFTGIRRESPRVGLLRCREEPPRLLGSRFQERFFLLRGRCLLLLKEKKSSKPEREWPLEGAKVYLGIRKKLKPPTPWGFTLILEKMHLYLSCTDEDEMWDWTTSILKAQHDDQQPVVLRRHSSSDLARQKFGTMPLLPIRGDDSGATLLSANQTLRRLHNRRTLSMFFPMKSSQGSVEEQEELEEPVYEEPVYEEVGAFPELIQDTSTSFSTTREWTVKPENPLTSQKSLDQPFLSKSSTLGQEERPPEPPPGPPSKSSPQARGSLEEQLLQELSSLILRKGETTAGLGSPSQPSSPQSPSPTGLPTQTPGFPTQPPCTSSPPSSQPLT

SEQ ID NO: 212362 - DNA, 4635 bp, Artificial Sequence
  derived and/or modified sequence
atggccgccccccaggacctggacatcgccgtgtggctggccaccgtgcacctggagcagtacgccgacaccttcagaagacacggcctggccaccgccggcgccgccagaggcctgggccacgaggagctgaagcagctgggcatcagcgccaccggccacagaaagagaatcctgagactgctgcagaccggcaccgaggagggcagcctggaccccaagagcgacagcgccatggagcccagccccagccccgccccccaggcccagccccccaagcccgtgcccaagcccagaaccgtgttcggcggcctgagcggccccgccaccacccagagacccggcctgagccccgccctgggcggccccggcgtgagcagaagccccgagcccagccccagacccccccccctgcccaccagcagcagcgagcagagcagcgccctgaacaccgtggagatgatgcccaacagcatctacttcggcctggacagcagaggcagagcccaggccgcccaggacaaggcccccgacagcagccagatcagcgcccccacccccgccctgagacccaccaccggcaccgtgcacatcatggaccccggctgcctgtactacggcgtgcagcccgtgggcacccccggcgcccccgacagaagagagagcagaggcgtgtgccagggcagagccgagcacagactgagcagacaggacctggaggccagagaggacgccggctacgccagcctggagctgcccggcgacagcaccctgctgagccccaccctggagaccgaggagaccagcgacgacctgatcagcccctacgccagcttcagcttcaccgccgacagactgacccccctgctgagcggctggctggacaagctgagcccccagggcaactacgtgttccagagaagattcgtgcagttcaacggcagaagcctgatgtacttcggcagcgacaaggaccccttccccaagggcgtgatccccctgaccgccatcgagatgaccagaagcagcaaggacaacaagttccaggtgatcaccggccagagagtgttcgtgttcagaaccgagagcgaggcccagagagacatgtggtgcagcaccctgcagagctgcctgaaggagcagagactgctgggccaccccagacccccccagccccccagacccctgagaaccggcatgctggagctgagaggccacaaggccaaggtgttcgccgccctgagccccggcgagctggccctgtacaagagcgagcaggccttcagcctgggcatcggcatctgcttcatcgagctgcagggctgcagcgtgagagagaccaagagcagaagcttcgacctgctgaccccccacagatgcttcagcttcaccgccgagagcggcggcgccagacagagctgggccgccgccctgcaggaggccgtgaccgagaccctgagcgactacgaggtggccgagaagatctggagcaacagagccaacagacagtgcgccgactgcggcagcagcagacccgactgggccgccgtgaacctgggcgtggtgatctgcaagcagtgcgccggccagcacagagccctgggcagcggcatcagcaaggtgcagagcctgaagctggacaccagcgtgtggagcaacgagatcgtgcagctgttcatcgtgctgggcaacgacagagccaacagattctgggccggcaccctgccccccggcgagggcctgcaccccgacgccacccccggccccagaggcgagttcatcagcagaaagtacagactgggcctgttcagaaagccccacccccagtaccccgaccacagccagctgctgcaggccctgtgcgccgccgtggccagacccaacctgctgaagaacatgacccagctgctgtgcgtggaggccttcgagggcgaggagccctggttcccccccgcccccgacggcagctgccccggcctgctgcccagcgaccccagccccggcgtgtacaacgaggtggtggtgagagccacctacagcggcttcctgtactgcagccccgtgagcaacaaggccggccccagcccccccagaagaggcagagacgccccccccagactgtggtgcgtgctgggcgccgccctggagatgttcgccagcgagaacagccccgagcccctgagcctgatccagccccaggacatcgtgtgcctgggcgtgagccccccccccaccgaccccggcgacagattccccttcagcttcgagctgatcctggccggcggcagaatccagcacttcggcaccgacggcgccgacagcctggaggcctggaccagcgccgtgggcaagtggttcagccccctgagctgccaccagctgctgggccccggcctgctgagactgggcagactgtggctgagaagccccagccacaccgcccccgcccccggcctgtggctgagcggcttcggcctgctgagaggcgaccacctgttcctgtgcagcgcccccggccccggcccccccgcccccgaggacatggtgcacctgagaagactgcaggagatcagcgtggtgagcgccgccgacacccccgacaagaaggagcacctggtgctggtggagaccggcagaaccctgtacctgcagggcgagggcagactggacttcaccgcctggaacgccgccatcggcggcgccgccggcggcggcggcaccggcctgcaggagcagcagatgagcagaggcgacatccccatcatcgtggacgcctgcatcagcttcgtgacccagcacggcctgagactggagggcgtgtacagaaagggcggcgccagagccagaagcctgagactgctggccgagttcagaagagacgccagaagcgtgaagctgagacccggcgagcacttcgtggaggacgtgaccgacaccctgaagagattcttcagagagctggacgaccccgtgaccagcgccagactgctgcccagatggagagaggccgccgagctgccccagaagaaccagagactggagaagtacaaggacgtgatcggctgcctgcccagagtgaacagaagaaccctggccaccctgatcggccacctgtacagagtgcagaagtgcgccgccctgaaccagatgtgcaccagaaacctggccctgctgttcgcccccagcgtgttccagaccgacggcagaggcgagcacgaggtgagagtgctgcaggagctgatcgacggctacatcagcgtgttcgacatcgacagcgaccaggtggcccagatcgacctggaggtgagcctgatcaccacctggaaggacgtgcagctgagccaggccggcgacctgatcatggaggtgtacatcgagcagcagctgcccgacaactgcgtgaccctgaaggtgagccccaccctgaccgccgaggagctgaccaaccaggtgctggagatgagaggcaccgccgccggcatggacctgtgggtgaccttcgagatcagagagcacggcgagctggagagacccctgcaccccaaggagaaggtgctggagcaggccctgcagtggtgccagctgcccgagccctgcagcgccagcctgctgctgaagaaggtgcccctggcccaggccggctgcctgttcaccggcatcagaagagagagccccagagtgggcctgctgagatgcagagaggagccccccagactgctgggcagcagattccaggagagattcttcctgctgagaggcagatgcctgctgctgctgaaggagaagaagagcagcaagcccgagagagagtggcccctggagggcgccaaggtgtacctgggcatcagaaagaagctgaagccccccaccccctggggcttcaccctgatcctggagaagatgcacctgtacctgagctgcaccgacgaggacgagatgtgggactggaccaccagcatcctgaaggcccagcacgacgaccagcagcccgtggtgctgagaagacacagcagcagcgacctggccagacagaagttcggcaccatgcccctgctgcccatcagaggcgacgacagcggcgccaccctgctgagcgccaaccagaccctgagaagactgcacaacagaagaaccctgagcatgttcttccccatgaagagcagccagggcagcgtggaggagcaggaggagctggaggagcccgtgtacgaggagcccgtgtacgaggaggtgggcgccttccccgagctgatccaggacaccagcaccagcttcagcaccaccagagagtggaccgtgaagcccgagaaccccctgaccagccagaagagcctggaccagcccttcctgagcaagagcagcaccctgggccaggaggagagaccccccgagcccccccccggcccccccagcaagagcagcccccaggccagaggcagcctggaggagcagctgctgcaggagctgagcagcctgatcctgagaaagggcgagaccaccgccggcctgggcagccccagccagcccagcagcccccagagccccagccccaccggcctgcccacccagacccccggcttccccacccagcccccctgcaccagcagcccccccagcagccagcccctgacctag

SEQ ID NO: 212363 - DNA, 4635 bp, Artificial Sequence
  derived and/or modified sequence
atggctgcccctcaagatctggacatcgccgtctggttagcaaccgtccatctggaacagtatgccgataccttcagaagacacggtctcgcaacggccggagcagcacggggtcttggccacgaagagcttaaacagcttgggatatcagcaaccggtcaccgcaaacggattcttcgcctcctgcaaactggaaccgaagagggaagcctggacccaaagtcagactcagctatggagccaagcccttcgcccgcaccgcaggctcaaccccctaagccagtccctaaaccacggaccgtgtttggtggacttagcggacctgccaccacacagcggccgggactctctcctgctctgggtgggccaggcgtgtcccgatccccggaaccatcgccgcgccctcctccactgcccacctctagctctgagcagagctccgcattgaatactgtagagatgatgccaaattctatctactttggattagactcccggggcagggcccaggcagcccaagataaggcgcctgattcgtctcagatctcagccccgactcccgcactgcggccaacaacgggcacagtgcatatcatggatcccggctgcctgtactacggggtacagcccgtcggcacaccaggcgcccctgatcgtcgggagtccaggggggtttgtcaagggcgagctgagcataggctcagccgccaggatctggaagctagggaggatgcgggctatgctagtctggaactgccaggagacagcaccttactcagccctacgctcgagacagaagaaacctcagatgatctgatttccccatacgcaagtttctcttttacagctgatcgcctgacacccctgcttagtggttggttggacaagttatccccccaagggaattacgtttttcagagacgctttgtccagtttaatggacgaagcttaatgtacttcggttcagacaaggatcctttccctaagggggtcatccctctgacagcaatcgagatgacccgcagcagcaaagataataagtttcaggtaattaccgggcagagggtgttcgtcttccggaccgagagcgaagcacagcgcgatatgtggtgttcgacacttcaatcttgcctaaaggagcagaggttgcttggacaccccaggcccccacagccgcctagaccactcaggaccggaatgttggagctgcggggccacaaagcaaaggttttcgccgcactctcccctggagagctcgccctgtacaagtctgaacaggcattcagtctgggtatagggatctgcttcattgagctccaaggatgttccgtgagggagacgaagtccaggagctttgatctgctcaccccgcaccgctgctttagcttcaccgctgaatctggcggtgcccgccagagctgggcggcagctctgcaggaagccgtcactgaaacactgtccgattacgaagttgcggagaagatttggagcaaccgggccaacaggcagtgcgccgactgcggatctagtcgaccagattgggctgcggtgaacctgggagtggtgatctgcaagcagtgcgccggccagcatcgggctctgggatccggcatttctaaagttcaatcccttaagctggacacttccgtgtggtcaaacgaaatcgtccagttgtttatcgttctagggaatgaccgggctaaccggttttgggcaggcaccctgccacctggcgaagggcttcaccccgacgcaacaccggggccccgcggggagttcattagtagaaagtacaggctaggtttgttccgcaaacctcacccgcaatatccggatcattctcagctcctgcaggccctctgcgcagccgttgccaggcctaacctgctgaaaaacatgactcagttactgtgtgtagaagccttcgaaggcgaggagccttggtttcctccagctccggatgggagctgtccagggttgctcccatccgatccttcgcccggggtgtacaatgaagtggtggtgagagccacctactcggggttcctgtattgttcccccgtctctaacaaggcaggaccatctcctccccgccgaggtcgggatgccccgcctcgcttgtggtgtgtgctgggcgccgctctcgagatgtttgcctccgaaaacagcccagagcccctgagtctaattcagccccaagacattgtctgccttggcgtgtctcctcctcctactgaccccggagatagattcccattttcttttgagttgattctggctggcgggcggattcagcactttggtaccgatggggccgacagcctagaggcctggacgtctgccgttggaaagtggttttcacctctcagctgccatcagttgttgggccccggacttttgaggctcggtcggctgtggctgcggtctccctctcataccgcgcccgcgcctgggctgtggctgtccggctttggccttctgcgtggggatcatctattcttgtgctcagctcccggtccagggccacctgcaccagaagacatggttcacttgaggaggctgcaggaaatttccgtggtgtcagctgctgacacgccggacaaaaaagaacacctagttttggtggagacggggcggactctgtaccttcagggggagggtagactagatttcaccgcgtggaatgctgcaatcgggggggcggccggaggtggcggcactggtcttcaagagcagcagatgagcaggggggatatccctatcatcgtggacgcctgtatatccttcgtcacgcagcacggcctgaggttggaaggcgtctatcgcaaggggggcgcccgcgcgaggagcctgcgactgttggctgagtttagacgggacgcccgctcagtgaagctgaggccgggggaacattttgtcgaggatgtcaccgacacactgaagagatttttccgagaactggacgatcctgtcacgtccgctaggctcctgcctaggtggagagaggccgccgagcttccacaaaagaaccagaggttggagaagtacaaagacgtgatcggatgcctacccagggtcaatcgaaggacactggccacgctgataggccacctatatcgggttcagaagtgtgctgcactcaaccaaatgtgtactcgcaatctggccctcctgtttgccccaagcgtcttccaaacggacggaagaggagaacatgaagtgagagtgttacaggagctgatcgatgggtatatcagcgtttttgatattgatagcgaccaagtggcacagatcgacctggaggtgagccttatcacaacatggaaagacgtacaactaagccaggccggcgacctgattatggaagtgtacattgagcagcagcttcctgataattgtgtcaccttgaaagtgtcccctacgctgacggccgaggaactcactaaccaggtgcttgagatgcgggggaccgccgctggcatggatctgtgggtgacatttgagataagggagcacggcgagctggagcgacctctacatcctaaggaaaaggtcctggaacaggcactccagtggtgccagctgcctgagccatgtagtgcaagcctcttgttaaagaaggtgcctctggcacaggcaggctgtctgttcaccggcatccgaagggaatctcccagggtcggactgctcagatgccgagaggagcctcctcggctactggggagcagattccaagaaagattcttcctcctccgcgggcgatgcctgctgctgcttaaggagaagaaaagtagtaagccagagcgagaatggccgctggagggagccaaggtgtacttggggattcgcaaaaagctgaaacctccgactccatgggggttcacgctaatcctagagaagatgcacctgtacctcagctgtaccgatgaggacgaaatgtgggattggacgacaagcattctgaaagcccagcatgacgaccagcagcccgtagtgcttcgccggcattccagtagcgacctggctagacagaaattcggtacaatgcccctgctgcccatcaggggcgatgatagcggagccacattactgtcagcaaaccaaaccttgaggagactgcacaatcgaaggacattaagcatgttcttccccatgaaaagctcccaagggtccgtcgaggagcaggaagagctggaggagcctgtttacgaagagccagtgtacgaggaggtgggtgcattccccgagctgatccaggatacttccacctccttcagcacaacacgagaatggacagtgaagcctgagaatcctctcacctcccagaaaagcttggatcagccttttctgagtaaatcgtccactctgggccaagaagagagaccccctgagcctcctcctgggccacccagcaagtccagcccgcaggcacgcgggtctctcgaggagcagctgctacaagagcttagcagtcttattcttagaaagggtgaaaccacagccgggctcggttccccatcgcagccaagctctcctcagagtccgtcgccaaccggattgccaacacagacaccaggatttcccacacagcctccctgtacctcgtcccccccatcgtcccagcccctgacatag

SEQ ID NO: 212364 - DNA, 4635 bp, Artificial Sequence
  derived and/or modified sequence
atggccgccccccaggacctggacattgctgtgtggctggccaccgtgcacctggagcagtatgctgacaccttccgccgccacggcctggccacagctggagctgcccggggcctgggccacgaggagctgaagcagctgggcatcagcgccaccggccacaggaagaggatcctgcggctgctgcagacaggaacagaggagggcagcctggaccccaagagtgacagcgccatggagcccagccccagccctgccccccaggcccagccccccaagcctgtgcccaagcccaggacagtgtttggaggcctgagcggccctgccaccacccagaggcctggcctgagccctgccctgggcggccctggggtgagccgcagccctgagcccagcccccggcccccacccctgcccaccagcagcagcgagcagagcagcgccctgaacacagtggagatgatgcccaacagcatctacttcggcctggacagccggggccgggcccaggccgcccaggacaaggccccagacagcagccagatcagcgcccccaccccagccctgcggcccaccactggaacagtgcacatcatggaccccggctgcctgtactacggcgtgcagcctgtgggcacccctggggccccagacagaagagagagccggggcgtgtgccagggccgggcagagcaccggctgagccggcaggacctggaggccagagaagatgctggctacgccagcctggagctgcccggggacagcaccctgctgagccccaccctggagacagaggagaccagtgatgacctgatcagcccctatgccagcttctccttcaccgctgaccggctgacccccctgctgagcggctggctggacaagctgagcccccagggcaactacgtgttccagaggagatttgtgcagttcaacggccgcagcctgatgtacttcggcagtgacaaggaccccttccccaagggcgtcatccccctgacagccatcgagatgaccaggagcagcaaggacaacaagttccaggtgatcaccggccagagggtgtttgtgttcagaacagaaagtgaggcccagagggacatgtggtgcagcaccctgcagagctgcctgaaggagcagaggctgctgggccaccccaggcctccccagcccccccggcccctgaggacaggcatgctggagctgcggggccacaaggccaaggtgtttgctgccctgagccctggagagctggccctgtacaagtctgagcaggccttcagcctgggcatcggcatctgcttcatcgagctgcagggctgcagcgtgcgggagaccaagagccgcagctttgacctgctgaccccccaccgctgcttctccttcaccgctgagagcggcggggcccggcagagctgggccgccgccctgcaggaggccgtgacagagaccctgagtgactatgaggtggccgagaagatctggagcaacagagccaaccggcagtgtgccgactgtggcagcagcaggccagactgggccgctgtgaacctgggcgtggtgatctgcaagcagtgtgccggccagcaccgggccctgggcagcggcatcagcaaggtgcagagcctgaagctggacacctctgtgtggagcaatgaaattgtgcagctgttcatcgtgctgggcaatgaccgggccaaccgcttctgggccggcaccctgcccccaggagagggcctgcacccagatgccaccccaggccccagaggagagttcatcagcaggaagtaccgcctgggcctcttcaggaagccccacccccagtacccagaccacagccagctgctgcaggccctgtgtgccgctgtggcccggcccaacctgctgaagaacatgacccagctgctgtgtgtggaggcctttgaaggagaggagccctggttccccccagccccagatggcagctgccccggcctgctgcccagcgaccccagccctggggtgtacaatgaggtggtggtgcgggccacctacagcggcttcctgtactgcagccctgtgagcaacaaggccggccccagccccccccggcggggcagagatgccccaccccggctgtggtgtgtgctgggcgccgccctggagatgtttgccagcgagaacagccctgagcccctgagcctcatccagccccaggacatcgtgtgcctgggcgtgagccccccacccacagatcctggggaccgcttccccttctcctttgagctgatcctggccggcggccgcatccagcactttggaacagatggagctgacagcctggaggcctggaccagcgctgtgggcaagtggttcagccccctgagctgccaccagctgctgggccctggcctgctgcggctgggccgcctgtggctgcggagccccagccacacagccccagcccctggcctgtggctgagcggcttcggcctgctgcggggggaccacctgttcctgtgcagcgcccctggccctggccccccagcccctgaggacatggtgcacctgcggcggctgcaggagatctctgtggtgtctgctgctgacaccccagacaagaaggagcacctggtgctggtggagactggaagaaccctgtacctgcagggcgagggccgcctggacttcaccgcctggaatgctgccatcggcggggccgccggcggcggcggcaccggcctgcaggagcagcagatgagcagaggagacatccccatcatcgtggatgcctgcatcagctttgtgacccagcacggcctgcggctggagggcgtgtacagaaaaggaggagcccgggcccggagcctgcggctgctggccgagttcagaagagatgcccggtctgtgaagctgcggcctggagagcactttgtggaggatgtgacagacaccctgaagcgcttcttccgggagctggatgatcctgtgaccagcgcccggctgctgccccgctggagggaggccgctgagctgccccagaagaaccagaggctggagaagtacaaggatgtgattggctgcctgccccgggtgaacagaaggaccctggccaccctgattggccacctgtacagagtgcagaagtgtgccgccctgaaccagatgtgcaccaggaacctggccctgctgtttgcccccagcgtcttccagacagatggccgcggggagcacgaggtgcgggtgctgcaggagctgattgatggctacatctctgtgtttgacatcgacagcgaccaggtggcccagattgacctggaggtgtccctcatcaccacctggaaggatgtgcagctgagccaggccggggacctgatcatggaggtgtacatcgagcagcagctgcctgacaactgtgtgaccctgaaggtgagccccaccctgacagctgaggagctgaccaaccaggtgctggagatgaggggcacagctgctggcatggacctgtgggtgacctttgagatccgggagcacggggagctggagcggcccctgcaccccaaggagaaggtgctggagcaggccctgcagtggtgccagctgcctgagccctgcagcgccagcctgctgctgaagaaggtgcccctggcccaggccggctgcctcttcaccggcatcagaagagagagcccccgggtgggcctgctgcgctgccgggaggagcccccccggctgctgggcagccgcttccaggagcgcttcttcctgctgcggggccgctgcctgctgctgctgaaggagaagaagagcagcaagccagagcgggagtggcccctggagggcgccaaggtgtacctgggcatcaggaagaagctgaagccacccaccccctggggcttcaccctcatcctggagaagatgcacctgtacctgagctgcacagatgaagatgagatgtgggactggaccaccagcatcctgaaggcccagcatgatgaccagcagcctgtggtgctgcggcggcacagcagcagtgacctggcccggcagaagtttggcaccatgcccctgctgcccatcagaggagatgattctggggccaccctgctgagcgccaaccagaccctgcggcggctgcacaacagaaggaccctgtccatgttcttccccatgaagagcagccagggctctgtggaggagcaggaggagctggaggagcctgtgtatgaggagcctgtgtatgaggaggtgggcgccttccctgagctgatccaggacaccagcaccagcttcagcaccacccgggagtggacagtgaagccagagaaccccctgaccagccagaagagcctggaccagcccttcctgagcaagagcagcaccctgggccaggaggagcggcccccagagcccccacctggcccccccagcaagagcagcccccaggcccggggcagcctggaggagcagctgctgcaggagctgagcagcctcatcctgaggaagggggagaccacagctggcctgggcagccccagccagcccagcagcccccagagccccagccccaccggcctgcccacccagaccccaggcttccccacccagcccccctgcaccagcagcccccccagcagccagcccctgacctag

SEQ ID NO: 212365 - DNA, 4635 bp, Artificial Sequence
  derived and/or modified sequence
atggccgccccccaggacctggacatcgccgtgtggctggccaccgtgcatcttgaacagtatgctgatacgttccgcagacacggactggcaaccgccggagctgcacgagggctaggacacgaggagctcaaacaactggggatcagcgccacaggtcatcgtaaacggatcctcaggcttctgcagaccggaaccgaggagggaagtctggaccccaaaagtgactctgcgatggagccctccccctccccagcaccccaggcccagcccccaaaacctgtccccaagcctcggactgtgttcgggggccttagtggtcccgcaaccacacaaaggcccggactgtctccagctttgggcgggcctggagtctcccggtcccctgagccaagccctaggccgccccctctacccacctcttcctccgaacaaagcagtgccctcaatacagtagaaatgatgcccaattccatttactttggactcgactcccgtggcagggcccaagcagcccaggataaggcccctgattccagccagattagtgctcctaccccggctcttagacctactacagggacagtccatatcatggaccccggttgtttgtactatggagttcagcccgtggggacccctggggcacccgatcgccgcgaaagccgcggtgtgtgtcagggccgggcggagcacagactatctaggcaggacttggaagctagggaggacgcgggatatgcgtccctagaactgccaggcgactcaaccctgctctctccaactctagagacggaggaaacatcagacgatctgatctctccatacgcctcattcagcttcacggccgatcggttgactcctctactgtctggctggctggacaaactgtcacctcagggcaattacgtgtttcagcgacgcttcgttcagttcaacggcaggagcctgatgtactttgggtccgataaagacccattcccaaaaggagtaattcctttaaccgccattgaaatgactcgcagctccaaggataacaagttccaagttattactggccaacgcgtatttgttttcagaaccgagagcgaggcccagagagacatgtggtgttccacgctgcagtcctgcttgaaggagcagaggctgctgggccatccacgcccaccacaaccgcctcgacccctaagaacaggcatgcttgagttgagggggcacaaagctaaggtgtttgcggctctgtcccctggcgaactggctctgtacaaatccgaacaggctttttcccttggtataggcatttgctttatagagctccagggatgttccgtcagggagactaagtctcggtcattcgatctcctgacccctcaccggtgctttagtttcacagccgagtctggcggtgcccgacagagttgggctgctgccctgcaggaggctgtcacggagacattaagcgattacgaggtggccgaaaagatttggagtaatagggcaaatcgccagtgcgcagattgtgggtctagccggccagactgggccgcagtgaacctgggagtggttatctgcaaacagtgcgctgggcagcatcgcgcactgggcagtgggattagtaaagttcagtctctgaagctcgatacgagtgtgtggtccaacgagattgtccagctgttcatagtgctgggcaacgaccgggccaatcgattttgggctggtacactgcctccgggggaggggttacaccctgacgcaactccgggcccacgcggtgagttcatttcaaggaaatatcggctaggattgttcaggaagccccatcctcaatacccagatcatagccagctgttgcaagctctatgcgctgctgtggcccggcccaatttgctgaaaaacatgacccaactactctgcgttgaggcattcgaaggagaggagccatggttccctccggcgcccgacggcagttgtcctggcctgttgccaagcgacccgtccccaggagtgtacaatgaggtggtggtccgcgcaacttatagtggattcttatactgttctccagtaagcaacaaggccggaccctcaccacccaggagaggccgagacgcccctccgaggctttggtgcgtgctgggagctgcactcgaaatgtttgccagcgaaaatagccctgagccactcagtctgatccagccccaggacatcgtttgcctgggagtctcgcccccacctaccgacccgggcgacaggttccctttttcttttgaattgattttggccggcgggcgaatccaacatttcggcaccgatggtgctgacagccttgaggcgtggacatcagctgtcgggaaatggtttagcccattgtcatgtcaccagttgttgggacccggactgctgagactgggacggctctggttgcgcagcccatctcacaccgcgcccgctcctgggctgtggttatcggggtttgggttactcaggggcgatcacctgttcctttgtagcgctcctggtccagggccacctgcccctgaggacatggtgcacctgaggcgcctccaggaaatctctgtggtctcagccgctgataccccagataagaaggagcacctggtgctggtagagacagggcgcactctgtatctgcaaggagagggtaggttggatttcacagcatggaacgctgcaatcggaggtgccgcgggagggggcggaacagggctgcaggagcagcagatgagtcggggggatattcccatcatagtcgacgcatgtatcagttttgtcactcagcacgggctgcgcctggagggcgtgtatagaaagggcggcgcccgcgcgcgtagcctccggttgctcgccgagttccggcgcgacgctcgcagtgtgaagctgagacctggcgaacatttcgttgaagatgtaacggacaccctaaaacgattttttcgagaactcgacgacccggtcacatctgcacggctgctgccgcggtggcgtgaggctgcggaactccctcagaagaaccaaagactggagaagtacaaggatgttatcggctgtctgccaagggtcaaccgtagaactctcgccacgttgatcggccacctgtatagggtccaaaaatgcgccgccttaaaccaaatgtgcacacgtaacttggctctcctgtttgcaccatctgtgtttcagaccgacgggagaggggagcacgaggtccgtgtcttgcaggaactcatcgatggctacatatcagtttttgatatcgattccgaccaagttgctcagatcgacctggaggtctcactgattacaacttggaaggacgtacagctgtcgcaagcaggtgatctgataatggaggtctatatcgagcagcaactccccgacaactgcgttacactcaaggtaagcccgaccctgaccgccgaagagctcaccaaccaggtcctggagatgaggggtacagcagcgggcatggatctgtgggtgacctttgaaattcgagaacacggagaactagaacggccactccaccctaaggaaaaggtccttgagcaggctttgcagtggtgtcagttaccagaaccatgttcggcttccctgttgttaaagaaggtaccacttgcccaagcaggttgcctgtttactgggatccgcagagaatctcctcgggtaggcctcctacggtgccgcgaggagccaccccggttgctagggtcacggtttcaagagcgctttttcctcttacgcggacgttgccttctcctgctgaaagagaaaaaaagtagtaagccagagcgcgagtggccgctcgagggcgccaaggtctacttgggcatacgcaagaagcttaagcctcctacaccttggggcttcacattgattctggaaaagatgcatttgtatctgagctgtacagatgaggacgagatgtgggattggacaacatcaattcttaaagcacaacatgatgatcagcagcccgttgtgctaagaagacattcgtcatcggatctggcccgccagaaattcggcacaatgcctctcttgcctatacggggagatgacagcggagcgaccctgttaagtgctaaccaaacactcagacggttgcacaaccggaggactctaagcatgtttttccccatgaaaagctctcagggctctgttgaggagcaggaggagctggaggaaccagtttatgaagaaccagtctacgaggaagtgggagctttcccggaactgattcaggatacctctacttcattttctaccacccgcgaatggactgtgaagccggagaaccctctcacttctcagaagagtctagatcagcctttcctttccaaatcaagcacgctgggccaggaggaaagaccccctgaacctcccccaggaccaccatcaaaatctagccctcaggcccgggggtctttagaggaacagctcctacaggaattgtccagcctgattctgaggaagggtgaaacgacggcagggttgggctcccccagtcagccaagcagcccccagtccccatcacctacgggcctacctactcagacacccggttttcccacccagccaccatgtacaagcagccctccttcatcacaaccccttacctag

SEQ ID NO: 212366 - DNA, 5250 bp, Artificial Sequence
  derived and/or modified sequence
ctcggacgagcggcgggcacccgcgagcggacggcggccgcgtagtgagcaatggcctgagcccccatggctgcccctcaggacctggacatcgctgtgtggctggccacggtgcacctggagcagtatgcagacacgttccgacggcatggcctggctacagcaggtgcagcccggggcctgggccacgaggagttgaagcagttgggcatcagcgccacagggcaccggaaacgcattctacgcctgctacagacaggcaccgaagagggctccctggatcccaaatcagatagtgccatggaaccatcccccagcccagccccgcaagcccagccccctaagcccgtgccgaagcccaggaccgtgtttggtggactcagtggccctgccaccactcagagacctgggctgagcccagccctcgggggaccaggagtgtccaggagcccagagcccagcccaaggcctcctcctctccccacttcctcctctgagcagtcttcagccctaaatactgtggagatgatgcctaattccatctacttcggcctggactcaagaggcagggcacaggcagctcaggacaaggccccagacagctcccaaatctctgcccccacccctgccctcaggcccacaacaggcacagtgcacatcatggatcctggttgcctgtactatggtgtccaacctgtggggactccaggagcccccgacagaagagagagcagaggtgtttgtcagggcagggctgaacacaggctcagcagacaggatctggaggcacgggaggatgctggctatgccagccttgagctacctggagactccaccctcttatcgcccaccctggaaacagaggagaccagtgatgacctcatttcaccctatgccagcttctccttcacggcagaccgcctcacgcccctgctcagtggctggctagacaagctctcccctcagggaaactatgtcttccagagacgctttgtgcagttcaatgggaggagtctgatgtactttggcagtgacaaggaccccttccctaagggtgtgatacctttgactgccattgagatgacccgcagcagcaaggacaacaagttccaggtcatcaccggccagagggtgttcgtgttccgcacagagagcgaggctcagcgggacatgtggtgctccacgctgcagtcctgtctgaaggagcagcgcctcctgggccacccccggcccccccaaccaccccgacccctccgcacgggcatgctggagctgcgtggacacaaggccaaggtgtttgctgccttgagccctggagagctggcactgtacaagagtgagcaggccttctctctgggcatcgggatctgcttcatcgaactgcagggctgcagcgtccgggagaccaagagtcgaagctttgacctgctcacaccccatcgctgcttcagcttcacagccgagtctgggggtgctcggcagagctgggcggccgctctgcaggaagcagtaaccgagaccctgtctgactacgaggtggctgagaagatctggtctaatcgggccaaccggcagtgtgcggactgtgggtcctcccgcccagattgggctgctgtcaatttgggggtggtcatctgcaagcagtgtgcaggtcagcaccgggccctgggttctgggatctccaaggtgcagagcctgaagctggacacgagtgtctggagtaatgagatagtacagttattcattgtcctgggaaatgatcgtgccaaccgcttctgggcagggaccctacccccaggtgagggactacatccagatgcgacccctggcccccggggagagttcatctcccgaaagtaccgtctgggtctcttccggaagccccaccctcagtacccagatcatagccagcttctccaggcactgtgtgcagctgtggcaagacccaacctgctgaagaacatgacccagctcctctgtgttgaggcctttgaaggcgaggagccctggttccccccagcccctgatggcagctgccctggcctcttgccctcagacccctcccctggtgtgtacaatgaggtggtggtgcgtgctacttacagcggcttcctgtactgcagtcccgtcagcaacaaagctggaccctcaccccctcgcaggggccgggatgctcccccgcgcctttggtgtgtgctgggagcagctctggaaatgtttgcatcggaaaacagccctgaacccctcagcctcatacagccccaggatattgtatgtctgggtgtgagccccccacccactgacccaggtgacaggttccccttttcctttgagctcatcctcgctggggggaggatccagcattttggcacagatggagctgacagtctggaggcctggactagtgctgtgggcaagtggttctccccgctgagctgccaccagctgctgggccccgggctgctgcggctgggccgcctatggctgcggtccccctcccatacagccccggcccctggtctctggctgtcagggtttggcctccttcgtggtgaccacctcttcctgtgctcagcgccgggcccaggccccccagcccctgaggacatggtgcatctgcggcggctacaggagatcagtgtggtttctgcagctgacaccccagataagaaagagcatttggtcctggtggagacaggaaggaccctgtatctgcaaggagagggccggctggacttcacggcatggaacgcagccattgggggcgcggctggtgggggcggcacagggctgcaggagcagcagatgagccggggtgacatccccatcatcgtggatgcctgcatcagttttgttacccagcatgggctccggctggaaggtgtataccggaaagggggcgctcgtgcccgcagcctgagactcctggctgagttccgtcgggatgcccggtcggtgaagctccgaccaggggagcactttgtggaggatgtcactgacacactcaaacgcttctttcgtgagctcgatgaccctgtgacctctgcacggttgctgcctcgctggagggaggctgctgagctgccccagaagaatcagcgcctggagaaatataaagatgtgattggctgcctgccgcgggtcaaccgccgcacactggccaccctcattgggcatctctatcgggtgcagaaatgtgcggctctaaaccagatgtgcacgcggaacttggctctgctgtttgcacccagcgtgttccagacggatgggcgaggggagcacgaggtgcgagtgctgcaagagctcattgatggctacatctctgtctttgatatcgattctgaccaggtagctcagattgacttggaggtcagtcttatcaccacctggaaggacgtgcagctgtctcaggctggagacctcatcatggaagtttatatagagcagcagctcccagacaactgtgtcaccctgaaggtgtccccaaccctgactgctgaggagctgactaaccaggtactggagatgcgggggacagcagctgggatggacttgtgggtgacttttgagattcgcgagcatggggagctggagcggccactgcatcccaaggaaaaggtcttagagcaggctttacaatggtgccagctcccagagccctgctcagcttccctgctcttgaaaaaagtccccctggcccaagctggctgcctcttcacaggtatccgacgtgagagcccacgggtggggctgttgcggtgtcgtgaggagccacctcgcttgctgggaagccgcttccaggagaggttctttctgctgcgtggccgctgcctgctgctgctcaaggagaagaaaagctctaaaccagaacgggagtggcctttggaaggtgccaaggtctacctgggaatccgcaagaagttaaagcccccaacaccgtggggcttcacattgatactagagaagatgcacctctacttgtcctgcactgacgaggatgaaatgtgggattggaccaccagcatccttaaagcccagcacgatgaccagcagccagtggtcttacgacgccattcctcctctgaccttgcccgtcagaagtttggcactatgcctttgctgcctatccgtggggatgacagtggagccaccctcctctctgccaatcagaccctgcggcgactacacaaccggaggaccctgtccatgttctttccaatgaagtcatcccaggggtctgtggaggagcaagaggagctggaggagcctgtgtacgaggagccagtgtatgaggaagtaggggccttccctgagttgatccaggacacttctacctccttctccaccacacgggagtggacagtgaagccagagaaccccctcaccagccagaagtcattggatcaaccctttctctccaagtcaagcacccttggccaggaggagaggccacctgagccccctccaggccccccttcaaagagcagtccccaggcacgggggtccctagaggaacagctgctccaggagctcagcagcctcatcctgaggaaaggagagaccactgcaggcctgggaagtccttcccagccatccagcccccaatcccccagccccactggccttccaacacagacacctggcttccccacccaacccccatgcacttccagtccaccctccagccagcccctcacatgaccctaggaccagcagtctgagagggtaggtaccagaagacccagaaactcttatcgtggcactgttgcagcttcctctgccctggctggaaagactccagaatccagtgtggtgctgtggaaggagcactggactaaaggcttcagtggctgcgtgtcccaggacaggtcatggcccctctctgggcccagcccatttatctataccatgaggtaactgaagtaaggagagcagtgaatgtcaaactgtgtttcttagagccataagccccacatattatccctgaacaagggcagctcctgctttatatatttgatacgtaggggttccatgagagattttgggttttaaaggaatggttttactgcattaaagaaaaaaaatgctttggaaaccagaggcctgggtgatgttaaagtctatcctgtcccacttcctacattctgggactaccgtgaagcctggagtagggagagcgagtttgggagctgggactcggggagtcaaaaatagatgagtaattgtcaataaacctgggaaccaaaagac

SEQ ID NO: 212367 - DNA, 4635 bp, Artificial Sequence
  derived and/or modified sequence
atggcagctccacaggacctggatattgcggtgtggctggctaccgtccacctagagcagtacgccgatacattcagaagacatgggttggccaccgctggcgctgctcgaggtctggggcacgaagagttgaagcagctgggtatatccgccacaggtcaccgaaagcgcatcctgcgtcttctgcagaccgggactgaggaggggtcactggaccctaaatcagatagtgctatggaaccatctccttcgccggcaccacaggcccagcctcccaagcccgtcccaaagcctcgtaccgtattcggcggtctgtccgggccagccaccacacaacgcccaggattaagtcctgcattaggaggccctggagtttcacgatcacccgagccatcacccaggcctccaccactgcctacaagcagttcagagcagtcttcggcattaaatacagtggaaatgatgcctaacagtatctatttcgggttagacagtcgaggacgggcacaagccgctcaggacaaagcacccgacagttcacaaatcagtgccccaacccccgctctgcgccctaccacagggactgtccacattatggatcccggttgcctgtattatggggtacaacccgtgggcacaccaggcgctcctgatcggcgagaatccaggggcgtgtgccagggcagagccgagcacaggttatctcggcaagaccttgaggctcgcgaggatgcgggatacgcatccctggagctgccaggcgactccacactcctatcgcctacgctcgaaactgaggaaacgtccgacgatctcatcagtccctacgcgagtttttcatttacagctgatcgactcactcccttgctctccggatggctcgacaagttatcgccacagggaaattacgtcttccagcgtcgcttcgtgcagtttaatggacgcagcctgatgtactttggatcggataaggatcctttcccaaaaggcgtgatcccacttaccgcaattgagatgacacgtagctccaaggacaataagtttcaagtaattacaggtcaacgcgtttttgtgttccggactgaaagtgaagcccaacgggacatgtggtgctctacactgcaatcctgtctgaaagaacagcggcttctcggtcacccccgacctcctcagccaccacggcctctgcggacaggtatgctggaactgcggggtcataaggctaaggtcttcgcggctttgtcacctggcgaactcgccctgtataagtccgagcaggcattttccctgggaataggtatctgctttatagaactccagggttgcagcgtcagagaaaccaaaagtcgcagctttgacctgttaaccccacataggtgttttagttttaccgctgaaagtggcggagcacgacagtcctgggcagccgcactgcaggaggccgtgactgaaacactgtctgactatgaggtggcagagaagatctggagcaatagagctaatagacaatgtgcggattgtggtagctcacggcctgactgggccgcagtaaacttaggtgtcgtgatctgtaaacagtgtgcgggacagcaccgggctttgggtagcggcatttctaaagtacagtctttgaagctggacacttcagtatggagtaacgaaatcgtgcagttatttatagtgctcggaaacgaccgcgctaaccggttttgggccggaactcttccccctggagagggactacatcctgatgccactccgggtcctaggggcgagttcatcagtaggaagtacaggctcggcctgttccggaagccgcacccccagtatcctgatcactcccagcttttgcaagccctatgcgcagcagtagcacgcccaaatctgctcaaaaacatgacacaactattgtgcgtcgaggcatttgaaggcgaagaaccctggtttcccccagcgcctgacgggagctgccccggtctcctgccatcagatccttccccaggcgtgtataatgaggtggttgtgcgagcgacatactcgggttttctctactgctcgccagtatctaacaaagcaggcccatcccctcccaggcgtgggagggacgctccacctcgtttatggtgtgtcttaggagctgccctcgaaatgttcgcctctgagaacagccccgagccattatctctgattcaacctcaggacatagtctgtctgggcgtgtccccacctccgacggacccaggagatagatttcccttttctttcgaattaatactcgctggaggacgaattcagcactttggaactgatggcgcagactctctggaggcctggacgagtgcagtgggcaagtggttcagtccgctcagctgtcaccaactcctcgggcctgggctgctgagactgggcagattatggctacgatctccttcccacaccgccccagctccaggcctgtggctaagcggtttcggactccttagaggcgatcatctctttctgtgctccgccccaggtccaggtcctccagcaccagaggatatggtgcatcttaggcggctacaggagatttccgttgtatcagccgctgatactccagataagaaagaacatcttgtcctcgtggaaacgggtagaacgctttatttacagggtgaggggaggctcgacttcacagcttggaacgctgcaatcggcggagctgccggtggagggggaaccggtctccaggagcagcagatgtctcgcggagatattccaattatagtcgacgcctgcattagcttcgtgactcagcacgggctccgacttgaaggggtgtatagaaaggggggtgcgagggcgaggagcttgagactgttggccgagttccgcagggacgccagaagcgtaaagttgcgacccggtgaacattttgttgaggatgttacagataccctgaagcgcttctttagggagctggacgatcccgtcacgagtgcgaggttgttgccgaggtggagagaggcggcagagttgccgcaaaagaaccagagactggagaaatacaaggacgtgatcggttgtctccctagagtgaaccggcgaacccttgctacccttatcggacacctgtaccgggtgcagaagtgtgcggctctaaaccagatgtgcacccgtaacctcgcactgctgttcgcccctagtgtttttcaaacagatgggagaggggagcacgaggttagggtcttacaggaactgatcgatggatatatttctgtgttcgatatcgattcagaccaagtcgcccagattgaccttgaggtctcccttataactacttggaaggacgtgcagctcagtcaagccggagatctgatcatggaagtgtatatcgaacaacagcttcctgacaattgtgtcacactgaaggtttcccctacactaactgcggaggagttgaccaaccaggtcctagagatgaggggaaccgctgccggaatggacctttgggtaaccttcgagatcagagagcacggtgagctcgagcgcccactgcaccccaaagagaaggtcctggaacaggccctacagtggtgccagttgccagaaccatgcagtgcgtccttgctgctcaagaaggtacctctcgctcaggccggttgcctgttcacaggaatccggagagaatcgccccgagtaggcctccttaggtgccgcgaagagcctccacggctactaggatctcggtttcaagagagattctttctcctgcggggtcggtgccttttgctgctcaaagagaaaaagtctagcaaaccagaaagagaatggcctttggagggtgccaaagtgtacttgggaatcagaaaaaagctgaagccccctacaccttgggggttcacactgattctggaaaagatgcacctctacctgagctgtaccgatgaggatgagatgtgggattggaccacgagcatcttgaaagcccagcatgacgatcaacagcctgtcgtgctaaggcgacactcctcaagcgacttagcccgacagaagtttgggactatgccactcctgccaattcgaggggatgacagtggggctactcttctcagcgcaaaccagacactgaggcgcctacataaccggaggacactatccatgttcttccctatgaagagctctcagggtagcgtcgaggagcaggaggaactagaggaaccagtttacgaagagcctgtatatgaggaggtcggcgctttcccagaactcattcaggatacaagcacttcctttagcaccacccgggaatggaccgtcaagcctgaaaatccccttacctctcaaaaatccctagaccagcccttcttgagcaaaagttcgacactgggccaggaggaacgcccaccggagccccctccaggtcccccttcaaagtcttcgccgcaagcaaggggctccctggaggagcagctgctccaagagttatcctcgctgatcctgcgtaagggcgaaactaccgctggtctgggctctcccagtcagccatcttcccctcaaagtccctcccctaccggccttcccacacaaacgccagggttccccacccagcctccatgcacttcgtctcccccttcctctcaacccctgacatag

SEQ ID NO: 212368 - protein, 538 aa, Artificial Sequence
  derived and/or modified sequence
MAGARAAAAAASAGSSASSGNQPPQELGLGELLEEFSRTQYRAKDGSGTGGSKVERIEKRCLELFGRDYCFSVIPNTNGDICGHYPRHIVFLEYESSEKEKDTFESTVQVSKLQDLIHRSKMARCRGRFVCPVILFKGKHICRSATLAGWGELYGRSGYNYFFSGGADDAWADVEDVTEEDCALRSGDTHLFDKVRGYDIKLLRYLSVKYICDLMVENKKVKFGMNVTSSEKVDKAQRYADFTLLSIPYPGCEFFKEYKDRDYMAEGLIFNWKQDYVDAPLSIPDFLTHSLNIDWSQYQCWDLVQQTQNYLKLLLSLVNSDDDSGLLVHCISGWDRTPLFISLLRLSLWADGLIHTSLKPTEILYLTVAYDWFLFGHMLVDRLSKGEEIFFFCFNFLKHITSEEFSALKTQRRKSLPARDGGFTLEDICMLRRKDRGSTTSLGSDFSLVMESSPGATGSFTYEAVELVPAGAPTQAAWLAALSDRETRLQEVRSAFLAAYSSTVGLRAVAPSPSGAIGGLLEQFARGVGLRSISSNAL

SEQ ID NO: 212369 - DNA, 1617 bp, Artificial Sequence
  derived and/or modified sequence
atggcaggcgcccgagcagctgcagcggctgcatcagccggctcatctgctagtagtggcaaccagcctccgcaggaattgggattaggggagttactggaggagttctctcgtacgcaatatcgggcaaaggacggctcgggaacgggtggtagcaaggtcgagcgtatcgagaagaggtgcctcgaactgtttggacgggattactgtttcagcgtcatccctaataccaatggcgatatctgtggccattacccccgtcatatcgtttttctggaatatgaatcctctgagaaggagaaagatacatttgaaagcaccgtacaggtgtccaagttacaagacctgatccacaggtctaaaatggccaggtgtaggggccgattcgtgtgtccagttattctattcaaaggaaaacatatttgcaggtcggccaccttggctggttggggcgagttgtacggccggtccggctataactatttcttttccggaggcgcggacgatgcctgggccgacgtggaagatgtgacggaagaggactgcgccctgcgttcgggagacactcatctgtttgataaggtgcgcggctacgacatcaagctcctccggtatctctccgtcaaatacatctgcgacctcatggtcgagaataagaaagtcaaatttggcatgaatgtaacctcctccgagaaagtggataaggcccagcggtacgccgactttactctcctctcaataccataccctggatgcgaatttttcaaggagtacaaggatagagactacatggcagaaggattgatctttaattggaagcaggattatgtggatgcgccgttgagcatccctgactttctgacccactccctcaacattgattggagccagtatcagtgctgggaccttgtccagcagacgcagaactacctaaagctgctgctgtcactcgtaaactccgatgacgattccggcctgctagttcattgcatctccgggtgggaccggacacctttgttcatatctttgcttagactgagcctgtgggcggacggactcattcatactagcctgaagccgacagaaatcttgtacttgacagtggcatatgattggttcttgttcggccacatgctggttgacaggctcagcaaaggagaggaaatcttttttttttgctttaacttcttgaagcacataacctcagaggagttttccgccttgaagacacaaagacgcaaatccctcccagccagagatggtgggtttacgctggaagacatctgcatgcttcggcggaaggatcgtgggtctactacgagtctggggagcgattttagcctggttatggaatcttctcctggcgccaccggatcattcacatatgaagccgtcgaactggtgccagctggcgcacccacccaagccgcatggctagcagccttatccgaccgagagacccggctgcaagaggtcagaagtgcattcttagccgcttattcttcgacagttggcctgcgtgccgtggccccaagtcccagcggggcgattggtggcctgctggaacagtttgctagaggtgtcggtctaaggagtatcagctccaatgccctctag

SEQ ID NO: 212370 - DNA, 1563 bp, Artificial Sequence
  derived and/or modified sequence
atggccggggcccgggctgcagcagcagccgcctctgcgggatcttctgcctcctccggcaatcaaccccctcaagagttggggctcggtgagctactggaggagttcagccgtacccagtatcgggccaaggatggatctggaaccgggggcagcaaagtcgaacggatcgaaaaaagatgcctggaactcttcggacgagattattgcttttctgtaattcccaacacaaacggagacatatgtggccactatccaaggcatattgtgttcctcgaatatgaatcgagcgaaaaggagaaggacacgtttgaatcaactgtgcaggtttcaaagctgcaagatcttatccataggagtaagatggcaagatgtcgggggaggttcgtttgcccagtgatccttttcaagggcaaacacatctgtagatccgcaacccttgccggctggggtgaactctacggtagatctgggtacaactattttttcagcggcggagccgacgatgcctgggccgacgtcgaagatgtcaccgaggaagattgtgccttgagatccggagacacgcacctctttgacaaggttcgggggtacgacatcaagcttctgaggtacctgtccgtcaaatatatttgcgacttgatggtcgagaacaaaaaagtgaagttcggaatgaacgtgacctcctcagagaaagttgataaggcgcagcggtacgctgattttacactgctttctatcccctaccctgggtgtgagttcttcaaagagtacaaggacagagattatatggcagaggggctgatctttaactggaaacaggactatgtcgatgctccacttagtattcccgactttttaacccacagccttaatatcgattggtctcagtatcagtgctgggatctggtgcagcagacacagaactatctgaaacttctactgtccttggtgaactccgacgacgatagcggtctgctcgtgcattgcatatcagggtgggatcgaacacctctctttatctcattattacggctgtctctctgggcagacgggctcatacatacgagtcttaagccaacggagattctgtacctgaccgtggcttatgactggtttttattcgggcatatgttagttgacaggctttcaaaaggagaagagatctttttcttctgcttcaattttcttaaacacatcacttccgaggaattctcagctctcaagacgcagaggagaaaatccctgccggccagagacggcgggtttacactggaagatatatgtatgctaagaagaaaggatcgagggtccaccacctcccttggctcagactttagcctcgtcatggagtcttcccctggcgccaccgggtcattcacatatgagcgcggcgcaggtccgtcccgtagcgcaaattccggatccttggaggaggagccactgatcctttctactgaatgtcctctagaacccgcaacaaccctgaggggtcctctggcctttcccgcaggtgctggaggatcccaagtatttcaactgctctttcttaaacctttctag

SEQ ID NO: 212371 - DNA, 1617 bp, Artificial Sequence
  derived and/or modified sequence
atggccggggcccgggctgctgctgctgctgccagcgctggcagcagcgccagcagcggcaaccagcccccccaggagctgggcctgggggagctgctggaggagttcagcaggacccagtaccgggccaaggatggcagcggcactggaggcagcaaggtggagagaattgagaagcgctgcctggagctgtttggccgggactactgcttcagcgtcatccccaacaccaacggggacatctgtggccactaccccaggcacatcgtgttcctggagtatgagagcagcgagaaggagaaggacacctttgagagcacagtgcaggtgtccaagctgcaggacctgatccacaggagcaagatggcccgctgccggggccgctttgtgtgccctgtgatcctcttcaagggcaagcacatctgccgcagcgccaccctggccggctggggcgagctgtatggccgcagcggctacaactacttcttcagcggcggcgcagatgatgcctgggcagatgtggaggatgtgacagaggaggactgtgccctgcggagcggggacacccacctgtttgacaaggtgcggggctatgacatcaagctgctgcgctacctgtctgtgaagtacatctgtgacctgatggtggagaacaagaaggtgaagtttggcatgaatgtgaccagcagcgagaaggtggacaaggcccagagatatgctgacttcaccctgctgagcatcccctacccaggctgtgagttcttcaaggagtacaaggaccgggactacatggccgagggcctcatcttcaactggaagcaggactatgtggatgcccccctgagcatcccagacttcctgacccacagcctgaacatcgactggagccagtaccagtgctgggacctggtgcagcagacccagaactacctgaagctgctgctgagcctggtgaacagtgatgatgacagcggcctgctggtgcactgcatcagcggctgggacaggacccccctcttcatcagcctgctgcggctgagcctgtgggcagatggcctcatccacaccagcctgaagcccacagagatcctgtacctgactgtggcctatgactggttcctgtttggccacatgctggtggaccggctgagcaaaggagaggagatcttcttcttctgcttcaacttcctgaagcacatcaccagcgaggagttcagcgccctgaagacccagaggaggaagagcctgcctgccagagatggcggcttcaccctggaggacatctgcatgctgcggaggaaggaccggggcagcaccaccagcctgggcagtgacttcagcctggtgatggagagcagccctggggccaccggcagcttcacctatgaggccgtggagctggtgcctgctggggcccccacccaggccgcctggctggccgccctgagtgaccgggagacccggctgcaggaggtgcgcagcgccttcctggccgcctacagcagcacagtgggcctgcgggctgtggcccccagccccagcggggccatcggcggcctgctggagcagtttgcccggggcgtgggcctgcggagcatcagcagcaatgccctgtag

SEQ ID NO: 212372 - DNA, 1563 bp, Artificial Sequence
  derived and/or modified sequence
atggccggggcccgggctgctgctgctgctgccagcgctggcagcagcgccagcagcggcaaccagcccccccaggagctgggcctgggggagctgctggaggagttcagcaggacccagtaccgggccaaggatggcagcggcactggaggcagcaaggtggagagaattgagaagcgctgcctggagctgtttggccgggactactgcttcagcgtcatccccaacaccaacggggacatctgtggccactaccccaggcacatcgtgttcctggagtatgagagcagcgagaaggagaaggacacctttgagagcacagtgcaggtgtccaagctgcaggacctgatccacaggagcaagatggcccgctgccggggccgctttgtgtgccctgtgatcctcttcaagggcaagcacatctgccgcagcgccaccctggccggctggggcgagctgtatggccgcagcggctacaactacttcttcagcggcggcgcagatgatgcctgggcagatgtggaggatgtgacagaggaggactgtgccctgcggagcggggacacccacctgtttgacaaggtgcggggctatgacatcaagctgctgcgctacctgtctgtgaagtacatctgtgacctgatggtggagaacaagaaggtgaagtttggcatgaatgtgaccagcagcgagaaggtggacaaggcccagagatatgctgacttcaccctgctgagcatcccctacccaggctgtgagttcttcaaggagtacaaggaccgggactacatggccgagggcctcatcttcaactggaagcaggactatgtggatgcccccctgagcatcccagacttcctgacccacagcctgaacatcgactggagccagtaccagtgctgggacctggtgcagcagacccagaactacctgaagctgctgctgagcctggtgaacagtgatgatgacagcggcctgctggtgcactgcatcagcggctgggacaggacccccctcttcatcagcctgctgcggctgagcctgtgggcagatggcctcatccacaccagcctgaagcccacagagatcctgtacctgactgtggcctatgactggttcctgtttggccacatgctggtggaccggctgagcaaaggagaggagatcttcttcttctgcttcaacttcctgaagcacatcaccagcgaggagttcagcgccctgaagacccagaggaggaagagcctgcctgccagagatggcggcttcaccctggaggacatctgcatgctgcggaggaaggaccggggcagcaccaccagcctgggcagtgacttcagcctggtgatggagagcagccctggggccaccggcagcttcacctatgaaagaggagctggccccagccgcagcgccaacagcggcagcctggaggaggagcccctcatcctgagcacagaatgtcccctggagcccgccaccaccctgcggggccccctggccttccctgctggggccggcggcagccaggtgttccagctgctcttcctgaagcccttctag

SEQ ID NO: 212373 - DNA, 2105 bp, Artificial Sequence
  derived and/or modified sequence
agtgtcggagttgggtgcaggcaggtgccatgggcccgcttgaggcacactgaggggacgcggggctgggccatggccggcgctcgggccgccgccgccgctgcctcggcggggtcctcggcctcttcaggcaaccagccgcctcaggagctggggcttggggagctgctggaggagttctcccggactcagtaccgggccaaggatggcagcgggaccggcggctctaaggttgagcgcattgagaagagatgtctggagctgtttggccgagactactgtttcagcgtgattccaaacacgaatggggatatctgtggccactatccccggcacatcgtgttcctggagtatgagagttctgagaaggagaaagacacgtttgagagtaccgtacaggtgagcaagttgcaagacctcatccaccgcagcaagatggcccggtgcagaggacggtttgtctgcccagtaatcctgttcaagggcaagcacatttgcaggtcggccacactggctggatggggagagctgtatggacgctcaggctacaactattttttctcagggggtgcagatgatgcctgggcagatgtggaggacgtcacggaggaggactgtgctcttcgaagtggtgacacgcatctttttgataaggtcagaggctatgacatcaagctgcttcgatacctgtcagtcaaatacatctgtgacctgatggtggagaacaagaaggtgaagtttggcatgaatgtaacctcctctgagaaggtggacaaagcccagcgctatgccgacttcactctcctctccatcccgtatccaggctgtgaatttttcaaggaatataaagatcgggattacatggcagaagggctcatatttaactggaagcaggactacgttgatgccccattgagcatccccgacttcctgactcactctctgaacattgactggagccagtatcagtgttgggatctggtgcaacaaacacaaaactacctgaagctgctgctttccttagttaacagtgatgatgacagcgggctgctggtacactgtatctcaggctgggatcggacccccctcttcatctccctcctgcgcctttccttgtgggctgatgggctcatccacacgtccctgaagcccactgagatcctctacctcactgtggcctatgactggttcctcttcgggcacatgttggtagatcggctcagcaaaggggaggagattttcttcttctgcttcaattttttgaagcatattacctccgaggagttctctgctctgaagacccagaggaggaagagtttgccagcccgggatggaggcttcaccctggaagacatctgcatgctgagacgaaaggaccgtggcagcaccaccagccttggcagcgacttctccctggtcatggagagttccccaggagccactgggagcttcacctatgaggccgtggagctggtcccagcaggagcgccaactcaggcagcttggcttgcagccctgagtgatcgagagactcggctgcaggaggtgcgctcagccttcttggctgcgtacagcagcacagtggggcttcgggcagtagcccccagtccttccggtgccatcgggggcctgctggagcaatttgcccgtggtgttggactccggagcatcagcagcaatgccttgtgaagaagccagcccatgacattttcctgctcctctctcagctgagcccttagcagagaatcaaagccatgcctggccgaaggggtacttccaggtcaggggaaatttcagtcccccatctccatcatgaacatggcagccccaaagctgagcaaggccaaagacagggttttccaacccccagcctcttgactggtgaccaccaccccttcttgtcactgtctcccacccaccccatctttgctgggattcccatcaactctcagaactgtgtggggtttccctggggccttgtggaagccatgacttcacaaagaccctacctgtcagttcttgtttctggggaggagggatcacctgcactgagaatgaggcagtttgacacagatcacaaaataaaatcaaagtctttttgaata

SEQ ID NO: 212374 - DNA, 1617 bp, Artificial Sequence
  derived and/or modified sequence
atggccggcgcccgggccgccgccgccgccgccagcgccggcagcagcgcatcctccggcaaccaacccccccaggaacttggccttggcgagctactggaagaattctctcggactcaatatagagcgaaagatggatctggaactgggggcagcaaagtggaacggattgagaagcgatgtctggaattgtttggccgagattactgtttttcagtgatccccaacaccaatggggacatctgtgggcactatcctaggcatatagttttcctggagtacgagtctagcgagaaagaaaaggatactttcgagtcgacagttcaagtgagtaagctccaagatctgattcaccgttccaaaatggcacgttgccgcggccgtttcgtctgccccgtgattctcttcaagggcaagcacatttgccgttctgcaacattggcagggtggggggagctctacggaagaagcggttacaactatttcttctcagggggcgctgatgacgcctgggcagatgtggaggatgtgaccgaggaagattgcgcccttcggagtggcgacactcatctgttcgacaaggttaggggatatgacatcaagctgttgaggtacctgtcagtaaagtacatttgcgacttgatggtcgagaacaagaaggtgaagtttgggatgaatgttactagctcagaaaaggtcgacaaagctcagaggtatgccgactttacattacttagtattccttatcccgggtgcgagttctttaaggagtataaggatagggactatatggccgaaggtttgatcttcaactggaaacaggattatgtagatgctccactgtcaatcccagattttttgacacattccctgaatatcgattggagccagtaccagtgctgggatctggtgcagcaaactcagaactatctgaaattgttactgagcctcgtaaactccgacgacgactcgggactcctcgtgcattgtatatctggatgggaccgcacccctctgtttatctcactgctgagactttcattgtgggcagatgggctgattcatactagtctgaagccaactgaaatcctgtacttgacagtcgcatatgattggttcctcttcggacacatgctcgttgacagactatcaaagggagaggagatcttctttttttgctttaatttcctcaaacatatcacgagtgaggagttttctgccctgaaaacccagcgtcggaagagtctgccagcaagggatggcgggtttactctggaggatatttgcatgctgaggaggaaggacaggggcagcaccacatctctcgggagtgattttagtctcgtaatggagtcctccccaggcgccactggttccttcacatacgaggcagtagaattagttccagcgggcgctccaacccaggcagcatggctggcagctctctccgacagggagaccagactgcaagaggtgaggtctgcttttctggccgcctacagttccactgtgggcctccgagccgtcgctccatccccaagcggcgcaatcggtggactgctggagcaatttgccaggggggtgggcttgcgttccatttcttccaacgcgttatag

SEQ ID NO: 212375 - DNA, 1563 bp, Artificial Sequence
  derived and/or modified sequence
atggccggcgcccgggccgccgccgccgccgccagcgccggcagcagcgcctcttcaggcaaccagccaccccaggagttaggcctgggagaactgttagaggagttcagtcgaacacagtatagggcaaaggacggctcaggcaccggcggatccaaagtggagaggattgagaaacgatgcctggagctgtttggcagggactattgtttttccgtcattcctaacacaaatggcgacatttgtggccactatcctcgccacattgtattcctagaatacgagtccagcgagaaagagaaagacacatttgaatcgaccgtgcaggttagtaagttgcaggacctgattcataggtccaaaatggctcggtgtcgagggcgcttcgtatgccccgtaatcctgttcaaaggaaagcacatttgcaggtccgccacactagcaggatggggagaactatacggccggagcggctataattacttcttctccggtggggccgacgatgcctgggccgatgtagaggacgtgactgaagaggactgcgctttgcgcagcggtgacacccacttattcgataaagtgcgaggttatgacatcaaacttttgaggtatctgagtgtgaagtatatatgtgacctgatggtggaaaataaaaaggttaagtttggaatgaacgtaacgtcaagtgaaaaggtggataaggcccagaggtatgccgacttcaccctgctttctattccatatcctggttgtgaatttttcaaggagtacaaggatcgggattatatggcagagggcttaattttcaactggaagcaggactatgttgacgcacccctgtcaattcccgatttcctcacccattccttgaacatcgactggagtcagtatcaatgctgggatctggtgcagcagacacagaactacctcaaacttctgcttagcctggtgaacagcgatgatgattctggtttgttagttcactgtatctcgggatgggaccgcacacctctgtttataagtctgctgcggttgtcactctgggccgacggcctaatccatacctcacttaaaccgacagaaatcctgtatcttaccgtggcctatgactggttcctgttcgggcacatgctggtcgataggctttcgaaaggagaagagattttcttcttttgtttcaactttttaaagcatatcacatcggaagaatttagcgccctgaagacccagaggaggaagagcctgcctgcacgtgacggtggattcaccctggaagatatttgcatgctcagaaggaaagaccggggctctactaccagtctggggtcagacttctccctggtcatggaatctagccccggagctaccggctccttcacctatgaaagaggagcaggccctagccggagcgctaactccggtagcctcgaggaggagccgctcatcctgtcaactgaatgtcctttggagccagccactacgctgcgcgggcctctggcattccctgcaggggcgggcgggtctcaggtgttccaactgctctttcttaagcccttttag

SEQ ID NO: 212376 - DNA, 1617 bp, Artificial Sequence
  derived and/or modified sequence
atggcaggagctagggcggctgccgcagccgcttccgctgggtcaagtgcgagctctggaaaccagccacctcaagaactgggcctgggcgaactgctggaggaattctcacgaacccagtatcgggcaaaagatggatccggaacgggaggctctaaagtggaacgcatcgagaaaagatgcctggagttgtttgggcgtgattactgtttctcggtgatacctaataccaacggcgacatttgcgggcactatccacgccatatcgtgtttcttgagtacgagtcttctgaaaaagagaaagacaccttcgagtcaaccgtgcaggttagtaaacttcaggacctgatccacaggtctaagatggcccgatgtaggggcagattcgtgtgtcccgtgattctgtttaaaggaaaacacatctgtagatcagccactttggccggatggggcgagctgtatggcaggagtgggtacaactactttttttctggcggagcggatgacgcctgggcagacgtagaggacgtgacagaggaagactgtgccttgagatcaggtgatactcatctgttcgacaaagttcgcggttatgacattaagctgctccggtacctgtctgtcaagtatatatgcgatctgatggtggagaataagaaggttaagtttgggatgaatgtgacgtcttcagagaaggtggacaaagctcagaggtacgctgactttactcttctaagtataccatacccaggctgcgaattttttaaagaatacaaggaccgggactacatggcggagggcctgatattcaattggaaacaagactatgtagatgctccactgagtattcctgattttctgacccacagcctgaacattgactggtctcagtaccagtgttgggatctagtgcagcagactcagaattatcttaagcttctgcttagtctcgtgaactccgacgacgacagtggcctcctggtacactgcatcagcggttgggataggaccccattgttcataagccttctgcggctatccttgtgggctgacgggctcatccatacgtctctaaaacccacagagatcttgtaccttaccgtagcctacgattggtttctcttcggccacatgctcgtggatcgattatccaagggcgaagagatcttcttcttctgttttaatttccttaagcatattacatccgaggaattctctgccctgaagacccagcgacgaaagtctctccccgctcgtgatggtggatttaccctggaggacatctgtatgttgcgaagaaaagacagggggagtaccacgtcactgggctccgacttctctctggtgatggagagctcgcctggcgcaaccggcagcttcacctacgaggccgtggaacttgttccggctggtgcccctacccaggcagcctggctcgccgcattgagcgaccgagagacacgacttcaagaagtgagatctgcttttctggctgcttatagctccacggtgggactgagagctgtcgcgccaagcccaagcggtgctatcggcggtctactcgaacagttcgccagaggggttggcctgcgttcaatctcttcaaatgcactctag

SEQ ID NO: 212377 - DNA, 1563 bp, Artificial Sequence
  derived and/or modified sequence
atggccggagcaagggccgctgctgcagccgcatctgccggatcttccgcttcttctggcaatcagccaccacaggagctcggtttaggggagctgctggaggagttctctaggacgcagtatagggccaaggatggttctggtacagggggaagcaaggtcgagcgtattgagaaaagatgtctcgagctatttggcagggattattgttttagcgtgattccaaacaccaatggtgatatttgcggacactaccccaggcatatcgtattcctggagtacgaaagttccgagaaggaaaaagacacattcgagagtaccgtccaggtctcgaagctgcaagacctaatccaccgttccaagatggcgaggtgccggggacggttcgtgtgcccagtaatattgttcaaaggtaagcacatttgccgctcagctacactggccggatggggagagctctatggacgtagcggctacaactattttttttcaggaggtgctgacgacgcctgggccgacgtcgaagatgttactgaggaagactgtgccttacgttccggggacactcacttatttgataaggtcaggggatatgacattaaattgttgcggtatctttcggtcaaatatatttgtgacctgatggttgagaacaaaaaggtgaagttcggcatgaacgtcacctcttcagagaaggttgataaggcacagaggtacgcagacttcacattactctcaataccatacccgggttgtgaatttttcaaagaatacaaagatcgagattatatggccgaagggctgatctttaactggaagcaagactacgttgacgctcccttatcaatccctgatttcctgactcacagcctgaatatcgactggtctcagtatcagtgttgggatttagtccaacagactcagaattatctcaagctgttgctcagccttgtcaatagcgatgatgatagcggactactcgttcactgcatatccgggtgggacagaacacctctgtttatatccctgctgagactgtccctttgggcagatgggctcatacacacatctctcaaaccaacagaaatcctgtacctcactgtagcctacgactggttcctgttcggtcacatgcttgtagacagattgtccaaaggcgaagaaatcttctttttttgttttaatttcctgaaacatatcacctctgaggagttcagcgctctgaaaactcagagaaggaagtccctccccgcacgagacgggggtttcaccctggaagatatctgcatgctcaggaggaaagaccgcggatcaacgacatcccttggaagtgacttcagtctggtgatggaatcgtctccaggcgcaactggatcttttacttatgaaagaggagctgggcctagcagaagcgctaactcaggctcgttggaagaggaaccgctaatattgagcacggagtgcccacttgagcccgctacaaccctgcgtgggcctttggctttccctgccggagccggtggtagccaggtgtttcaattattattcctgaaacccttttag

SEQ ID NO: 212378 - DNA, 1617 bp, Artificial Sequence
  derived and/or modified sequence
atggccggcgccagagccgccgccgccgccgccagcgccggcagcagcgccagcagcggcaaccagcccccccaggagctgggcctgggcgagctgctggaggagttcagcagaacccagtacagagccaaggacggcagcggcaccggcggcagcaaggtggagagaatcgagaagagatgcctggagctgttcggcagagactactgcttcagcgtgatccccaacaccaacggcgacatctgcggccactaccccagacacatcgtgttcctggagtacgagagcagcgagaaggagaaggacaccttcgagagcaccgtgcaggtgagcaagctgcaggacctgatccacagaagcaagatggccagatgcagaggcagattcgtgtgccccgtgatcctgttcaagggcaagcacatctgcagaagcgccaccctggccggctggggcgagctgtacggcagaagcggctacaactacttcttcagcggcggcgccgacgacgcctgggccgacgtggaggacgtgaccgaggaggactgcgccctgagaagcggcgacacccacctgttcgacaaggtgagaggctacgacatcaagctgctgagatacctgagcgtgaagtacatctgcgacctgatggtggagaacaagaaggtgaagttcggcatgaacgtgaccagcagcgagaaggtggacaaggcccagagatacgccgacttcaccctgctgagcatcccctaccccggctgcgagttcttcaaggagtacaaggacagagactacatggccgagggcctgatcttcaactggaagcaggactacgtggacgcccccctgagcatccccgacttcctgacccacagcctgaacatcgactggagccagtaccagtgctgggacctggtgcagcagacccagaactacctgaagctgctgctgagcctggtgaacagcgacgacgacagcggcctgctggtgcactgcatcagcggctgggacagaacccccctgttcatcagcctgctgagactgagcctgtgggccgacggcctgatccacaccagcctgaagcccaccgagatcctgtacctgaccgtggcctacgactggttcctgttcggccacatgctggtggacagactgagcaagggcgaggagatcttcttcttctgcttcaacttcctgaagcacatcaccagcgaggagttcagcgccctgaagacccagagaagaaagagcctgcccgccagagacggcggcttcaccctggaggacatctgcatgctgagaagaaaggacagaggcagcaccaccagcctgggcagcgacttcagcctggtgatggagagcagccccggcgccaccggcagcttcacctacgaggccgtggagctggtgcccgccggcgcccccacccaggccgcctggctggccgccctgagcgacagagagaccagactgcaggaggtgagaagcgccttcctggccgcctacagcagcaccgtgggcctgagagccgtggcccccagccccagcggcgccatcggcggcctgctggagcagttcgccagaggcgtgggcctgagaagcatcagcagcaacgccctgtag

SEQ ID NO: 212379 - DNA, 1563 bp, Artificial Sequence
  derived and/or modified sequence
atggccggcgccagagccgccgccgccgccgccagcgccggcagcagcgccagcagcggcaaccagcccccccaggagctgggcctgggcgagctgctggaggagttcagcagaacccagtacagagccaaggacggcagcggcaccggcggcagcaaggtggagagaatcgagaagagatgcctggagctgttcggcagagactactgcttcagcgtgatccccaacaccaacggcgacatctgcggccactaccccagacacatcgtgttcctggagtacgagagcagcgagaaggagaaggacaccttcgagagcaccgtgcaggtgagcaagctgcaggacctgatccacagaagcaagatggccagatgcagaggcagattcgtgtgccccgtgatcctgttcaagggcaagcacatctgcagaagcgccaccctggccggctggggcgagctgtacggcagaagcggctacaactacttcttcagcggcggcgccgacgacgcctgggccgacgtggaggacgtgaccgaggaggactgcgccctgagaagcggcgacacccacctgttcgacaaggtgagaggctacgacatcaagctgctgagatacctgagcgtgaagtacatctgcgacctgatggtggagaacaagaaggtgaagttcggcatgaacgtgaccagcagcgagaaggtggacaaggcccagagatacgccgacttcaccctgctgagcatcccctaccccggctgcgagttcttcaaggagtacaaggacagagactacatggccgagggcctgatcttcaactggaagcaggactacgtggacgcccccctgagcatccccgacttcctgacccacagcctgaacatcgactggagccagtaccagtgctgggacctggtgcagcagacccagaactacctgaagctgctgctgagcctggtgaacagcgacgacgacagcggcctgctggtgcactgcatcagcggctgggacagaacccccctgttcatcagcctgctgagactgagcctgtgggccgacggcctgatccacaccagcctgaagcccaccgagatcctgtacctgaccgtggcctacgactggttcctgttcggccacatgctggtggacagactgagcaagggcgaggagatcttcttcttctgcttcaacttcctgaagcacatcaccagcgaggagttcagcgccctgaagacccagagaagaaagagcctgcccgccagagacggcggcttcaccctggaggacatctgcatgctgagaagaaaggacagaggcagcaccaccagcctgggcagcgacttcagcctggtgatggagagcagccccggcgccaccggcagcttcacctacgagagaggcgccggccccagcagaagcgccaacagcggcagcctggaggaggagcccctgatcctgagcaccgagtgccccctggagcccgccaccaccctgagaggccccctggccttccccgccggcgccggcggcagccaggtgttccagctgctgttcctgaagcccttctag

SEQ ID NO: 212380 - protein, 747 aa, Artificial Sequence
  derived and/or modified sequence
MGRGPWDAGPSRRLLPLLLLLGLARGAAGAPGPDGLDVCATCHEHATCQQREGKKICICNYGFVGNGRTQCVDKNECQFGATLVCGNHTSCHNTPGGFYCICLEGYRATNNNKTFIPNDGTFCTDIDECEVSGLCRHGGRCVNTHGSFECYCMDGYLPRNGPEPFHPTTDATSCTEIDCGTPPEVPDGYIIGNYTSSLGSQVRYACREGFFSVPEDTVSSCTGLGTWESPKLHCQEINCGNPPEMRHAILVGNHSSRLGGVARYVCQEGFESPGGKITSVCTEKGTWRESTLTCTEILTKINDVSLFNDTCVRWQINSRRINPKISYVISIKGQRLDPMESVREETVNLTTDSRTPEVCLALYPGTNYTVNISTAPPRRSMPAVIGFQTAEVDLLEDDGSFNISIFNETCLKLNRRSRKVGSEHMYQFTVLGQRWYLANFSHATSFNFTTREQVPVVCLDLYPTTDYTVNVTLLRSPKRHSVQITIATPPAVKQTISNISGFNETCLRWRSIKTADMEEMYLFHIWGQRWYQKEFAQEMTFNISSSSRDPEVCLDLRPGTNYNVSLRALSSELPVVISLTTQITEPPLPEVEFFTVHRGPLPRLRLRKAKEKNGPISSYQVLVLPLALQSTFSCDSEGASSFFSNASDADGYVAAELLAKDVPDDAMEIPIGDRLYYGEYYNAPLKRGSDYCIILRITSEWNKVRRHSCAVWAQVKDSSLMLLQMAGVGLGSLAVVIILTFLSFSAV

SEQ ID NO: 212381 - DNA, 2244 bp, Artificial Sequence
  derived and/or modified sequence
atgggcagaggcccctgggacgccggccccagcagaagactgctgcccctgctgctgctgctgggcctggccagaggcgccgccggcgcccccggccccgacggcctggacgtgtgcgccacctgccacgagcacgccacctgccagcagagagagggcaagaagatctgcatctgcaactacggcttcgtgggcaacggcagaacccagtgcgtggacaagaacgagtgccagttcggcgccaccctggtgtgcggcaaccacaccagctgccacaacacccccggcggcttctactgcatctgcctggagggctacagagccaccaacaacaacaagaccttcatccccaacgacggcaccttctgcaccgacatcgacgagtgcgaggtgagcggcctgtgcagacacggcggcagatgcgtgaacacccacggcagcttcgagtgctactgcatggacggctacctgcccagaaacggccccgagcccttccaccccaccaccgacgccaccagctgcaccgagatcgactgcggcaccccccccgaggtgcccgacggctacatcatcggcaactacaccagcagcctgggcagccaggtgagatacgcctgcagagagggcttcttcagcgtgcccgaggacaccgtgagcagctgcaccggcctgggcacctgggagagccccaagctgcactgccaggagatcaactgcggcaacccccccgagatgagacacgccatcctggtgggcaaccacagcagcagactgggcggcgtggccagatacgtgtgccaggagggcttcgagagccccggcggcaagatcaccagcgtgtgcaccgagaagggcacctggagagagagcaccctgacctgcaccgagatcctgaccaagatcaacgacgtgagcctgttcaacgacacctgcgtgagatggcagatcaacagcagaagaatcaaccccaagatcagctacgtgatcagcatcaagggccagagactggaccccatggagagcgtgagagaggagaccgtgaacctgaccaccgacagcagaacccccgaggtgtgcctggccctgtaccccggcaccaactacaccgtgaacatcagcaccgccccccccagaagaagcatgcccgccgtgatcggcttccagaccgccgaggtggacctgctggaggacgacggcagcttcaacatcagcatcttcaacgagacctgcctgaagctgaacagaagaagcagaaaggtgggcagcgagcacatgtaccagttcaccgtgctgggccagagatggtacctggccaacttcagccacgccaccagcttcaacttcaccaccagagagcaggtgcccgtggtgtgcctggacctgtaccccaccaccgactacaccgtgaacgtgaccctgctgagaagccccaagagacacagcgtgcagatcaccatcgccaccccccccgccgtgaagcagaccatcagcaacatcagcggcttcaacgagacctgcctgagatggagaagcatcaagaccgccgacatggaggagatgtacctgttccacatctggggccagagatggtaccagaaggagttcgcccaggagatgaccttcaacatcagcagcagcagcagagaccccgaggtgtgcctggacctgagacccggcaccaactacaacgtgagcctgagagccctgagcagcgagctgcccgtggtgatcagcctgaccacccagatcaccgagccccccctgcccgaggtggagttcttcaccgtgcacagaggccccctgcccagactgagactgagaaaggccaaggagaagaacggccccatcagcagctaccaggtgctggtgctgcccctggccctgcagagcaccttcagctgcgacagcgagggcgccagcagcttcttcagcaacgccagcgacgccgacggctacgtggccgccgagctgctggccaaggacgtgcccgacgacgccatggagatccccatcggcgacagactgtactacggcgagtactacaacgcccccctgaagagaggcagcgactactgcatcatcctgagaatcaccagcgagtggaacaaggtgagaagacacagctgcgccgtgtgggcccaggtgaaggacagcagcctgatgctgctgcagatggccggcgtgggcctgggcagcctggccgtggtgatcatcctgaccttcctgagcttcagcgccgtgtag

SEQ ID NO: 212382 - DNA, 2244 bp, Artificial Sequence
  derived and/or modified sequence
atgggaaggggaccatgggacgccggaccttcaaggaggctgttgcccctgctcttgcttctgggcttggcccgcggagcagccggcgcccccgggcctgatggcctcgatgtttgtgccacttgtcatgaacacgcgacttgccagcaacgagaagggaagaaaatatgcatctgcaattacggctttgttggcaatggccgcacacagtgcgtggataagaacgaatgccagtttggagctactctggtatgcggtaatcacacctcatgccacaatactccgggcggtttttattgcatctgcctcgaaggttaccgcgccactaataataataaaacctttattccaaacgacggcactttttgcaccgacattgacgaatgcgaagttagtggcctgtgtagacacgggggccgatgcgtgaacactcatggcagctttgaatgttactgcatggacgggtacctgcctcgaaacggaccagagccgtttcacccaacaactgatgctacctcatgtaccgaaatcgattgcggaactcctcctgaggtgccagacggttacataataggcaactacaccagttctctggggtctcaggtccggtatgcctgcagggaaggcttttttagcgtccccgaggacactgtgtcttcttgcaccggtctgggcacatgggaatctccgaaactacattgccaggagatcaattgcggaaatccgccagaaatgcggcacgcgatcctcgtgggcaaccactccagccggctgggtggtgtcgcacgctatgtttgccaggaagggttcgagtcccctggcggaaaaattactagcgtctgcactgaaaaggggacgtggcgtgaatcgaccctgacctgtactgaaattctcacaaagattaacgatgtctcactatttaacgatacttgtgtgcggtggcaaataaatagtcgccgaattaaccctaagatcagttacgttatcagcattaagggtcaacgccttgatcctatggagtctgtgagggaggagaccgtgaatctcaccaccgattctcgtacccctgaagtttgcctggctctgtacccagggacgaactatacagtcaacatcagcacggctcccccccgccgatctatgcctgccgtcatcggattccagaccgctgaggttgatctcctggaggacgacgggtcattcaacatttccatttttaacgagacctgtttgaagctaaatcggcggagcaggaaggtaggcagcgagcatatgtaccagtttactgttctgggacagcgttggtatctcgcgaatttctcacacgccacgtctttcaactttacgactcgtgagcaggtccctgtcgtttgtctggacctgtacccaaccacggactatacagttaacgtcacacttttgcgctcccccaagcggcacagtgttcagataaccatcgcaactcctccagccgtaaaacagacaatctcaaatatcagtggcttcaacgaaacctgcctcaggtggagaagcatcaagactgctgacatggaggagatgtaccttttccatatctggggccaaagatggtatcagaaggagttcgctcaggaaatgacattcaatatctccagttcatccagagaccccgaagtgtgtttggacctgcgtcccggaactaattataatgtttcacttagagcgctctcaagtgagctgccggtggtaataagtctgactacacaaatcacagagcctcctctgcctgaggtcgagtttttcaccgtgcatcgaggcccgcttccccggctcaggctcagaaaagctaaggaaaagaatgggcccatctcctcatatcaggtgctcgttctgcccttggcccttcagtctactttctcatgtgattcagagggggccagttctttcttcagtaacgcttccgacgcggatggatatgttgcagccgagttattagcgaaagatgtgcccgacgatgccatggagatacccataggtgacaggctgtattacggtgagtattataatgcccctttgaaacgcggctctgactattgcattatcctgcgaattacttctgagtggaataaagtgcgccgtcactcctgtgctgtatgggcccaggtgaaggactcaagcttgatgctgttgcagatggcgggggttggtctcgggagcctcgcggttgttataatcctgaccttcttgagtttctcagcggtctag

SEQ ID NO: 212383 - DNA, 2244 bp, Artificial Sequence
  derived and/or modified sequence
atgggccggggcccctgggatgctggccccagccggcggctgctgcccctgctgctgctgctgggcctggcccggggagctgctggggcccctggcccagatggcctggatgtgtgtgccacctgccatgaacatgccacctgccagcagcgggagggcaagaagatctgcatctgcaactacggctttgtgggcaatggccgcacccagtgtgtggacaagaatgaatgccagtttggagccaccctggtgtgtggcaaccacaccagctgccacaacaccccaggcggcttctactgcatctgcctggagggctaccgggccaccaacaacaacaagaccttcatccccaatgatggcaccttctgcacagacattgatgaatgtgaggtgtctggcctgtgcagacatggaggccgctgtgtgaacacccacggcagctttgagtgctactgcatggatggctacctgcccagaaatggacctgagcccttccaccccaccacagatgccaccagctgcacagaaattgactgtggcaccccacctgaggtgcctgatggctacatcatcggcaactacaccagcagcctgggcagccaggtgcgctatgcctgccgggagggcttcttctctgtgcctgaagatactgtgagcagctgcaccggcctgggcacctgggagagccccaagctgcactgccaggagatcaactgtggcaaccccccagagatgagacatgccatcctggtgggcaaccacagcagccggctgggcggcgtggcccgctacgtgtgccaggagggctttgagagccctgggggcaagatcacctctgtgtgcacagagaagggcacctggagggagagcaccctgacctgcacagagatcctgaccaagatcaatgatgtgtccctcttcaatgacacctgtgtgcgctggcagatcaacagccgccgcatcaaccccaagatctcctatgtgatcagcatcaagggccagaggctggaccccatggagagcgtgcgggaggagaccgtgaacctgaccacagacagcaggaccccagaggtgtgcctggccctgtacccaggcaccaactacacagtgaacatcagcacagccccaccccggcgctccatgcctgctgtgattggcttccagacagctgaggtggacctgctggaggatgatggcagcttcaacatcagcatcttcaatgagacctgcctgaagctgaacagaagaagcaggaaggtgggcagcgagcacatgtaccagttcaccgtgctgggccagcgctggtacctggccaacttcagccacgccaccagcttcaacttcaccacccgggagcaggtgcctgtggtgtgcctggacctgtaccccaccacagactacacagtgaatgtgaccctgctgcggagccccaagaggcacagcgtgcagatcaccatcgccaccccacctgctgtgaagcagaccatcagcaacatcagcggcttcaatgagacctgcctgcgctggaggagcatcaagacagctgacatggaggagatgtacctgttccacatctggggccagcgctggtaccagaaggagtttgcccaggagatgaccttcaacatcagcagcagcagccgggaccctgaggtgtgcctggacctgcggcccggcaccaactacaacgtgtccctgcgggccctgagcagcgagctgcctgtggtgatcagcctgaccacccagatcacagagccccccctgcctgaggtggagttcttcaccgtgcaccggggccccctgccccggctgcggctgaggaaggccaaggagaagaatggccccatcagcagctaccaggtgctggtgctgcccctggccctgcagagcaccttcagctgtgacagcgagggcgccagcagcttcttcagcaatgccagtgatgctgatggctacgtggccgctgagctgctggccaaggatgtgcctgatgatgccatggagatccccatcggggaccggctgtactatggagagtactacaatgcccccctgaagaggggcagtgactactgcatcatcctgcgcatcaccagcgagtggaacaaggtgagaagacacagctgtgctgtgtgggcccaggtgaaggacagcagcctgatgctgctgcagatggccggcgtgggcctgggcagcctggccgtggtgatcatcctgaccttcctgtccttctctgctgtgtag

SEQ ID NO: 212384 - DNA, 2244 bp, Artificial Sequence
  derived and/or modified sequence
atgggccggggcccctgggacgccggccccagccggcggctgctgccccttctcctgctgcttgggctggcacgaggtgcagctggagcccccggcccagacgggttagacgtttgcgccacctgtcacgagcacgctacatgtcagcagcgggaaggcaagaaaatctgtatctgtaactatggctttgtgggaaacggacgaactcaatgcgtcgacaagaacgaatgtcagtttggtgcaacactggtctgtggaaatcatacatcttgccacaacacccccggggggttctactgcatatgcctcgagggttatcgcgcaaccaacaataacaaaaccttcattccaaacgatggcaccttttgtacagatatagacgagtgcgaagtgtccggtttgtgtcgtcatggtggacgctgcgtcaacacgcacggaagctttgaatgttattgtatggatggttacttgccccggaatgggccggagccatttcaccctacaacagacgctacttcttgcacagagattgactgcggaacccctcctgaggtcccagatgggtacataatcgggaactatacatcctcgctggggtcacaagttcggtatgcctgtcgagaaggtttcttcagcgtgcccgaggatacagtgtcaagctgcacaggactgggtacgtgggagtcacccaaactccattgtcaggagattaactgtggaaatccaccagagatgcgtcatgcaatactcgtgggaaatcattcttctcggctcggcggcgtggcccggtatgtgtgtcaggaaggatttgagagccctggcggaaaaattacaagtgtgtgcaccgagaaagggacatggcgggaatccactcttacctgtactgaaattttaacaaaaatcaacgatgtatccctgtttaatgacacatgcgtgcgatggcagatcaactcgagacggatcaaccccaagatcagctatgtgatctcaattaaggggcagaggcttgatcccatggaaagcgttagggaggagacagtgaacctgaccactgatagtcgcacgcctgaagtctgcctcgccctgtatcctgggacaaactatacggtgaacatcagtactgcaccaccccggaggagtatgcctgcagtgattggattccagacagccgaggtggatctgctggaggacgatgggtcttttaatatttcaatcttcaacgaaacctgcctaaagctgaaccgtaggtcaagaaaagtgggaagcgagcacatgtatcagttcactgtgctaggacaaagatggtatctggcaaacttttcgcatgccacttcttttaactttacgacaagagagcaggtacctgtggtctgcctggacctgtaccccactacagactacacagttaacgtgaccctgctgaggagtccaaagcggcacagcgtgcaaatcactattgccacaccaccggccgtaaaacaaactatctccaatataagcggcttcaatgagacatgccttagatggcgctctatcaagactgcggacatggaggagatgtacctgtttcacatttgggggcagcggtggtaccagaaagaatttgctcaggagatgacatttaatatttcatcaagcagtagggaccccgaggtgtgcctggatctcagacctgggacaaactacaacgtgtccttgagagctttgtcgtcagagctgcccgttgtcatatctctgacaacgcaaatcaccgagccccccctgccagaggtggagttctttacggtacaccgcggccccctcccaaggctccgcctgcgcaaggcaaaagaaaaaaatggccccattagttcttaccaggtgcttgtcctgcccttagcacttcaatctacattcagctgtgactctgagggtgcctcgtcttttttcagtaatgccagtgacgcagacgggtacgtcgctgctgagctgcttgccaaagacgttccagatgacgccatggagatacctatcggtgaccgcttgtattacggagaatattacaacgccccccttaagcgaggctctgactattgtatcatcctacgaatcacctcagagtggaataaggtgcgccggcactcctgtgccgtgtgggcccaggtaaaagacagcagtttgatgctcctgcagatggctggagtaggcctggggtcgctagcagtggtgatcatattgactttccttagtttcagcgccgtttag

SEQ ID NO: 212385 - DNA, 2244 bp, Artificial Sequence
  derived and/or modified sequence
atgggcaggggtccctgggatgccggacccagcagacgtctgctcccccttctgctgttactggggttggccaggggtgctgctggcgcacccggtcctgacggccttgatgtatgtgctacctgccatgagcacgccacgtgccagcaaagggagggcaaaaagatctgcatttgtaactacggatttgtcggtaatggcagaactcagtgtgttgacaagaatgagtgtcaatttggagcgactctggtttgcggcaaccacactagctgccacaatacacccggtggtttctattgcatctgtttggaggggtaccgcgcaactaataacaacaagacatttataccaaatgatggcacattctgtactgacatcgacgagtgcgaagtgtctggcttatgtaggcacgggggacggtgcgtaaatacccacggttctttcgagtgttattgtatggatgggtatcttcctcgcaacggccctgagcccttccaccccactaccgatgccacctcctgcacagaaattgactgcggcacaccgcctgaggtccccgacgggtatattattggcaactacacctcatcccttgggtcccaggtccgatatgcgtgccgggagggcttcttttcagttcctgaggataccgtctctagctgcaccggccttggtacttgggaatcacctaaattacattgtcaggagataaattgcggtaatccccctgagatgcgtcatgccattctggtgggaaaccatagttcacgcctgggaggtgtagccaggtacgtatgccaggagggttttgaaagccccggagggaaaattaccagcgtgtgcactgagaaaggtacttggcgggaaagtaccttaacatgcacagagatcctcacaaagatcaatgatgtctccctgttcaacgatacctgtgtaagatggcagataaattctagaaggatcaatccaaaaataagctatgtgatctcgatcaagggccaacggcttgatccgatggaatccgtccgcgaagaaacagtcaacctgaccaccgactcccggacccccgaggtttgcctcgctctgtatccaggcacgaattacactgtgaatataagcacagctccacctagaagatccatgcctgccgtgataggatttcagactgccgaggtggatctgttggaagatgatggatcctttaacatctccatattcaatgagacatgtctgaaactgaacagaagatcaaggaaggtgggatccgagcatatgtaccagtttacagtgctcggacagcgctggtaccttgccaactttagccatgcaacttcctttaattttactacgcgggagcaggtgcccgtcgtgtgcctcgatctgtatccaaccacagattatacagttaatgtgacacttttgcgaagtcccaaacgccatagtgtgcagatcactatagccaccccacccgctgtgaaacagaccatttccaatatctccggattcaacgagacatgtctgcgctggcggagtattaagaccgccgatatggaggagatgtatctattccacatttgggggcagcggtggtaccaaaaagaattcgcacaagaaatgacgttcaatattagctccagttctcgggacccagaagtttgtctggacttgcgacctgggactaattataacgtctctttacgcgcactatcaagcgagctgcctgtcgtgattagcctgacaacccagattactgaaccaccccttccggaagtcgagtttttcaccgtgcaccgcggacctctccctcgcctgcgcctccgcaaggcaaaggaaaaaaacggcccaatcagctcttaccaggtgcttgtcctgcccttagctctacagtccaccttctcttgcgacagtgaaggggcatcaagcttcttcagcaacgcatcagatgcggacgggtacgtggccgcagagctcctggctaaggacgtacccgatgatgccatggaaatccctataggagatcgactttactacggagaatactacaatgcacctttaaagagagggagcgattattgtatcatcttacgcattaccagtgagtggaataaggtccgtcgtcatagctgtgcggtgtgggctcaggtgaaggacagcagcctcatgttgctgcagatggctggcgtggggctgggcagtcttgctgttgtgattatcctgacttttctttcattttcggccgtgtag

SEQ ID NO: 212386 - DNA, 3124 bp, Artificial Sequence
  derived and/or modified sequence
gaggaaggacccgcgctctgcggcctcccggggaccccgcagcgccccccgcttccctcggcggcgccggaagccgccggctggtcccctccccgcggcgcctgtagccttatctctgcaccctgagggccccgggaggaggcgcgggcgcgccgggagggaccggcggcggcatgggccgggggccctgggatgcgggcccgtctcgccgcctgctgccgctgttgctgctgctcggcctggcccgcggcgccgcgggagcgccgggccccgacggtttagacgtctgtgccacttgccatgaacatgccacatgccagcaaagagaagggaagaagatctgtatttgcaactatggatttgtagggaacgggaggactcagtgtgttgataaaaatgagtgccagtttggagccactcttgtctgtgggaaccacacatcttgccacaacacccccgggggcttctattgcatttgcctggaaggatatcgagccacaaacaacaacaagacattcattcccaacgatggcaccttttgtacagacatagatgagtgtgaagtttctggcctgtgcaggcatggagggcgatgcgtgaacactcatgggagctttgaatgctactgtatggatggatacttgccaaggaatggacctgaacctttccacccgaccaccgatgccacatcatgcacagaaatagactgtggtacccctcctgaggttccagatggctatatcataggaaattatacgtctagtctgggcagccaggttcgttatgcttgcagagaaggattcttcagtgttccagaagatacagtttcaagctgcacaggcctgggcacatgggagtccccaaaattacattgccaagagatcaactgtggcaaccctccagaaatgcggcacgccatcttggtaggaaatcacagctccaggctgggcggtgtggctcgctatgtctgtcaagagggctttgagagccctggaggaaagatcacttctgtttgcacagagaaaggcacctggagagaaagtactttaacatgcacagaaattctgacaaagattaatgatgtatcactgtttaatgatacctgtgtgagatggcaaataaactcaagaagaataaaccccaagatctcatatgtgatatccataaaaggacaacggttggaccctatggaatcagttcgtgaggagacagtcaacttgaccacagacagcaggaccccagaagtgtgcctagccctgtacccaggcaccaactacaccgtgaacatctccacagcacctcccaggcgctcgatgccagccgtcatcggtttccagacagctgaagttgatctcttagaagatgatggaagtttcaatatttcaatatttaatgaaacttgtttgaaattgaacaggcgttctaggaaagttggatcagaacacatgtaccaatttaccgttctgggtcagaggtggtatctggctaacttttctcatgcaacatcgtttaacttcacaacgagggaacaagtgcctgtagtgtgtttggatctgtaccctacgactgattatacggtgaatgtgaccctgctgagatctcctaagcggcactcagtgcaaataacaatagcaactcccccagcagtaaaacagaccatcagtaacatttcaggatttaatgaaacctgcttgagatggagaagcatcaagacagctgatatggaggagatgtatttattccacatttggggccagagatggtatcagaaggaatttgcccaggaaatgacctttaatatcagtagcagcagccgagatcccgaggtgtgcttggacctacgtccgggtaccaactacaatgtcagtctccgggctctgtcttcggaacttcctgtggtcatctccctgacaacccagataacagagcctcccctcccggaagtagaattttttacggtgcacagaggacctctaccacgcctcagactgaggaaagccaaggagaaaaatggaccaatcagttcatatcaggtgttagtgcttcccctggccctccaaagcacattttcttgtgattctgaaggcgcttcctccttctttagcaacgcctctgatgctgatggatacgtggctgcagaactactggccaaagatgttccagatgatgccatggagatacctataggagacaggctgtactatggggaatattataatgcacccttgaaaagagggagtgattactgcattatattacgaatcacaagtgaatggaataaggtgagaagacactcctgtgcagtttgggctcaggtgaaagattcgtcactcatgctgctgcagatggcgggtgttggactgggttccctggctgttgtgatcattctcacattcctctccttctcagcggtgtgatggcagatggacactgagtggggaggatgcactgctgctgggcaggtgttctggcagcttctcaggtgcccgcacagaggctccgtgtgacttccgtccagggagcatgtgggcctgcaactttctccattcccagctgggccccattcctggatttaagatggtggctatccctgaggagtcaccataaggagaaaactcaggaattctgagtcttccctgctacaggaccagttctgtgcaatgaacttgagactcctgatgtacactgtgatattgaccgaaggctacatacagatctgtgaatcttggctgggacttcctctgagtgatgcctgagggtcagctcctctagacattgactgcaagagaatctctgcaacctcctatataaaagcatttctgttaattcattcagaatccattctttacaatatgcagtgagatgggcttaagtttgggctagagtttgactttatgaaggaggtcattgaaaaagagaacagtgacgtaggcaaatgtttcaagcactttagaaacagtacttttcctataattagttgatatactaatgagaaaatatactagcctggccatgccaataagtttcctgctgtgtctgttaggcagcattgctttgatgcaatttctattgtcctatatattcaaaagtaatgtctacattccagtaaaaatatcccgtaatt

SEQ ID NO: 212387 - protein, 314 aa, Artificial Sequence
  derived and/or modified sequence
MQNVINTVKGKALEVAEYLTPVLKESKFKETGVITPEEFVAAGDHLVHHCPTWQWATGEELKVKAYLPTGKQFLVTKNVPCYKRCKQMEYSDELEAIIEEDDGDGGWVDTYHNTGITGITEAVKEITLENKDNIRLQDCSALCEEEEDEDEGEAADMEEYEESGLLETDEATLDTRKIVEACKAKTDAGGEDAILQTRTYDLYITYDKYYQTPRLWLFGYDEQRQPLTVEHMYEDISQDHVKKTVTIENHPHLPPPPMCSVHPCRHAEVMKKIIETVAEGGGELGVHMYLLIFLKFVQAVIPTIEYDYTRHFTM

SEQ ID NO: 212388 - DNA, 945 bp, Artificial Sequence
  derived and/or modified sequence
atgcaaaatgtaatcaatacagtgaaagggaaagccctggaagttgccgaatacctaactccggtattaaaggagtcaaagttcaaggagaccggggtgatcacaccggaggaattcgtcgcagccggtgatcacctggtacatcattgtccaacttggcagtgggcaaccggcgaagagttgaaagtcaaagcctatctgcccaccggtaagcagtttcttgtgaccaaaaacgtgccgtgctacaagaggtgtaagcagatggaatactctgacgaactcgaggctattatagaagaggacgatggggacggaggatgggtggatacttaccacaatactggtataacagggatcacagaagcggttaaggaaatcactttagagaacaaggacaacattcgcctgcaggactgcagtgccctctgcgaagaagaggaggacgaggacgaaggtgaggccgcggacatggaggagtatgaggagtcaggccttctcgaaacagacgaagccactctggatactaggaaaatcgtcgaggcctgcaaagcaaagacagatgcaggcggggaggatgccatattgcaaacccgcacttacgacctgtacataacatacgataagtattaccaaactcctcgcctgtggctgttcggctacgatgagcagcggcagccacttacagttgaacacatgtacgaagacattagccaagaccatgtgaagaagacagtcaccattgagaaccatccgcatctgcccccccccccgatgtgtagcgtccacccatgtcggcacgccgaggtcatgaagaaaatcatagagacagtggcagagggcggcggcgagctgggtgtccatatgtatctgctcatcttcctgaagttcgtgcaggctgttatacctactattgaatacgattacacaaggcacttcactatgtag

SEQ ID NO: 212389 - DNA, 945 bp, Artificial Sequence
  derived and/or modified sequence
atgcagaatgtcatcaacacagtgaagggcaaggccctggaggtggccgagtacctgacccctgtgctgaaggagagcaagttcaaggagactggagtcatcaccccagaggagtttgtggccgccggggaccacctggtgcaccactgccccacctggcagtgggccactggagaggagctgaaggtgaaggcctacctgcccaccgggaagcagttcctggtgaccaagaatgtgccctgctacaagcgctgcaagcagatggagtacagtgatgagctggaggccatcatcgaggaggatgatggagatggcggctgggtggacacctaccacaacacaggcatcaccggcatcacagaggccgtgaaggagatcaccctggagaacaaggacaacatccggctgcaggactgcagcgccctgtgtgaggaggaggaggatgaagatgaaggagaggccgctgacatggaggagtatgaggagagcggcctgctggagacagatgaggccaccctggacaccaggaagatcgtggaggcctgcaaggccaagacagatgctggaggagaagatgccatcctgcagaccaggacctatgacctgtacatcacctatgacaagtactaccagaccccccggctgtggctgtttggctatgatgagcagaggcagcccctgactgtggagcacatgtatgaggacatcagccaggaccacgtgaagaagacagtgaccatcgagaaccacccccacctgcccccaccacccatgtgcagcgtgcacccctgcagacatgctgaggtgatgaagaagatcatcgagaccgtggccgagggcggcggggagctgggcgtgcacatgtacctgctgatcttcctgaagtttgtgcaggccgtcatccccaccatcgagtatgactacaccaggcacttcaccatgtag

SEQ ID NO: 212390 - DNA, 945 bp, Artificial Sequence
  derived and/or modified sequence
atgcagaacgtgatcaacaccgtgaagggcaaggccctggaggtggctgagtaccttacacccgtcctcaaggaatcaaagtttaaggaaaccggtgttatcaccccagaagagttcgtggcagccggggatcacttggtccatcattgtcctacgtggcaatgggccaccggcgaggaactcaaggtgaaagcatacctgcccacgggtaagcagttcttggttaccaaaaatgttccctgttacaagagatgcaagcagatggaatactcagacgagcttgaagccattattgaagaggacgatggagatggcggctgggtcgacacgtaccataacaccggtatcactggcatcacggaagctgtgaaggagattacacttgagaataaagataatatcaggctgcaggattgttccgcactctgcgaggaggaggaggacgaagacgagggtgaggcagccgatatggaggagtacgaagaatcaggactgcttgagaccgacgaggcaaccctggacacaaggaaaatagtggaagcctgcaaggcaaaaactgacgccggcggagaggatgctatactgcagacacgtacctatgatctttatataacatatgacaagtattaccagacaccgcgcctttggctgtttggatatgacgaacaacgacagcctctgactgttgagcacatgtacgaggatatcagtcaagaccacgtgaagaaaacagtgacaatcgagaatcaccctcatttgccaccgcccccgatgtgttctgtccacccctgcagacatgcagaagttatgaagaaaataattgaaactgtagccgagggaggaggagaactgggtgtacacatgtacctacttatatttctgaagtttgtgcaggccgtgatccccaccatagaatatgactacaccaggcactttacaatgtag

SEQ ID NO: 212391 - DNA, 945 bp, Artificial Sequence
  derived and/or modified sequence
atgcagaatgtgattaataccgtcaagggtaaagcccttgaagttgctgagtacctgacacccgtcttaaaagagtccaaattcaaggaaacgggagtcattacccccgaggagttcgttgcagccggtgatcacttggtgcaccactgtccaacctggcagtgggccacaggggaagaactgaaggtcaaggcctaccttcctaccgggaagcagttccttgttacaaaaaacgtcccctgctataagcggtgcaagcaaatggagtacagtgacgagctggaggccatcattgaggaggacgacggggacggaggctgggtggacacatatcacaatactggtatcactggaataactgaagcagttaaagagattacactcgagaataaagacaatatccgactccaggattgctccgcactgtgtgaagaggaagaggatgaagatgaaggagaagccgctgatatggaggaatacgaggagagcggccttctcgaaactgacgaggcgaccttggacacgagaaagattgtcgaggcttgcaaagcgaaaaccgatgccggtggcgaagacgcgatcttacaaacaaggacttatgacctctacatcacatacgataaatactaccagactccgcgactgtggctgttcggatacgatgagcaacgccaaccactcaccgtcgaacacatgtacgaggacatcagccaggaccatgtgaaaaagactgtgaccatagaaaatcacccacacttgcctccaccacctatgtgttctgtacacccctgcaggcatgctgaagttatgaaaaagataatcgagactgttgccgagggcggaggggagctcggcgtgcacatgtaccttctaatctttctgaagttcgtacaagccgttatacccactatagagtatgactatactcgacattttaccatgtag

SEQ ID NO: 212392 - DNA, 1570 bp, Artificial Sequence
  derived and/or modified sequence
tagtgtcacgtgaggccccggtggcggcgcagctacggcaagagagtgagaaggaagggaagccggaaggggcgcgagtgaagcaaagcgaggacagacagctcgcagagggcgaggggtgcgtgtgcgtccgcttctcacctcaggtctcccttcggccccgctgccctccctcgcggctgggtgacagctgggtccggtccgtcgcgggctgcctggggtgcgaggatcgcgcaccccgtcttcgcgcgctgtgcctgccgccccgccccctcgtcccgcccgtcccgtcgcgtcgcgtcccgtcccctcgggtgctgccagccgggtgctgatgcgagtcggtggcagcgaggacattttctgactccctggcccctgacacggctgcactttccatcccgtcgcggggccggccgctactccggccccaggatgcagaatgtgattaatactgtgaagggaaaggcactggaagtggctgagtacctgaccccggtcctcaaggaatcaaagtttaaggaaacaggtgtaattaccccagaagagtttgtggcagctggagatcacctagtccaccactgtccaacatggcaatgggctacaggggaagaattgaaagtgaaggcatacctaccaacaggcaaacaatttttggtaaccaaaaatgtgccgtgctataagcggtgcaaacagatggaatattcagatgaattggaagctatcattgaagaagatgatggtgatggcggatgggtagatacatatcacaacacaggtattacaggaataacggaagccgttaaagagatcacactggaaaataaggacaatataaggcttcaagattgctcagcactatgtgaagaggaagaagatgaagatgaaggagaagctgcagatatggaagaatatgaagagagtggattgttggaaacagatgaggctaccctagatacaaggaaaatagtagaagcttgtaaagccaaaactgatgctggcggtgaagatgctattttgcaaaccagaacttatgacctttacatcacttatgataaatattaccagactccacgattatggttgtttggctatgatgagcaacggcagcctttaacagttgagcacatgtatgaagacatcagtcaggatcatgtgaagaaaacagtgaccattgaaaatcaccctcatctgccaccacctcccatgtgttcagttcacccatgcaggcatgctgaggtgatgaagaaaatcattgagactgttgcagaaggagggggagaacttggagttcatatgtatcttcttattttcttgaaatttgtacaagctgtcattccaacaatagaatatgactacacaagacacttcacaatgtaatgaagagagcataaaatctatcctaattattggttctgatttttaaagaattaacccatagatgtgaccattgaccatattcatcaatatatacagtttctctaataagggacttatatgtttatgcattaaataaaaatatgttccactaccagccttacttgtttaataaaaatcagtgcaaagagag

SEQ ID NO: 212393 - DNA, 945 bp, Artificial Sequence
  derived and/or modified sequence
atgcagaacgtgatcaacaccgtgaagggcaaggccctggaggtggccgagtacctgacccccgtgctgaaggagagcaagttcaaggagaccggcgtgatcacccccgaggagttcgtggccgccggcgaccacctggtgcaccactgccccacctggcagtgggccaccggcgaggagctgaaggtgaaggcctacctgcccaccggcaagcagttcctggtgaccaagaacgtgccctgctacaagagatgcaagcagatggagtacagcgacgagctggaggccatcatcgaggaggacgacggcgacggcggctgggtggacacctaccacaacaccggcatcaccggcatcaccgaggccgtgaaggagatcaccctggagaacaaggacaacatcagactgcaggactgcagcgccctgtgcgaggaggaggaggacgaggacgagggcgaggccgccgacatggaggagtacgaggagagcggcctgctggagaccgacgaggccaccctggacaccagaaagatcgtggaggcctgcaaggccaagaccgacgccggcggcgaggacgccatcctgcagaccagaacctacgacctgtacatcacctacgacaagtactaccagacccccagactgtggctgttcggctacgacgagcagagacagcccctgaccgtggagcacatgtacgaggacatcagccaggaccacgtgaagaagaccgtgaccatcgagaaccacccccacctgccccccccccccatgtgcagcgtgcacccctgcagacacgccgaggtgatgaagaagatcatcgagaccgtggccgagggcggcggcgagctgggcgtgcacatgtacctgctgatcttcctgaagttcgtgcaggccgtgatccccaccatcgagtacgactacaccagacacttcaccatgtag

SEQ ID NO: 212394 - protein, 1249 aa, Artificial Sequence
  derived and/or modified sequence
MSVKEGAQRKWAALKEKLGPQDSDPTEANLESADPELCIRLLQMPSVVNYSGLRKRLEGSDGGWMVQFLEQSGLDLLLEALARLSGRGVARISDALLQLTCVSCVRAVMNSRQGIEYILSNQGYVRQLSQALDTSNVMVKKQVFELLAALCIYSPEGHVLTLDALDHYKTVCSQQYRFSIVMNELSGSDNVPYVVTLLSVINAVILGPEDLRARTQLRNEFIGLQLLDVLARLRDLEDADLLIQLEAFEEAKAEDEEELLRVSGGVDMSSHQEVFASLFHKVSCSPVSAQLLSVLQGLLHLEPTLRSSQLLWEALESLVNRAVLLASDAQECTLEEVVERLLSVKGRPRPSPLVKAHKSVQANLDQSQRGSSPQNTTTPKPSVEGQQPAAAAACEPVDHAQSESILKVSQPRALEQQASTPPPPPPPPLLPGSSAEPPPPPPPPPLPSVGAKALPTAPPPPPLPGLGAMAPPAPPLPPPLPGSCEFLPPPPPPLPGLGCPPPPPPLLPGMGWGPPPPPPPLLPCTCSPPVAGGMEEVIVAQVDHGLGSAWVPSHRRVNPPTLRMKKLNWQKLPSNVAREHNSMWASLSSPDAEAVEPDFSSIERLFSFPAAKPKEPTMVAPRARKEPKEITFLDAKKSLNLNIFLKQFKCSNEEVAAMIRAGDTTKFDVEVLKQLLKLLPEKHEIENLRAFTEERAKLASADHFYLLLLAIPCYQLRIECMLLCEGAAAVLDMVRPKAQLVLAACESLLTSRQLPIFCQLILRIGNFLNYGSHTGDADGFKISTLLKLTETKSQQNRVTLLHHVLEEAEKSHPDLLQLPRDLEQPSQAAGINLEIIRSEASSNLKKLLETERKVSASVAEVQEQYTERLQASISAFRALDELFEAIEQKQRELADYLCEDAQQLSLEDTFSTMKAFRDLFLRALKENKDRKEQAAKAERRKQQLAEEEARRPRGEDGKPVRKGPGKQEEVCVIDALLADIRKGFQLRKTARGRGDTDGGSKAASMDPPRATEPVATSNPAGDPVGSTRCPASEPGLDATTASESRGWDLVDAVTPGPQPTLEQLEEGGPRPLERRSSWYVDASDVLTTEDPQCPQPLEGAWPVTLGDAQALKPLKFSSNQPPAAGSSRQDAKDPTSLLGVLQAEADSTSEGLEDAVHSRGARPPAAGPGGDEDEDEEDTAPESALDTSLDKSFSEDAVTDSSGSGTLPRARGRASKGTGKRRKKRPSRSQEEVPPDSDDNKTKKLCVIQ

SEQ ID NO: 212395 - protein, 234 aa, Artificial Sequence
  derived and/or modified sequence
MSVKEGAQRKWAALKEKLGPQDSDPTEANLESADPELCIRLLQMPSVVNYSGLRKRLEGSDGGWMVQFLEQSGLDLLLEALARLSGRGVARISDALLQLTCVSCVRAVMNSRQGIEYILSNQGYVRQLSQALDTSNVMVKKQVFELLAALCIYSPEGHVLTLDALDHYKTVCSQQYRFSIVMNELSGSDNVPYVVTLLSVINAVILGPEDLRARTQLRNEFIGLQLLDVLARLR

SEQ ID NO: 212396 - protein, 329 aa, Artificial Sequence
  derived and/or modified sequence
MSAAGLLAPAPAQAGAPPAPEYYPEEDEELESAEDDERSCRGRESDEDTEDASETDLAKHDEEDYVEMKEQMYQDKLASLKRQLQQLQEGTLQEYQKRMKKLDQQYKERIRNADTLLLQAQTEQVERNYIKEKKAAVKEFEDKKVELKENLIAELEEKKKMIENEKLTMELTGDSMEVKPIMTRKLRRRPNDPVPIPDKRRKPAPAQLNYLLTDEQIMEDLRTLNKLKSPKRPASPSSPEHLPATPAESPAQRFEARIEDGKLYYDKRWYHKSQAIYLESKDNQKLSCVISSVGANEIWVRKTSDSTKMRIYLGQLQRGLFVIRRRSAA

SEQ ID NO: 212397 - protein, 328 aa, Artificial Sequence
  derived and/or modified sequence
MSAAGLLAPAPAQAGAPPAPEYYPEEDEELESAEDDERSCRGRESDEDTEDASETDLAKHDEEDYVEMKEQMYQDKLASLKRQLQQLQEGTLQEYQKRMKKLDQQYKERIRNAELFLQLETEQVERNYIKEKKAAVKEFEDKKVELKENLIAELEEKKKMIENEKLTMELTGDSMEVKPIMTRKLRRRPNDPVPIPDKRRKPAPAQLNYLLTDEQIMEDLRTLNKLKSPKRPASPSSPEHLPATPAESPAQRFEARIEDGKLYYDKRWYHKSQAIYLESKDNQKLSCVISSVGANEIWVRKTSDSTKMRIYLGQLQRGLFVIRRRSAA

SEQ ID NO: 212398 - DNA, 990 bp, Artificial Sequence
  derived and/or modified sequence
atgtccgcggctggactgctggctcctgcgccggcccaggcaggcgcaccacccgcccctgagtattatccggaggaggatgaggagctggagtcagctgaggacgatgagcgatcttgcagggggcgagagagcgacgaggatactgaggatgcgtccgaaaccgatctagccaaacacgacgaagaagattatgtcgaaatgaaggagcagatgtatcaagataaactggcatcactgaagcgccagctgcaacaattgcaggagggcactctgcaagagtatcagaagcgcatgaagaagttggatcagcagtataaggagagaatcaggaatgccgataccttgttattgcaggcacagactgagcaagtagagagaaactatataaaagagaaaaaggcagctgtcaaggaatttgaagacaagaaagttgaactcaaggaaaatctgatcgcagaactggaggagaagaagaaaatgatcgagaacgagaagctgactatggaactcaccggggactccatggaggttaagccaatcatgaccaggaaactacgcaggcgcccaaacgatcctgtgccaatccctgacaagaggagaaaacccgcaccggctcagttgaattatttactaacggacgaacagatcatggaggacctccgaacgttgaataagttgaaatccccaaaacggccagctagcccatcaagtcctgaacacttaccggccactccggctgagagccctgcacagagattcgaggctaggatcgaggatggcaagctgtactacgacaagagatggtatcataagtctcaagccatctatcttgagagcaaggataaccagaagctttcttgtgtaatcagcagcgtaggagcaaatgagatctgggtccgaaagacgtctgacagtacaaaaatgcggatctacctgggccagctgcaaaggggactctttgtgattcgcagaagatctgcagcatag

SEQ ID NO: 212399 - DNA, 987 bp, Artificial Sequence
  derived and/or modified sequence
atgtctgccgcaggactactcgcgcctgcccctgcacaagcgggcgctccgcccgctcccgagtactaccctgaggaggacgaggagctggagtcagctgaggacgacgagcggtcctgtagaggacgggaatcggacgaagacaccgaggacgcatcagaaacagacctggctaagcatgacgaggaagactacgtcgaaatgaaagagcagatgtaccaggacaagctagctagtttgaagaggcaactgcagcagttgcaggagggaactctacaggagtatcagaagcgcatgaaaaaactcgaccagcagtataaggagcgcattcgcaatgctgagctgtttctccagctggagaccgagcaggtagaacggaactacataaaagaaaagaaagccgctgtcaaggagtttgaagataagaaggttgagcttaaagaaaacctgattgccgagctggaggaaaaaaaaaaaatgattgaaaatgaaaagcttaccatggagctgacaggcgacagcatggaagtgaagcccattatgaccaggaagctccgccgcagacctaacgatccagttcctatcccagataagcggcggaaacccgctcccgcccagcttaattatcttcttaccgacgagcagatcatggaggatctgcggaccctgaataaattgaaatcacctaagagaccggccagtcccagctctcccgagcacctacccgcaactcctgctgaatctccagctcagcgtttcgaggctaggatagaggatgggaagctgtattacgataaacgatggtaccataagtcccaagccatttacctagaaagtaaagataatcagaaactcagctgcgtgatcagtagcgttggagccaacgagatttgggttcgcaagacatcagacagtaccaagatgagaatttatctcggccagctgcagcgggggttgttcgtcatcagacggaggagcgccgcatag

SEQ ID NO: 212400 - DNA, 990 bp, Artificial Sequence
  derived and/or modified sequence
atgtctgctgctggcctgctggccccagccccagcccaggccggggcccccccagcccctgagtactacccagaggaggatgaggagctggagagcgcagaagatgatgagaggagctgccggggccgggagagtgatgaggacacagaagatgccagcgagacagacctggccaagcatgatgaagaagattatgtggagatgaaggagcagatgtaccaggacaagctggccagcctgaagaggcagctgcagcagctgcaggagggcaccctgcaggagtaccagaagaggatgaagaagctggaccagcagtacaaggagcgcatcagaaatgctgacaccctgctgctgcaggcccagacagagcaggtggagaggaactacatcaaggagaagaaggctgctgtgaaggagtttgaggacaagaaggtggagctgaaggagaacctgattgctgagctggaggagaagaagaagatgattgaaaatgagaagctgaccatggagctgaccggggacagcatggaggtgaagcccatcatgaccaggaagctgcggcggcggcccaatgaccctgtgcccatcccagacaagaggaggaagccagccccagcccagctgaactacctgctgacagatgagcagatcatggaggacctgcggaccctgaacaagctgaagagccccaagaggcctgccagccccagcagccctgagcacctgcctgccaccccagctgagagccctgcccagagatttgaggccagaattgaagatggcaagctgtactatgacaagcgctggtaccacaagagccaggccatctacctggagagcaaggacaaccagaagctgagctgtgtgatcagctctgtgggcgccaatgagatctgggtgaggaagaccagtgacagcaccaagatgaggatctacctgggccagctgcagaggggcctgtttgtgatcagaagaagatctgctgcctag

SEQ ID NO: 212401 - DNA, 987 bp, Artificial Sequence
  derived and/or modified sequence
atgtctgctgctggcctgctggccccagccccagcccaggccggggcccccccagcccctgagtactacccagaggaggatgaggagctggagagcgcagaagatgatgagaggagctgccggggccgggagagtgatgaggacacagaagatgccagcgagacagacctggccaagcatgatgaagaagattatgtggagatgaaggagcagatgtaccaggacaagctggccagcctgaagaggcagctgcagcagctgcaggagggcaccctgcaggagtaccagaagaggatgaagaagctggaccagcagtacaaggagcgcatcagaaatgctgagctgttcctgcagctggagacagagcaggtggagaggaactacatcaaggagaagaaggctgctgtgaaggagtttgaggacaagaaggtggagctgaaggagaacctgattgctgagctggaggagaagaagaagatgattgaaaatgagaagctgaccatggagctgactggagacagcatggaggtgaagcccatcatgaccaggaagctgcggcggcggcccaatgaccctgtgcccatcccagacaagaggaggaagccagccccagcccagctgaactacctgctgacagatgagcagatcatggaggacctgcggaccctgaacaagctgaagagccccaagaggcctgccagccccagcagccctgagcacctgcctgccaccccagctgagagccctgcccagagatttgaggccagaattgaagatggcaagctgtactatgacaagcgctggtaccacaagagccaggccatctacctggagagcaaggacaaccagaagctgagctgtgtgatcagctctgtgggcgccaatgagatctgggtgaggaagaccagtgacagcaccaagatgaggatctacctgggccagctgcagaggggcctcttcgtcatcagaagaagatctgctgcctag

SEQ ID NO: 212402 - DNA, 990 bp, Artificial Sequence
  derived and/or modified sequence
atgagcgccgccggcctgctggcccccgcccccgcccaggccggcgcaccaccagccccggaatattaccctgaagaagacgaggaattagaaagtgcagaggatgatgagcgctcctgtcgtggcagagaatcggacgaggacacagaagatgcctccgagaccgacctcgccaagcatgacgaagaagactacgttgagatgaaggaacagatgtatcaagacaaactagcttcactaaaaaggcaattacagcagctgcaggagggcaccttgcaggagtaccaaaagagaatgaaaaagctggatcagcagtataaagaacgcatacggaatgccgataccctcctgctgcaggcccagaccgaacaggtggaacgcaactacattaaggagaagaaggccgcagtcaaagagtttgaggacaaaaaagtggagcttaaggagaaccttatcgccgaactcgaggaaaaaaagaaaatgattgagaacgagaagctcaccatggagctcaccggcgacagcatggaagtgaagcctatcatgacacgcaagctgaggcgccggccaaacgatcctgtgccgatccccgataagcgtcggaagcctgcaccggcgcagttgaactacctgctgaccgatgagcagatcatggaagacctacggaccctcaataaactgaagtctccaaaaagaccggctagtcctagtagcccagaacatttgccggccacgccggcagaaagtccagcgcagagatttgaagccagaatcgaggacggcaagttatattatgataagcgctggtaccataaaagccaggcaatatatcttgagagtaaggataaccaaaagttgagctgcgtgattagtagtgtgggagccaacgagatctgggttcggaaaactagtgattcaaccaaaatgcgtatctacctgggccagctgcagcgcggcttgtttgtgatccggcggcgctcagccgcatag

SEQ ID NO: 212403 - DNA, 987 bp, Artificial Sequence
  derived and/or modified sequence
atgagcgccgccggcctgctggcccccgcccccgcccaggccggcgcacctcccgcccccgagtattatcccgaagaagatgaagagctcgagtcagctgaggacgatgagcggagttgtagaggtagagaatccgatgaagatactgaagatgcaagcgagacagacttagcaaagcacgacgaagaggactatgtggaaatgaaagagcagatgtaccaggataaactggcttctctgaaacgacagctccagcaactgcaggagggcacactccaagagtatcaaaagaggatgaagaagctcgatcagcagtacaaggaaaggattcggaacgccgagttatttttgcagctggagaccgagcaggtcgaaaggaactatattaaggaaaagaaggctgctgtaaaggagttcgaggataagaaagttgaactgaaagagaacctcatagccgaattggaggagaaaaagaagatgattgagaacgagaaattgactatggaactgacaggggactcaatggaagtgaaaccaattatgacacgcaaactcagacgcagacccaatgacccagttcctattcccgataaaaggagaaagcccgcccccgcccagctgaactacctcctgacagatgagcagattatggaggacctgcggacactcaataagctgaaatcccccaaacggccagctagtcctagctcaccggaacatctgccggctactcccgctgaatcacctgcacagcggttcgaggcccgcatcgaggatggcaaactttactacgataaaaggtggtaccacaaatcacaggccatctatttagagagtaaggataaccagaagctcagttgcgtgatatccagcgtcggtgctaatgagatttgggtccggaaaacgtccgactcaacaaaaatgaggatttacctgggacaactgcagagaggactgttcgtgatccgccgcagaagcgcagcttag

SEQ ID NO: 212404 - DNA, 990 bp, Artificial Sequence
  derived and/or modified sequence
atgtcagctgcagggctgctggccccagcgcctgctcaggcgggagcccctcccgctcccgaatattacccggaagaagatgaggaactggaaagcgcagaggacgacgagcggagttgtcggggacgagagtcagacgaagacactgaggacgcgtccgaaactgacctcgccaaacacgacgaggaggactacgtggagatgaaggagcagatgtatcaggacaagctggccagtctcaagagacaacttcaacaactgcaagagggcaccctgcaggaataccaaaagaggatgaagaaattagaccagcagtacaaagaacggatccgaaatgctgacaccctgttgctgcaggcacagacagagcaagttgagcggaattacataaaggagaaaaaggcagccgtgaaagagttcgaggataagaaggttgagctgaaagagaacctcattgcagaactggaagaaaagaagaagatgatcgagaacgaaaaactcacaatggaattaaccggggacagtatggaagttaagcccattatgacacgcaagttaagaaggcgccctaatgatccagtgcctatccccgacaagaggaggaaaccagcacccgcacagttaaattacctcctcactgatgagcagattatggaggacctcagaactctcaacaaactcaagagcccaaaacgacccgcatcacccagcagccctgaacacctgcctgccacccctgctgagtctcccgcacagcgcttcgaagctcgcatcgaagatgggaaactgtactatgacaaacggtggtatcacaagagccaggcaatttatctggagagcaaggacaaccaaaaattatcatgcgtgatctccagcgttggagcaaatgaaatctgggtccgaaaaaccagcgatagtaccaaaatgcgcatctaccttggccaattgcagagggggttgtttgtgattaggcgcagatcagccgcttag

SEQ ID NO: 212405 - DNA, 987 bp, Artificial Sequence
  derived and/or modified sequence
atgtccgcagcaggacttctggcaccagcgcctgcacaagctggagctccgcctgcgcctgagtattatcctgaggaggatgaagagttagaaagtgccgaagatgacgaacgtagctgccgtgggagagagagtgacgaggacacagaggatgcaagcgaaaccgacctggcaaagcatgatgaagaggactacgtagagatgaaggaacaaatgtaccaagacaagctggcatctctgaaacgccagctccaacaactccaggaaggcactctgcaggaataccagaagaggatgaagaaactggatcaacagtacaaggaacgaataaggaacgccgagctttttcttcagcttgaaacagagcaggtggagcggaattatatcaaggaaaaaaaggccgcagtgaaggagttcgaagacaaaaaagtggaactgaaagagaatctgattgcagaactggaagaaaagaagaagatgatcgagaacgagaaacttacaatggagctgacaggcgacagcatggaggtaaagcccattatgacacggaaacttcggcgacgccctaatgacccagtgccaattcccgacaagagacggaagccagctcccgctcagttgaactacctgttaaccgatgagcaaatcatggaagaccttaggactctcaacaagctgaaatcccccaaaagacctgcttctccatcctccccagagcacctgcctgccactccagccgagtcacccgctcagaggtttgaggcacgcatagaagacggtaaactgtattacgacaaaaggtggtaccacaaaagccaggccatatatctggagtctaaggataaccagaaactgtcatgtgtcatttcgtccgtaggagccaacgaaatttgggtccgaaagacttccgactctacaaagatgcggatctacctcggacagctgcagcgcggtctgttcgtcattcggagacgcagtgctgcctag

SEQ ID NO: 212406 - DNA, 990 bp, Artificial Sequence
  derived and/or modified sequence
atgagcgccgccggcctgctggcccccgcccccgcccaggccggcgccccccccgcccccgagtactaccccgaggaggacgaggagctggagagcgccgaggacgacgagagaagctgcagaggcagagagagcgacgaggacaccgaggacgccagcgagaccgacctggccaagcacgacgaggaggactacgtggagatgaaggagcagatgtaccaggacaagctggccagcctgaagagacagctgcagcagctgcaggagggcaccctgcaggagtaccagaagagaatgaagaagctggaccagcagtacaaggagagaatcagaaacgccgacaccctgctgctgcaggcccagaccgagcaggtggagagaaactacatcaaggagaagaaggccgccgtgaaggagttcgaggacaagaaggtggagctgaaggagaacctgatcgccgagctggaggagaagaagaagatgatcgagaacgagaagctgaccatggagctgaccggcgacagcatggaggtgaagcccatcatgaccagaaagctgagaagaagacccaacgaccccgtgcccatccccgacaagagaagaaagcccgcccccgcccagctgaactacctgctgaccgacgagcagatcatggaggacctgagaaccctgaacaagctgaagagccccaagagacccgccagccccagcagccccgagcacctgcccgccacccccgccgagagccccgcccagagattcgaggccagaatcgaggacggcaagctgtactacgacaagagatggtaccacaagagccaggccatctacctggagagcaaggacaaccagaagctgagctgcgtgatcagcagcgtgggcgccaacgagatctgggtgagaaagaccagcgacagcaccaagatgagaatctacctgggccagctgcagagaggcctgttcgtgatcagaagaagaagcgccgcctag

SEQ ID NO: 212407 - DNA, 987 bp, Artificial Sequence
  derived and/or modified sequence
atgagcgccgccggcctgctggcccccgcccccgcccaggccggcgccccccccgcccccgagtactaccccgaggaggacgaggagctggagagcgccgaggacgacgagagaagctgcagaggcagagagagcgacgaggacaccgaggacgccagcgagaccgacctggccaagcacgacgaggaggactacgtggagatgaaggagcagatgtaccaggacaagctggccagcctgaagagacagctgcagcagctgcaggagggcaccctgcaggagtaccagaagagaatgaagaagctggaccagcagtacaaggagagaatcagaaacgccgagctgttcctgcagctggagaccgagcaggtggagagaaactacatcaaggagaagaaggccgccgtgaaggagttcgaggacaagaaggtggagctgaaggagaacctgatcgccgagctggaggagaagaagaagatgatcgagaacgagaagctgaccatggagctgaccggcgacagcatggaggtgaagcccatcatgaccagaaagctgagaagaagacccaacgaccccgtgcccatccccgacaagagaagaaagcccgcccccgcccagctgaactacctgctgaccgacgagcagatcatggaggacctgagaaccctgaacaagctgaagagccccaagagacccgccagccccagcagccccgagcacctgcccgccacccccgccgagagccccgcccagagattcgaggccagaatcgaggacggcaagctgtactacgacaagagatggtaccacaagagccaggccatctacctggagagcaaggacaaccagaagctgagctgcgtgatcagcagcgtgggcgccaacgagatctgggtgagaaagaccagcgacagcaccaagatgagaatctacctgggccagctgcagagaggcctgttcgtgatcagaagaagaagcgccgcctag

SEQ ID NO: 212408 - protein, 476 aa, Artificial Sequence
  derived and/or modified sequence
MASPFSGALQLTDLDDFIGPSQECIKPVKVEKRAGSGVAKIRIEDDGSYFQINQDGGTRRLEKAKVSLNDCLACSGCITSAETVLITQQSHEELKKVLDANKMAAPSQQRLVVVSVSPQSRASLAARFQLNPTDTARKLTSFFKKIGVHFVFDTAFSRHFSLLESQREFVRRFRGQADCRQALPLLASACPGWICYAEKTHGSFILPHISTARSPQQVMGSLVKDFFAQQQHLTPDKIYHVTVMPCYDKKLEASRPDFFNQEHQTRDVDCVLTTGEVFRLLEEEGVSLPDLEPAPLDSLCSGASAEEPTSHRGGGSGGYLEHVFRHAARELFGIHVAEVTYKPLRNKDFQEVTLEKEGQVLLHFAMAYGFRNIQNLVQRLKRGRCPYHYVEVMACPSGCLNGGGQLQAPDRPSRELLQHVERLYGMVRAEAPEDAPGVQELYTHWLQGTDSECAGRLLHTQYHAVEKASTGLGIRW

SEQ ID NO: 212409 - protein, 188 aa, Artificial Sequence
  derived and/or modified sequence
MASPFSGALQLTDLDDFIGPSQECIKPVKVEKRAGSGVAKIRIEDDGSYFQINQDGGTRRLEKAKVSLNDCLACSGCITSAETVLITQQSHEELKKVLDANKGCTSSSTPPSQGTSASWRASESLCGDSEDRPTADRRCPCWPLPAQAGSAMPRRLTAASSSPTSAPPGPRSRSWAPWSRTSSPSSST

SEQ ID NO: 212410 - protein, 374 aa, Artificial Sequence
  derived and/or modified sequence
MAAPSQQRLVVVSVSPQSRASLAARFQLNPTDTARKLTSFFKKIGVHFVFDTAFSRHFSLLESQREFVRRFRGQADCRQALPLLASACPGWICYAEKTHGSFILPHISTARSPQQVMGSLVKDFFAQQQHLTPDKIYHVTVMPCYDKKLEASRPDFFNQEHQTRDVDCVLTTGEVFRLLEEEGVSLPDLEPAPLDSLCSGASAEEPTSHRGGGSGGYLEHVFRHAARELFGIHVAEVTYKPLRNKDFQEVTLEKEGQVLLHFAMAYGFRNIQNLVQRLKRGRCPYHYVEVMACPSGCLNGGGQLQAPDRPSRELLQHVERLYGMVRAEAPEDAPGVQELYTHWLQGTDSECAGRLLHTQYHAVEKASTGLGIRW

SEQ ID NO: 212411 - DNA, 1431 bp, Artificial Sequence
  derived and/or modified sequence
atggcaagcccattctcaggggcccttcagcttacggatttggacgactttattgggcccagtcaggagtgcataaagccagtaaaagttgaaaagcgggccggaagtggggtagccaaaatacggatcgaagatgatggcagttactttcaaatcaatcaggacggcggcacgcggcgacttgagaaagcgaaagtgtcgctgaatgactgcctcgcatgcagtggctgcataaccagcgccgaaaccgttctgataactcagcaatcacatgaggagcttaaaaaggtcctggacgcaaataagatggccgcaccgtctcaacaacgcctggtagtggtcagtgtgtcgccccaaagcagagcctcacttgccgcccgcttccaacttaatccaactgacaccgcaagaaaacttaccagcttctttaagaagattggcgttcatttcgtgttcgatacagcgtttagcaggcacttttcgctcttggagagccaacgggagtttgtgcgccggttcagagggcaagccgactgtcgccaagcgctccctctcctggcatcggcttgtcccggatggatctgctacgccgagaagactcacggctcgtttatcttgccacacatctcaactgcacgcagcccgcagcaggtgatgggatcacttgtgaaagactttttcgctcagcaacaacatctcacccccgacaagatataccacgtcaccgtcatgccttgctatgataagaagctggaggccagccgcccagacttctttaatcaggagcaccaaacgcgggatgtcgactgtgtgctgactaccggtgaggtgttccggctgctggaagaggaaggggtctccctgcccgacctcgagcctgccccacttgatagcctgtgtagtggcgccagtgctgaggagcctaccagtcatagaggcggcggcagtggcggctatttagagcatgtgttcaggcacgcagcccgagagctgtttggcatacacgtagctgaagtgacatacaagccactgcggaataaggacttccaggaggtgactctggagaaagaaggtcaggtgctcctgcatttcgcgatggcttatggctttcgaaacatccaaaacctggtccaaagattgaagagaggccgatgtccttaccactacgtagaggtcatggcatgtccaagtggctgcctgaatgggggcggacaattacaagccccggaccgcccaagccgggagttgttgcaacatgtggagcgtctgtatggtatggtacgtgctgaggctcctgaagatgcccctggtgtccaggagctgtacacacactggctgcagggcacagattctgaatgcgctggccggttactccatacacagtaccacgccgtagaaaaggccagcactggactaggaataaggtggtag

SEQ ID NO: 212412 - DNA, 567 bp, Artificial Sequence
  derived and/or modified sequence
atggcttcgcctttcagtggcgcccttcagctgactgaccttgatgactttatcgggcccagccaggagtgcattaagcccgtcaaggtagagaaaagggctggttccggagtggcgaagatacggatagaggatgacggaagttattttcagatcaaccaggatggaggaacacggcgtctggaaaaagccaaagtgagtctcaatgactgcttggcctgctctggctgtattacgtcggccgagaccgtgctcatcacgcagcagtcgcatgaggagctgaagaaggtccttgacgctaacaaggggtgcaccagctctagtacacctccctcacaggggactagcgcctcttggagggcctccgaatctctgtgtggcgattcagaggatagaccaactgccgataggaggtgcccttgttggcccttacccgcacaagcggggagcgccatgcctcgacgtcttacagccgcatcctcaagccctacctcagctccccccgggccccgcagccgatcttgggccccgtggtccagaacctcttcacccagttcaagcacatag

SEQ ID NO: 212413 - DNA, 1431 bp, Artificial Sequence
  derived and/or modified sequence
atggccagccccttcagcggggccctgcagctgacagacctggatgacttcatcggccccagccaggagtgcatcaagcctgtgaaggtggagaagagagctggcagcggcgtggccaagatcagaattgaagatgatggcagctacttccagatcaaccaggacggcggcacccggcggctggagaaggccaaggtgtccctgaatgactgcctggcctgcagcggctgcatcaccagcgctgagaccgtgctgatcacccagcagagccatgaggagctgaagaaggtgctggatgccaacaagatggccgcccccagccagcagaggctggtggtggtgtctgtgagcccccagagccgggccagcctggccgcccgcttccagctgaaccccacagacacagccaggaagctgaccagcttcttcaagaagattggagtgcactttgtgtttgacacagccttcagccgccacttcagcctgctggagagccagcgggagtttgtgcggcgcttccggggccaggccgactgccggcaggccctgcccctgctggccagcgcctgccccggctggatctgctacgccgagaagacccacggcagcttcatcctgccccacatcagcacagcccggagcccccagcaggtgatgggcagcctggtgaaggacttctttgcccagcagcagcacctgaccccagacaagatctaccacgtgacagtgatgccctgctatgacaagaagctggaggccagcaggccagacttcttcaaccaggagcaccagaccagagatgtggactgtgtgctgaccaccggggaggtgttccggctgctggaggaggagggcgtgtccctgcctgacctggagcccgcccccctggacagcctgtgcagcggggccagcgctgaggagcccaccagccacagaggaggcggcagcggcggctacctggagcacgtgttcagacatgctgcccgggagctgtttggcatccacgtggccgaggtgacctacaagcccctgaggaacaaggacttccaggaggtgaccctggagaaggagggccaggtgctgctgcactttgccatggcctacggcttcaggaacatccagaacctggtgcagaggctgaagaggggccgctgcccctaccactacgtggaggtgatggcctgccccagcggctgcctgaatggaggcggccagctgcaggccccagaccggcccagccgggagctgctgcagcacgtggagcggctgtatggcatggtgcgggcagaggccccagaagatgcccctggggtgcaggagctgtacacccactggctgcagggcacagattctgaatgtgccggccgcctgctgcacacccagtaccacgctgtggagaaggccagcacaggcctgggcatccgctggtag

SEQ ID NO: 212414 - DNA, 567 bp, Artificial Sequence
  derived and/or modified sequence
atggccagccccttcagcggggccctgcagctgacagacctggatgacttcatcggccccagccaggagtgcatcaagcctgtgaaggtggagaagagagctggcagcggcgtggccaagatcagaattgaagatgatggcagctacttccagatcaaccaggacggcggcacccggcggctggagaaggccaaggtgtccctgaatgactgcctggcctgcagcggctgcatcaccagcgctgagaccgtgctgatcacccagcagagccatgaggagctgaagaaggtgctggatgccaacaagggctgcaccagcagcagcaccccacccagccagggcaccagcgcctcctggagggccagcgagagcctgtgtggggacagcgaggaccggcccacagctgaccggcgctgcccctgctggcccctgcctgcccaggccggcagcgccatgccccggcggctgacagctgccagcagcagccccaccagcgcccctcctggccccaggagccgctcctgggccccctggagcaggaccagcagccccagcagcagcacctag

SEQ ID NO: 212415 - DNA, 1431 bp, Artificial Sequence
  derived and/or modified sequence
atggccagccccttcagcggcgccctgcagctgaccgacctggacgacttcattggcccgtcgcaggagtgtatcaagcctgtgaaagtggaaaagcgagcagggtctggggtcgccaaaattcgcatcgaagatgacggctcctattttcaaatcaaccaggacggcggcacacgtaggcttgaaaaagcaaaggtgagcctcaatgactgcctggcctgtagtggatgtataacatccgccgagacagtcctcattacgcaacaaagccatgaggaacttaagaaggtcctcgatgcgaacaagatggccgctccctcccaacaacggctcgtggtggtcagcgttagccctcagagccgggcgtctctggcggcacggttccagttaaacccaaccgatacggccaggaagcttacctcgttttttaaaaagatcggcgtgcacttcgtgttcgatactgccttctctagacacttctcattactcgagagtcaacgcgagttcgtgcggagatttaggggacaagccgattgtcggcaggccctgcctcttttggcgtccgcttgccctggctggatatgctatgctgagaagactcatggtagttttattttaccacacatttctaccgctcggtctcctcaacaagtgatggggtctctggtaaaagactttttcgcgcagcagcagcacctgaccccagataagatatatcatgtgaccgtgatgccatgctacgataagaagctggaagcctccaggccagacttttttaaccaggaacatcagacaagagacgtggactgcgtcctcacaacgggtgaggtgttccggctcctcgaagaggaaggcgtaagcttaccggacctcgaacccgcccctttagactccctctgttcaggagcaagcgcggaggaaccaacttctcacagaggggggggcagcggtgggtacctggagcatgtcttcaggcacgcagctcgcgaactatttggcatccacgtagcagaggtaacttacaagccactgcgcaacaaggactttcaggaagtaacactggagaaagagggccaggtcctcctccacttcgccatggcgtacgggtttcgaaacatacaaaatctggtccagcgactgaagagggggcggtgtccgtaccactacgtggaagtgatggcttgccccagcggatgcctcaatgggggagggcagttgcaggcccccgatagacctagcagggaacttctgcagcatgtagagagactgtacggaatggttagggcggaagcaccggaggacgcacccggagtgcaagagctgtacacccactggcttcaggggacggacagcgagtgcgccgggagactgcttcacactcagtaccatgcagttgagaaagcctctactggtctaggcattcgctggtag

SEQ ID NO: 212416 - DNA, 567 bp, Artificial Sequence
  derived and/or modified sequence
atggccagccccttcagcggcgccctgcagctgaccgacctggacgattttatcggccctagtcaggagtgcatcaagcctgtgaaggtagagaaaagagctggttccggcgtcgcgaaaatccggattgaggatgacggtagctattttcagatcaaccaggacggaggcacccggcggctggagaaagctaaagtgagtctcaatgattgcctcgcctgttcagggtgtatcacctctgctgagacagttctgattacccagcagagccatgaggagttaaagaaagtgttggatgctaataagggctgtacctctagcagtacacctccttcccagggcacctcagcatcgtggagggctagcgaatcactatgtggcgattcggaggataggcccaccgcggaccgaaggtgtccttgttggccccttcccgcacaggccggttccgccatgcccaggagattgactgcagcctcatcgtccccaacatctgcaccccctggccctagatctagatcctgggcgccttggagtaggacatcttcaccctcaagcagcacttag

SEQ ID NO: 212417 - DNA, 2112 bp, Artificial Sequence
  derived and/or modified sequence
gcggcagtgcggccgtcatggcgtcgcccttcagcggggcgctgcagctgacggacctggatgacttcatcgggccgtctcaggagtgcatcaagcctgtcaaagtggaaaaaagggcgggaagtggcgtggccaagattcgcattgaagatgacgggagctacttccaaattaaccaagacggcgggacccggaggctggagaaggccaaggtctcgctaaacgactgcctggcgtgcagcggctgcatcacctccgcagagaccgtgcttatcacccagcagagccacgaggagctgaagaaggttctagatgctaacaagatggcggcacccagtcagcagaggctggttgtagtttcggtctcaccacagtctagagcatcgctggctgcacggtttcagctgaatcctacagatactgccaggaaattaacctcattctttaaaaaaataggggtgcacttcgtcttcgacaccgccttctcaaggcacttcagcctcctggagagccagcgagagtttgtgcggcgattccgaggacaggccgactgcagacaggcgctgcccctgctggcctctgcctgcccaggctggatctgctatgccgagaagactcacggcagcttcatcctcccccacatcagcaccgcccggtccccgcagcaggtcatgggctccctggtcaaggacttcttcgcccagcagcagcacttgacccctgacaagatctaccacgtcacagtgatgccctgctatgacaaaaagctggaagcctccagacccgactttttcaaccaggagcaccagacacgggatgtggactgtgtcctcacaacaggagaagttttcaggttgctggaggaagagggcgtctccctccccgacctggaaccagcccctctggacagcctgtgcagcggtgcctctgcagaggagcccaccagccatcggggagggggctcggggggctacctggagcacgtgttccggcacgcggcccgagagctctttggaatccatgtggctgaggttacctacaaacccctgaggaacaaagacttccaggaggtgacactggagaaggagggccaggtgctgctgcacttcgcaatggcgtacggcttccgcaacatccagaacctggtgcagaggctcaaacgagggcgctgcccctaccactacgtggaggtcatggcctgcccctcaggctgcctgaacggcgggggccagctccaggccccagacaggcccagcagagagctcctccagcacgtggagagactgtacggcatggtccgggctgaggcgcccgaggacgcgcctggggttcaggagctgtacacacactggctgcagggcacggactcggagtgtgcaggtcgcttgctgcatacgcagtaccacgccgtggagaaggccagcactggcctgggcatccggtggtaggggctgcaggaccaggactcccaggaggccgtgtccatgtgtgacagcagaaccacatgccccaagaccccagggcttcccccaaaattctgagtgagctgcagggtgtgctgggacccgagtaggagctaggactagccaggacccgcagccgcctcgtcacctccagttgggtgcctctgggttcccactggctctgcccaggtggggtggggtggcccaggcagcagaaggttccctgaggtcccagagcctgttccgttggccctgggccgaggcccacaggtgctgcccttgctgctgctggtcgggcacccaagtgcgtgaggggcttcagcctgtcccggggttgcctgaggcagagcaagacgggttctcacccctgacttctggaggcttcccttgaagctctgtgcaaaaggtgggagacagagctggacctgcaggggtggtcccgccacaaccctgcgtgtggaccctggcaggggggggtgccaggcccctggaaagcaggggttaccgttacgaggctgtggtccggggcaagccaagtacgaagcagcagccatcgcgggctgcatcatcccccagccaggtccccaccaggcctgtctcccagcgtttgtctaataaacgcacccctcctaaaacacgcctacgaaaa

SEQ ID NO: 212418 - DNA, 3212 bp, Artificial Sequence
  derived and/or modified sequence
atcgggccgtctcaggtgggccggcctgggcgggcggggtcgaggctgcgctcggtgccctgtcgcgcggagggaaattgctctgcgccccacttcctcccctgaggaatgagatccgaatcccgggagcccggtctgggccgtcagggactctatcgacccgggcgcggggcctcagacactgaggcccgcttcttaccaacaaggaaactgaggccagggagggcggcgccccccaacccgctcctgtgccccatggtgtccgggcgggctgcgtgggagggtcccgtggtcgcgggctcgcgccggcctgcccaacccagaggaggcagcagaggcggctcccacacatccctaaccctaacccgacccctgggtcgcagctggagggcggcggggcccgggccggggcctcttccccttcccctgcgcaggacgccttgtcaggcctcaggacccccaagccacagcctttgcatctgcataaacgggtgcggtggggaccccacctcatttgagggcagtaggggcggcccgctagacgccccgcagtggctcctcagtagagctgtccttaacgtcgccctggtgggccggacagctacccttgaacccgggaggctgcaggcgcccttttctgggtgcacctgcctgtccatgtccaacagccccgcggggccagagctgagcagggcgagaggcgggctgctgggagcgcttccggcagggatgagctgggaggcggctttctgggctgccagggttctcaaggagaagagagagaaatccacttgtttcccgggcactgagcaggaggtggtctccaaacagatccaagcacacgtcctctcgatgggcagtgcaactctggtctctgtggtggtcacgccccctgttcacgtgaagggtgaaggtcagtgttggtggtgtctccgcaggtgggtagtttgcaggcgctgttagcactggccttcctgcacactgggaacttcagtgccgcaggatgttgggaacccgatccctgggtgagagcagtggggcaggaagaagacggtgggaccagcctcagtccctgagtgcatggctcctggcagagccttcaggctgtgcggctgggcagccatccttgaggcctggcctcccagggaacctccgcccactcacaggggctgatttggggtctcttcctgctctaggagtgcatcaagcctgtcaaagtggaaaaaagggcgggaagtggcgtggccaagattcgcattgaagatgacgggagctacttccaaattaaccaagacggcgggacccggaggctggagaaggccaaggtctcgctaaacgactgcctggcgtgcagcggctgcatcacctccgcagagaccgtgcttatcacccagcagagccacgaggagctgaagaaggttctagatgctaacaagatggcggcacccagtcagcagaggctggttgtagtttcggtctcaccacagtctagagcatcgctggctgcacggtttcagctgaatcctacagatactgccaggaaattaacctcattctttaaaaaaataggggtgcacttcgtcttcgacaccgccttctcaaggcacttcagcctcctggagagccagcgagagtttgtgcggcgattccgaggacaggccgactgcagacaggcgctgcccctgctggcctctgcctgcccaggctggatctgctatgccgagaagactcacggcagcttcatcctcccccacatcagcaccgcccggtccccgcagcaggtcatgggctccctggtcaaggacttcttcgcccagcagcagcacttgacccctgacaagatctaccacgtcacagtgatgccctgctatgacaaaaagctggaagcctccagacccgactttttcaaccaggagcaccagacacgggatgtggactgtgtcctcacaacaggagaagttttcaggttgctggaggaagagggcgtctccctccccgacctggaaccagcccctctggacagcctgtgcagcggtgcctctgcagaggagcccaccagccatcggggagggggctcggggggctacctggagcacgtgttccggcacgcggcccgagagctctttggaatccatgtggctgaggttacctacaaacccctgaggaacaaagacttccaggaggtgacactggagaaggagggccaggtgctgctgcacttcgcaatggcgtacggcttccgcaacatccagaacctggtgcagaggctcaaacgagggcgctgcccctaccactacgtggaggtcatggcctgcccctcaggctgcctgaacggcgggggccagctccaggccccagacaggcccagcagagagctcctccagcacgtggagagactgtacggcatggtccgggctgaggcgcccgaggacgcgcctggggttcaggagctgtacacacactggctgcagggcacggactcggagtgtgcaggtcgcttgctgcatacgcagtaccacgccgtggagaaggccagcactggcctgggcatccggtggtaggggctgcaggaccaggactcccaggaggccgtgtccatgtgtgacagcagaaccacatgccccaagaccccagggcttcccccaaaattctgagtgagctgcagggtgtgctgggacccgagtaggagctaggactagccaggacccgcagccgcctcgtcacctccagttgggtgcctctgggttcccactggctctgcccaggtggggtggggtggcccaggcagcagaaggttccctgaggtcccagagcctgttccgttggccctgggccgaggcccacaggtgctgcccttgctgctgctggtcgggcacccaagtgcgtgaggggcttcagcctgtcccggggttgcctgaggcagagcaagacgggttctcacccctgacttctggaggcttcccttgaagctctgtgcaaaaggtgggagacagagctggacctgcaggggtggtcccgccacaaccctgcgtgtggaccctggcaggggggggtgccaggcccctggaaagcaggggttaccgttacgaggctgtggtccggggcaagccaagtacgaagcagcagccatcgcgggctgcatcatcccccagccaggtccccaccaggcctgtctcccagcgtttgtctaataaacgcacccctcctaaaac

SEQ ID NO: 212419 - DNA, 1431 bp, Artificial Sequence
  derived and/or modified sequence
atggcctctccctttagtggcgctctgcagttgaccgacctggatgattttatcggccctagccaggaatgtattaaacctgtgaaggtggaaaagcgggcagggagcggtgtcgcaaagatacggatcgaggatgatggctcttacttccaaatcaaccaagatggaggcacaagacgcctggagaaggctaaagtttctctgaacgactgcctagcctgtagcggttgtatcacaagtgcagaaaccgtcctgatcacccaacagtcacacgaggaattgaaaaaagtcctcgatgcaaacaaaatggctgcaccctcccagcagcgcctagtcgtcgtgagcgtctcacctcagagtcgggcaagcctagctgctaggtttcagttgaatcctaccgacaccgccaggaagctgacctcattttttaaaaaaatcggagtgcactttgtattcgacacagctttcagccgtcacttctctttgctcgagtcccagagggaattcgtgagaaggttccggggtcaggctgactgcaggcaggccctgcctcttctcgcctccgcctgtcctgggtggatctgttacgctgaaaagacacacggtagcttcatcctgccgcacatatccactgctcggagcccccagcaggtcatgggcagcctggttaaggactttttcgcccagcagcagcacctaaccccagataagatttatcacgtaactgtcatgccatgttacgataaaaaactggaggcatctcgacccgactttttcaatcaggagcatcagacacgagacgtggactgcgtcttaacaactggtgaagtgttccgccttctggaggaagagggtgtgagccttccagatctcgaacctgccccacttgattcactttgttccggggctagcgccgaagagccgacctctcatagaggaggcggatctgggggttaccttgagcacgtttttcgacacgctgcccgagagttgtttgggatacacgtagctgaagtgacatataaacctctgcgcaataaagatttccaggaggtaacacttgagaaagagggccaggtgctgttacactttgctatggcatacgggtttagaaacatccaaaacctcgtacaacgactcaaacgcggtcgctgcccatatcactatgtggaagtcatggcctgcccatctgggtgcctgaatggagggggacagctacaggccccagaccgtccttcccgggagctcttgcagcacgtggaacgcttgtatggaatggttcgggctgaggcccctgaagatgcccctggtgtccaggaactatacacgcattggcttcagggcacggatagcgagtgtgcgggaagacttctccacacacagtaccacgccgtggaaaaggccagcactgggctaggtatccgctggtag

SEQ ID NO: 212420 - DNA, 567 bp, Artificial Sequence
  derived and/or modified sequence
atggcgtctcccttctccggagctcttcagctaaccgacctcgatgacttcattgggccttctcaggagtgtataaagcctgtgaaggtagaaaagcgggcagggagcggggtggcaaagatccgcatcgaagacgatggcagctattttcagattaaccaagacggaggaactagaaggctcgaaaaggccaaggtgtccttaaacgactgcttggcctgttccgggtgtatcaccagtgccgagacagtgttaattacacagcagagtcacgaagagctcaagaaggtgctggacgcgaataagggttgtacgtcctcttcaacgcccccaagtcagggaacatcagcgagttggagagccagcgaaagtctttgtggcgacagcgaagaccggcctaccgccgatcggaggtgcccttgctggcccctccccgcacaggcaggatctgccatgccgcgtcgactaactgccgcatcctcgtcaccaacgtcagcccctcccggtccgcgttcccggtcatgggccccttggtcaagaacttcttctccctcgtctagcacctag

SEQ ID NO: 212421 - DNA, 1431 bp, Artificial Sequence
  derived and/or modified sequence
atggccagccccttcagcggcgccctgcagctgaccgacctggacgacttcatcggccccagccaggagtgcatcaagcccgtgaaggtggagaagagagccggcagcggcgtggccaagatcagaatcgaggacgacggcagctacttccagatcaaccaggacggcggcaccagaagactggagaaggccaaggtgagcctgaacgactgcctggcctgcagcggctgcatcaccagcgccgagaccgtgctgatcacccagcagagccacgaggagctgaagaaggtgctggacgccaacaagatggccgcccccagccagcagagactggtggtggtgagcgtgagcccccagagcagagccagcctggccgccagattccagctgaaccccaccgacaccgccagaaagctgaccagcttcttcaagaagatcggcgtgcacttcgtgttcgacaccgccttcagcagacacttcagcctgctggagagccagagagagttcgtgagaagattcagaggccaggccgactgcagacaggccctgcccctgctggccagcgcctgccccggctggatctgctacgccgagaagacccacggcagcttcatcctgccccacatcagcaccgccagaagcccccagcaggtgatgggcagcctggtgaaggacttcttcgcccagcagcagcacctgacccccgacaagatctaccacgtgaccgtgatgccctgctacgacaagaagctggaggccagcagacccgacttcttcaaccaggagcaccagaccagagacgtggactgcgtgctgaccaccggcgaggtgttcagactgctggaggaggagggcgtgagcctgcccgacctggagcccgcccccctggacagcctgtgcagcggcgccagcgccgaggagcccaccagccacagaggcggcggcagcggcggctacctggagcacgtgttcagacacgccgccagagagctgttcggcatccacgtggccgaggtgacctacaagcccctgagaaacaaggacttccaggaggtgaccctggagaaggagggccaggtgctgctgcacttcgccatggcctacggcttcagaaacatccagaacctggtgcagagactgaagagaggcagatgcccctaccactacgtggaggtgatggcctgccccagcggctgcctgaacggcggcggccagctgcaggcccccgacagacccagcagagagctgctgcagcacgtggagagactgtacggcatggtgagagccgaggcccccgaggacgcccccggcgtgcaggagctgtacacccactggctgcagggcaccgacagcgagtgcgccggcagactgctgcacacccagtaccacgccgtggagaaggccagcaccggcctgggcatcagatggtag

SEQ ID NO: 212422 - DNA, 567 bp, Artificial Sequence
  derived and/or modified sequence
atggccagccccttcagcggcgccctgcagctgaccgacctggacgacttcatcggccccagccaggagtgcatcaagcccgtgaaggtggagaagagagccggcagcggcgtggccaagatcagaatcgaggacgacggcagctacttccagatcaaccaggacggcggcaccagaagactggagaaggccaaggtgagcctgaacgactgcctggcctgcagcggctgcatcaccagcgccgagaccgtgctgatcacccagcagagccacgaggagctgaagaaggtgctggacgccaacaagggctgcaccagcagcagcaccccccccagccagggcaccagcgccagctggagagccagcgagagcctgtgcggcgacagcgaggacagacccaccgccgacagaagatgcccctgctggcccctgcccgcccaggccggcagcgccatgcccagaagactgaccgccgccagcagcagccccaccagcgccccccccggccccagaagcagaagctgggccccctggagcagaaccagcagccccagcagcagcacctag

SEQ ID NO: 212423 - protein, 938 aa, Artificial Sequence
  derived and/or modified sequence
MPALEHMNQILHILFVFLPFLWALGTLPPPDALLLWAMEQVLEFGLGGSSMSTHLRLLVMFIMSAGTAIASYFIPSTVGVVLFMTGFGFLLSLNLSDMGHKIGTKSKDLPSGPEKHFSWKECLFYIIILVLALLETSLLHHFAGFSQISKSNSQAIVGYGLMILLIILWILREIQSVYIIGIFRNPFYPKDVQTVTVFFEKQTRLMKIGIVRRILLTLVSPFAMIAFLSLDSSLQGLHSVSVCIGFTRAFRMVWQNTENALLETVIVSTVHLISSTDIWWNRSLDTGLRLLLVGIIRDRLIQFISKLQFAVTVLLTSWTEKKQRRKTTATLCILNIVFSPFVLVIIVFSTLLSSPLLPLFTLPVFLVGFPRPIQSWPGAAGTTACVCADTVYYYQMVPRLTAVLQTAMAAGSLGLLLPGSHYLGRFQDRLMWIMILECGYTYCSINIKGLELQETSCHTAEARRVDEVFEDAFEQEYTRVCSLNEHFGNVLTPCTVLPVKLYSDARNVLSGIIDSHENLKEFKGDLIKVLVWILVQYCSKRPGMKENVHNTENKGKAPLMLPALNTLPPPKSPEDIDSLNSETFNDWSDDNIFDDEPTIKKVIEEKHQLKDLPGTNLFIPGSVESQRVGDHSTGTVPENDLYKAVLLGYPAVDKGKQEDMPYIPLMEFSCSHSHLVCLPAEWRTSCMPSSKMKEMSSLFPEDWYQFVLRQLECYHSEEKASNVLEEIAKDKVLKDFYVHTVMTCYFSLFGIDNMAPSPGHILRVYGGVLPWSVALDWLTEKPELFQLALKAFRYTLKLMIDKASLGPIEDFRELIKYLEEYERDWYIGLVSDEKWKEAILQEKPYLFSLGYDSNMGIYTGRVLSLQELLIQVGKLNPEAVRGQWANLSWELLYATNDDEERYSIQAHPLLLRNLTVQAAEPPLGYPIYSSKPLHIHLY

SEQ ID NO: 212424 - DNA, 897 bp, Artificial Sequence
  derived and/or modified sequence
atgctgcccgccctgaacaccctgcccccccccaagagccccgaggacatcgacagcctgaacagcgagaccttcaacgactggagcgacgacaacatcttcgacgacgagcccaccatcaagaaggtgatcgaggagaagcaccagctgaaggacctgcccggcaccaacctgttcatccccggcagcgtggagagccagagagtgggcgaccacagcaccggcaccgtgcccgagaacgacctgtacaaggccgtgctgctgggctaccccgccgtggacaagggcaagcaggaggacatgccctacatccccctgatggagttcagctgcagccacagccacctggtgtgcctgcccgccgagtggagaaccagctgcatgcccagcagcaagatgaaggagatgagcagcctgttccccgaggactggtaccagttcgtgctgagacagctggagtgctaccacagcgaggagaaggccagcaacgtgctggaggagatcgccaaggacaaggtgctgaaggacttctacgtgcacaccgtgatgacctgctacttcagcctgttcggcatcgacaacatggcccccagccccggccacatcctgagagtgtacggcggcgtgctgccctggagcgtggccctggactggctgaccgagaagcccgagctgttccagctggccctgaaggccttcagatacaccctgaagctgatgatcgacaaggccagcctgggccccatcgaggacttcagagagctgatcaagtacctggaggagtacgagagagactggtacatcggcctggtgagcgacgagaagtggaaggaggccatcctgcaggagaagccctacctgttcagcctgggctacgacagcaacatgtacctgtag

SEQ ID NO: 212425 - DNA, 897 bp, Artificial Sequence
  derived and/or modified sequence
atgctgcccgccctaaatactttaccgccacccaaatctccggaagacatcgattccctgaattcggaaaccttcaatgactggtccgatgataacatttttgacgacgagccgaccatcaaaaaggttatcgaggagaagcatcaactgaaggatctgcctggcaccaatctgtttatcccggggtccgtggaatcccagagagtcggcgaccactccactggaacagtgccagagaacgatttatacaaggccgttttgctaggttaccccgccgtggataaaggcaagcaagaagacatgccgtacatccccctgatggagttttcctgctcacattcccatctcgtctgcctgcctgcagagtggagaacatcttgcatgcctagttcaaagatgaaagagatgtcctccttgttcccagaagattggtaccagttcgttcttagacagttggagtgctaccattctgaggagaaggcttctaacgtgcttgaagagatagcgaaggacaaagtgctgaaagatttttatgtacacacagtcatgacatgctacttctctttattcggtattgataatatggccccatctcctgggcacatcctgcgggtgtacggtggtgtgctgccgtggagtgtcgcgctggactggttgacggaaaaacccgagttgttccaactggcactgaaagcatttcggtacaccctaaaactcatgattgataaggccagcctaggcccaattgaagattttagggagctaatcaagtatttggaagaatacgaacgcgattggtatatcgggctcgtgtccgatgaaaaatggaaggaggctatcctgcaggagaagccctatctgttctcactcggctacgattccaatatgtacctgtag

SEQ ID NO: 212426 - DNA, 897 bp, Artificial Sequence
  derived and/or modified sequence
atgctgcctgccctgaacaccctgcccccacccaagagcccagaagatattgacagcctgaacagcgagaccttcaatgactggagcgatgacaacatctttgatgatgagcccaccatcaagaaggtgattgaggagaagcaccagctgaaggacctgcccggcaccaacctcttcatccctggctctgtggagagccagagggtgggggaccacagcacaggcaccgtgcctgaaaatgacctgtacaaggctgtgctgctgggctacccagctgtggacaagggcaagcaggaggacatgccctacatccccctgatggagttcagctgcagccacagccacctggtgtgcctgcctgctgagtggaggaccagctgcatgcccagcagcaagatgaaggagatgagcagcctcttccctgaggactggtaccagtttgtgctgcggcagctggagtgctaccacagcgaggagaaggccagcaatgtgctggaggagatcgccaaggacaaggtgctgaaggacttctacgtgcacacagtgatgacctgctacttcagcctgtttggcatcgacaacatggcccccagccctggccacatcctgcgggtgtatggaggagtgctgccctggagcgtggccctggactggctgacagagaagccagagctgttccagctggccctgaaggccttccgctacaccctgaagctgatgattgacaaggccagcctgggccccatcgaggacttccgggagctgatcaagtacctggaggagtatgaaagagactggtacatcggcctggtgtctgatgagaagtggaaggaggccatcctgcaggagaagccctacctgttcagcctgggctatgacagcaacatgtacctgtag

SEQ ID NO: 212427 - DNA, 897 bp, Artificial Sequence
  derived and/or modified sequence
atgctgcccgccctgaacaccctgcccccccccaagagccccgaggacattgacagcctgaacagcgagacctttaacgattggtccgatgataacatcttcgacgacgagcctaccataaagaaagttattgaagaaaagcaccaactcaaagacctgccgggcaccaatctgttcatccccggctccgtggaaagccagcgcgtcggggatcacagcaccgggaccgtacccgagaatgatctgtacaaagcggtgcttctgggctaccccgccgtcgataaaggcaaacaggaggacatgccttatattccccttatggaatttagttgttctcatagccacctcgtgtgtctacctgccgagtggagaacaagttgtatgccctccagcaaaatgaaggagatgagttccctgttccctgaagactggtaccagtttgtcctccgccaacttgaatgctatcactccgaggagaaggcttctaacgtgctggaagaaattgccaaggataaggtgctgaaggatttctatgtgcataccgtcatgacctgctatttttctctgttcggaatagacaacatggctccttctccgggccatatactgcgtgtgtatggcggcgtgctcccatggagtgtggccctggactggttgactgagaaaccagagctcttccagctggccctcaaggcgttccggtacacactcaaattgatgatcgacaaggcaagcttaggcccgattgaagacttccgcgaactcattaaatatctcgaagaatacgagcgagactggtacatcgggctagttagtgacgaaaagtggaaggaagccatcctgcaagaaaaaccctatctgttcagtctggggtacgatagcaatatgtatctgtag

SEQ ID NO: 212428 - DNA, 897 bp, Artificial Sequence
  derived and/or modified sequence
atgctccccgcattgaatacactgccgccaccaaaaagtcctgaggatatcgacagtttgaacagcgagactttcaatgattggtctgacgacaatatctttgacgacgagccaaccataaagaaggttattgaagaaaagcaccagctgaaggacctgccgggaactaatctgttcattcccggatccgtcgagtcccagcgagtgggtgaccatagtacaggtactgtgcccgagaatgacctctacaaagcagtccttctgggttaccctgccgttgataaaggaaaacaggaggacatgccttacatcccactaatggaattttcctgttctcactctcatcttgtatgcctgcccgcagagtggaggacctcttgcatgccatcctctaaaatgaaggaaatgtctagtctgtttcctgaagactggtaccaatttgtgcttaggcaacttgagtgttaccactccgaagaaaaggcatccaatgtgcttgaggagattgcaaaggacaaggtgttaaaagacttctacgtgcataccgtaatgacctgctacttttcgttgttcggaatcgacaatatggcccctagtccaggccacatcctgagggtttatggcggtgtgctaccatggagcgtggcgctggattggctgaccgaaaagcccgaactttttcaactagcacttaaagccttccggtatactttgaaacttatgattgacaaggcctcactggggccaatagaggactttcgcgaactcattaagtacctggaagagtacgagagggactggtatataggcctcgtctctgacgagaaatggaaggaggccatcctccaagaaaagccctacctgtttagcttgggatacgatagtaacatgtatctgtag

SEQ ID NO: 212429 - DNA, 750 bp, Artificial Sequence
  derived and/or modified sequence
gtccagtcaccgtaaacgccccaagatcatctttgtccctaaaaacttacccccgaccccgctcgtgcccctccccagagtgcggagccttccccagaccgcgcattcctgcagtgtcagaaccgctggcagcggccgcagacgccgggagagcgattgttttactacagacgggcgggagaagggaccggggcggctgcgcggtggcggggcgcgctgccgtcgggtgggccccgggctctggaatgcggggagcagtgtttgacggcgtcgaggagataaactcatcctgaaagtcgctgttgttctcctgctgagcaagaatggaggccccactggtgagtctggatgaagagtttgaggaccttcgaccctcctgctcggaggacccggaggagaagccccagtgtttctatggttcatctccccaccatctcgaggacccctccctctccgagcttgagaatttttcttccgaaataatcagcttcaagtccatggaggacctcgtaaatgaatttgatgagaagctcaatgtctgctttcggaactacaacgccaagaccgagaacctagctcccgtgaagaaccagttacagatccaagaggaggaggagacccttcaggacgaggagtaagaagtcttaattgccctctcctgcttcagtcgagagccctgtagtccttgtctccttgacatagtgctggtttctgtctataggtttatgggctattactttcattttcgtg

SEQ ID NO: 212430 - DNA, 1053 bp, Artificial Sequence
  derived and/or modified sequence
ccgggcgccgccggagctgcgcggggagcgctcgctggctggctggctggctggctctccgctgcgctgcgctgcgctccggccgctcccgcggcccgtggatgggggtgtccggctgagccccgggatccgcctccctccgccaggacccgcacagataaactcatcctgaaagtcgctgttgttctcctgctgagcaagaatggaggccccactggtgagtctggatgaagagtttgaggaccttcgaccctcctgctcggaggacccggaggagaagccccagtgtttctatggttcatctccccaccatctcgaggacccctccctctccgagcttgagaatttttcttccgaaataatcagcttcaagtccatggaggacctcgtaaatgaatttgatgagaagctcaatgtctgctttcggaactacaacgccaagaccgagaacctagctcccgtgaagaaccagttacagatccaagaggaggaggagacccttcaggacgaggagtaagaagtcttaattgccctctcctgcttcagtcgagagccctgtagtccttgtctccttgacatagtgctggtttctgtctataggtttatgggctattactttcattttcgtgttgccagcggagcagtgccctggtacttgctgtcatagctctatatatgtccctttacagtcccctgaggagaactttcttaaattgaaaccttagaggaatgaaggttttcctagatacaaaatggaatttcaggagcacagtaaatttcagggtctgtctatcttaagctttctttatatcagtggaaatccagcgagatattagaaataaaggccagaaaaaattaattaaccatgatggatgaatctatgttattggactaatttgcttcaagaaacaccagaattttgaaaatcccgaatttttgacagcccctcaggcctggagagttatctacagatgttaggatatgtccacataagaaagcatctaaactgaactgagagcacagcgggctaccctggacaaagtaaaggtggaa

SEQ ID NO: 212431 - DNA, 315 bp, Artificial Sequence
  derived and/or modified sequence
atggaggcaccgctggtgtcgcttgacgaagaattcgaggatttgaggccaagctgcagtgaagaccccgaagaaaagccacagtgtttctatggatcctcaccccaccacctagaggacccaagcctgtccgagctagaaaatttttctagtgagattatcagtttcaaatctatggaagatcttgtcaacgagttcgacgaaaagcttaatgtatgcttccggaattataatgctaagaccgaaaaccttgctccggttaaaaaccaattgcagatccaggaggaggaggaaaccctgcaggatgaggagtag

SEQ ID NO: 212432 - DNA, 315 bp, Artificial Sequence
  derived and/or modified sequence
atggaggcccctcttgtgtctctcgacgaggagtttgaagatctgaggccatcatgtagcgaagatcctgaggaaaagcctcaatgcttttatggctcgagtccgcatcacttggaggacccttcactctctgagctcgagaacttctcttctgagataatcagcttcaagtcaatggaagatctcgtcaatgagttcgatgagaaattaaacgtctgctttcgcaactataacgccaaaacggagaatctggctcctgtgaaaaaccagctgcaaatccaggaggaggaagagaccctacaggatgaagaatag

SEQ ID NO: 212433 - DNA, 315 bp, Artificial Sequence
  derived and/or modified sequence
atggaggcccccctggtgtccctggatgaggagtttgaggacctgcggcccagctgcagtgaagatcctgaggagaagccccagtgcttctacggcagcagcccccaccacctggaggaccccagcctgtctgagctggagaacttcagcagcgagatcatctccttcaagtccatggaggacctggtgaatgaatttgatgagaagctgaatgtgtgcttcaggaactacaatgccaagacagagaacctggcccctgtgaagaaccagctgcagatccaggaggaggaggagaccctgcaggatgaggagtag

SEQ ID NO: 212434 - DNA, 315 bp, Artificial Sequence
  derived and/or modified sequence
atggaggcccccctggtgagcctggacgaggagttcgaggacctgaggccatcctgctccgaagatccagaggaaaagccacagtgcttttacggctctagtccccatcatctggaggatccgtcgctgagtgaactagaaaatttctcaagcgaaattatcagtttcaagtctatggaggacctggtgaacgagtttgacgagaagctcaatgtatgttttcgcaactacaatgcaaagactgagaacctggcacctgttaagaaccagttgcagatccaggaggaggaggaaacgctccaggacgaggagtag

SEQ ID NO: 212435 - DNA, 315 bp, Artificial Sequence
  derived and/or modified sequence
atggaggcccccctggtgagcctggacgaggagttcgaggacctgcgcccctcttgctctgaagatccagaggagaagccgcaatgcttctacggatcctctccccaccacctcgaggacccaagcctgagtgaactggaaaactttagttctgaaattatttctttcaaaagtatggaggatctggtcaacgagttcgatgaaaagctcaacgtatgcttcaggaactacaacgctaaaacagagaacctagctcccgtaaagaatcagctgcagattcaagaggaagaggagaccctgcaggacgaggaatag

SEQ ID NO: 212436 - DNA, 315 bp, Artificial Sequence
  derived and/or modified sequence
atggaggcgcctttggtgtcactcgatgaagagtttgaggatctgcgtccgagctgtagcgaagaccccgaagaaaaaccccagtgcttttatgggtcttccccccaccacctggaggacccaagtctgtcagaattggagaacttttcatctgaaattatcagctttaaatcaatggaggatctagtcaatgagtttgatgaaaagcttaacgtctgctttcgcaactacaatgctaaaaccgaaaatctggcccctgtgaagaaccagcttcagatccaggaagaagaggagaccctccaggacgaagagtag

SEQ ID NO: 212437 - DNA, 315 bp, Artificial Sequence
  derived and/or modified sequence
atggaggcgccactcgtcagcttagatgaggaatttgaggatctgaggcccagctgctctgaggatccagaggagaagccgcaatgtttttatggctcatcgccacaccacctggaagacccctcactgagcgaattagagaatttctcctcagaaattatatcatttaagagtatggaagatcttgtgaacgagtttgacgaaaaactgaacgtgtgtttccgcaattacaatgctaaaacagagaatctggcacccgtcaagaaccagctgcagatccaggaagaggaggaaacattgcaggatgaggagtag

SEQ ID NO: 212438 - DNA, 315 bp, Artificial Sequence
  derived and/or modified sequence
atggaggcccccctggtgagcctggacgaggagttcgaggacctgagacccagctgcagcgaggaccccgaggagaagccccagtgcttctacggcagcagcccccaccacctggaggaccccagcctgagcgagctggagaacttcagcagcgagatcatcagcttcaagagcatggaggacctggtgaacgagttcgacgagaagctgaacgtgtgcttcagaaactacaacgccaagaccgagaacctggcccccgtgaagaaccagctgcagatccaggaggaggaggagaccctgcaggacgaggagtag

SEQ ID NO: 212439 - protein, 334 aa, Artificial Sequence
  derived and/or modified sequence
MERKISRIHLVSEPSITHFLQVSWEKTLESGFVITLTDGHSAWTGTVSESEISQEADDMAMEKGKYVGELRKALLSGAGPADVYTFNFSKESCYFFFEKNLKDVSFRLGSFNLEKVENPAEVIRELICYCLDTIAENQAKNEHLQKENERLLRDWNDVQGRFEKCVSAKEALETDLYKRFILVLNEKKTKIRSLHNKLLNAAQEREKDIKQEGETAICSEMTADRDPVYDESTDEESENQTDLSGLASAAVSKDDSIISSLDVTDIAPSRKRRQRMQRNLGTEPKMAPQENQLQEKEKPDSSLPETSKKEHISAENMSLETLRNSSPEDLFDEI

SEQ ID NO: 212440 - DNA, 1005 bp, Artificial Sequence
  derived and/or modified sequence
atggagagaaagatcagcagaatccacctggtgagcgagcccagcatcacccacttcctgcaggtgagctgggagaagaccctggagagcggcttcgtgatcaccctgaccgacggccacagcgcctggaccggcaccgtgagcgagagcgagatcagccaggaggccgacgacatggccatggagaagggcaagtacgtgggcgagctgagaaaggccctgctgagcggcgccggccccgccgacgtgtacaccttcaacttcagcaaggagagctgctacttcttcttcgagaagaacctgaaggacgtgagcttcagactgggcagcttcaacctggagaaggtggagaaccccgccgaggtgatcagagagctgatctgctactgcctggacaccatcgccgagaaccaggccaagaacgagcacctgcagaaggagaacgagagactgctgagagactggaacgacgtgcagggcagattcgagaagtgcgtgagcgccaaggaggccctggagaccgacctgtacaagagattcatcctggtgctgaacgagaagaagaccaagatcagaagcctgcacaacaagctgctgaacgccgcccaggagagagagaaggacatcaagcaggagggcgagaccgccatctgcagcgagatgaccgccgacagagaccccgtgtacgacgagagcaccgacgaggagagcgagaaccagaccgacctgagcggcctggccagcgccgccgtgagcaaggacgacagcatcatcagcagcctggacgtgaccgacatcgcccccagcagaaagagaagacagagaatgcagagaaacctgggcaccgagcccaagatggccccccaggagaaccagctgcaggagaaggagaagcccgacagcagcctgcccgagaccagcaagaaggagcacatcagcgccgagaacatgagcctggagaccctgagaaacagcagccccgaggacctgttcgacgagatctag

SEQ ID NO: 212441 - DNA, 1005 bp, Artificial Sequence
  derived and/or modified sequence
atggagcggaagatctccagaatacacctcgttagcgaaccatcaattacccatttcttacaagtgtcctgggagaagaccctggagtctgggttcgtcatcacactcacagatgggcactctgcctggactggtacagtgagcgaatccgaaatcagtcaggaggctgatgacatggctatggaaaagggaaagtacgttggggagctgcgaaaagctctgctgagtggcgcaggtccagccgatgtgtacacgttcaatttttctaaggaaagctgctatttcttctttgaaaagaacttaaaggatgtttcttttcgccttggcagtttcaacctggagaaggttgagaaccccgctgaagtgatccgcgagctcatttgctactgccttgacacaatcgctgagaatcaagccaagaacgaacacctccagaaggagaatgaaaggttgctgagggactggaatgacgtacaggggagatttgaaaagtgcgtcagtgctaaggaagcgttggaaaccgatctgtacaaacgatttattttggtgcttaacgagaagaagaccaaaatccgaagcctccacaataaactcctgaacgccgcccaagaaagagaaaaagacattaagcaggagggagagaccgctatttgttctgagatgacggccgaccgggaccccgtgtacgacgaaagcacggacgaagagtcagagaatcagactgatctatccggcctcgctagcgccgcagtgagcaaggatgatagcatcatcagcagtctggacgtcaccgacatagccccaagtagaaaaagacgacaaaggatgcagcggaaccttggaaccgaacccaagatggctccccaagagaatcagctccaagagaaagagaaaccagactcgtcattacccgaaacatcaaagaaagagcatatatcagcagaaaacatgagccttgaaactctgagaaacagtagccctgaggatctgtttgatgagatttag

SEQ ID NO: 212442 - DNA, 1005 bp, Artificial Sequence
  derived and/or modified sequence
atggaacgcaagatcagccgaattcacctggttagcgagcctagcataacccacttcctgcaggtctcttgggagaagactctagaaagtgggttcgtgataacgctgaccgatggccatagcgcgtggacaggtacggtgtcagagagcgagatctcacaggaggccgacgatatggcgatggagaaaggcaaatatgtgggagagctgagaaaggccctgttgagtggagctggccctgccgatgtctacacattcaatttctccaaggagtcctgttacttcttctttgaaaagaacttgaaagacgtctcttttaggctgggctccttcaatctcgaaaaagtggagaacccagctgaggtcattagagaattaatctgttactgtctggacaccattgctgagaaccaggccaaaaatgagcatctgcagaaggagaatgaacgcctgctgagagattggaacgacgtgcagggaagatttgagaagtgcgtgagtgcgaaggaagccttggaaacagatctctacaaacgcttcatcctggttctgaatgagaagaagaccaagatccgaagtttgcataataagctcttgaacgccgctcaagagcgggagaaggacattaaacaggaaggggagacggccatatgttcggagatgaccgctgaccgcgatccagtgtacgacgagtcaacggatgaagagtctgagaatcagacagatctaagtggcttggcctccgcagctgtctccaaggatgattcgatcatttccagcctggatgtaacggatattgccccctcccggaagagacgacagcggatgcagaggaacctcggtacggaaccaaaaatggcccctcaagagaaccagttacaagaaaaagaaaagcccgacagcagtcttcccgagacctccaaaaaggaacatatttcagcagagaatatgtcgctggagacgcttagaaacagttcacccgaggatttattcgatgaaatatag

SEQ ID NO: 212443 - DNA, 1005 bp, Artificial Sequence
  derived and/or modified sequence
atggagaggaagatcagccgcatccacctggtgtctgagcccagcatcacccacttcctgcaggtgtcctgggagaagaccctggagagcggcttcgtcatcaccctgacagatggccacagcgcctggacaggcaccgtgtctgagagcgagatcagccaggaggctgatgacatggccatggagaagggcaagtatgtgggggagctgaggaaggccctgctgagcggggccggccctgcagatgtgtacaccttcaacttcagcaaggagagctgctacttcttctttgagaagaacctgaaggatgtgtccttccggctgggcagcttcaacctggagaaggtggagaacccagctgaggtgatccgggagctgatctgctactgcctggacaccatcgccgagaaccaggccaagaatgagcacctgcagaaggaaaatgaaaggctgctgcgggactggaatgatgtgcagggccgctttgagaagtgtgtgtctgccaaggaggccctggagacagacctgtacaagcgcttcatcctggtgctgaatgagaagaagaccaagatccgcagcctgcacaacaagctgctgaatgctgcccaggagcgggagaaggacatcaagcaggagggggagacagccatctgcagcgagatgacagctgaccgggaccctgtgtatgatgagagcacagatgaggagagcgagaaccagacagacctgagcggcctggccagcgctgctgtgtccaaggatgacagcatcatcagcagcctggatgtgacagacatcgcccccagcaggaagaggcggcagaggatgcagaggaacctgggcacagagcccaagatggccccccaggagaaccagctgcaggagaaggagaagccagacagcagcctgcctgagaccagcaagaaggagcacatctctgctgagaacatgagcctggagaccctgaggaacagcagccctgaggacctgtttgatgagatctag

SEQ ID NO: 212444 - DNA, 1005 bp, Artificial Sequence
  derived and/or modified sequence
atggagcggaagatcagccggatccacctggtgagcgagcccagcatcacacactttcttcaggtttcctgggaaaagacccttgaaagtggcttcgtgatcactctgacagatggccattcagcatggacaggtaccgtgtcggaaagcgagatcagtcaggaagccgatgatatggctatggagaagggtaaatatgttggagagcttagaaaggccctgctctccggcgccggtcctgccgatgtgtacacgtttaatttttcaaaagaaagctgttattttttcttcgagaagaacttgaaagatgtctcgttccgcctcggctcatttaatttggagaaagtggaaaaccctgccgaggtaattcgcgagcttatatgctattgcctggatacgattgccgaaaatcaagccaaaaatgaacacctgcagaaggagaatgagagattactgagagattggaacgatgtccaggggaggttcgagaaatgcgtttccgccaaggaagccctcgagactgatctctataagagattcattctggttttgaacgaaaagaagaccaagattcgctctcttcacaacaagcttcttaatgccgcccaggagcgcgagaaggatatcaaacaagaaggcgagactgccatatgtagcgaaatgacggctgaccgggaccccgtttatgacgagtctactgacgaggagagcgagaaccagaccgatctgagcggccttgctagcgctgccgtctcaaaggacgattccattatctcctcccttgatgtgaccgatatcgcccccagtcggaaaagaagacagcgcatgcaaagaaacctagggacggaaccaaagatggcccctcaggagaatcaactccaggagaaggagaaacctgattcatctttacccgagacctcaaaaaaggagcacatctccgctgagaacatgtcactggagacccttagaaattcaagtcctgaggacctattcgacgaaatttag

SEQ ID NO: 212445 - DNA, 1005 bp, Artificial Sequence
  derived and/or modified sequence
atggagcggaagatcagccggatccacctggtgagcgagcccagcatcacacatttcttgcaggtttcctgggagaagacgctggaatcaggcttcgtcatcacattgaccgatgggcattcagcatggacaggtacagtgagtgaaagcgagatcagccaggaggctgacgacatggcaatggaaaagggcaagtacgttggagagctacgcaaggctctgttatcgggtgccggaccagccgacgtgtacacctttaatttctccaaggagtcttgttacttctttttcgaaaagaacctgaaagacgttagctttcggctgggctcattcaacctcgagaaggtggaaaatcccgccgaggtgattcgtgaactgatttgctactgtcttgatacaatcgcagagaaccaggccaagaatgagcatctgcagaaagagaacgaacggcttctccgagactggaacgatgtgcaggggaggttcgaaaagtgcgtctcagcaaaagaagccctggaaaccgatctctataaacggttcattctggtgctcaatgaaaaaaagacaaaaattcggtcactgcacaacaaactactgaatgccgcccaagagcgagagaaggacattaaacaggaaggagagacagccatatgcagtgagatgacagcggatcgggatcccgtttacgatgagagcactgatgaagagtctgagaaccagacagatctcagcgggcttgccagtgcggccgttagtaaagacgattccattatctccagcttggacgttactgacattgccccttctcgaaagcggagacagagaatgcaacggaacttagggactgagcctaaaatggccccccaagagaaccaactgcaagagaaagaaaagccagattccagtttgccagagacatccaagaaggagcacatctcagcggagaacatgtcacttgagacgcttaggaatagtagcccagaggatctgttcgatgaaatctag

SEQ ID NO: 212446 - DNA, 1005 bp, Artificial Sequence
  derived and/or modified sequence
atggagcgcaagatctcccggattcatcttgtgtctgaaccctctataacccacttcctgcaggtgtcctgggagaaaacgctggagagtggattcgtgatcacactgaccgatgggcactctgcctggaccggaacagtctctgaatccgaaattagtcaggaggcggatgacatggctatggagaagggcaaatatgtgggggagctgagaaaagcccttctctctggcgctggacctgccgacgtgtacactttcaactttagtaaggagtcttgctactttttctttgagaagaatctgaaagatgtgtcattccgtttggggagcttcaaccttgagaaggtggaaaatcctgctgaggtgattcgagagcttatctgttattgcctggacaccattgccgaaaatcaagccaagaacgaacacctgcaaaaggaaaacgaacgcctgctaagagactggaatgacgtgcaagggaggttcgaaaaatgcgtcagcgcgaaggaggcgctagaaaccgacctgtacaagaggtttatcctggtattgaacgagaagaaaaccaaaattcggtctctgcacaacaaactgctaaacgccgctcaagaacgggagaaggatatcaaacaggaaggggagacagccatttgctcggagatgacagcagatagagatccagtctatgatgagagtactgatgaggaaagcgagaatcagacagatttgagcgggctggcttctgctgctgtaagcaaggacgactctatcatctcatctctggacgtgaccgacattgcgcctagtaggaagcgtcgacagcggatgcagcggaacctgggcaccgaacccaagatggcaccccaggaaaatcaactacaggagaaggagaaacccgacagctcactgccggagacatctaagaaggagcacataagtgccgagaatatgagtctcgagaccttgagaaatagtagtccggaagacctgtttgatgagatttag

SEQ ID NO: 212447 - DNA, 1005 bp, Artificial Sequence
  derived and/or modified sequence
atggagagaaagatttcacgcatccacctggtctccgagcctagcattacgcatttcctgcaggtctcatgggagaaaacactggaatcagggttcgttatcaccttgactgatggacattccgcgtggaccggaaccgtctctgagagtgagatatcccaggaggccgacgatatggcaatggagaaaggcaagtacgtgggtgaactaagaaaggcacttctgagcggagcaggccctgcagatgtctacaccttcaatttctcgaaggaaagctgttacttcttcttcgagaaaaatctcaaggatgtgtcttttcgcctcgggagctttaatcttgaaaaagtagaaaatccggcagaggtcattagagagctgatctgctactgtcttgatactatcgcagagaatcaagctaaaaacgaacacttgcaaaaggagaacgagaggctgctgcgcgactggaacgacgtgcagggcagatttgagaagtgcgtgtctgccaaggaagccctcgaaactgacttgtataagaggtttatcctggtgctcaatgagaaaaagactaaaattcgatcccttcataataaactgctgaatgctgcccaggagcgagaaaaggacattaagcaggaaggagaaaccgccatatgtagcgagatgacagctgaccgagatccagtatatgacgaatcaaccgatgaggagtcggagaaccagaccgatctgagcggattggcctccgctgctgttagcaaagatgactcaatcatcagctcactcgatgtcacagatattgcaccaagtcgtaagcggcgtcagcgaatgcagcgcaatttgggaacagagcctaagatggccccacaggaaaatcaactgcaagaaaaagagaagccagattctagtctccccgagactagtaagaaagagcacatttcagctgagaatatgtctttagagactttgcgcaattcatcacccgaggacctcttcgacgaaatatag

SEQ ID NO: 212448 - DNA, 1696 bp, Artificial Sequence
  derived and/or modified sequence
cgggatttagatcacgtcccgcaggccggcggaagtagctgatactctcattggttgcaaaaccttgatctgtgaaagcgggcgttttggaagataccggaagtagagtcacggagaggtaggatccggaagtggggctgcctctttaaataacaaaaatctgaggtattaagaaatggagagaaaaataagcagaatccaccttgtttctgaacccagtataactcattttctacaagtatcttgggagaaaacactggaatctggttttgttattacacttactgatggtcattcagcatggactgggacagtttctgaatcagagatttcccaagaagctgatgacatggcaatggaaaaagggaaatatgttggtgaactgagaaaagcattgttgtcaggagcaggaccagctgatgtatacacgtttaatttttctaaagagtcttgttatttcttctttgagaaaaacctgaaagatgtctcattcagacttggttccttcaacctagagaaagttgaaaacccagctgaagtcattagagaacttatttgttattgcttggacaccattgcagaaaatcaagccaaaaatgagcacctgcagaaagaaaatgaaaggcttctgagagattggaatgatgttcaaggacgatttgaaaaatgtgtgagtgctaaggaagctttggagactgatctttataagcggtttattctggtgttgaatgagaagaaaacaaaaatcagaagtttgcataataaattattaaatgcagctcaagaacgagaaaaggacatcaaacaagaaggggaaactgcaatctgttctgaaatgactgctgaccgagatccagtctatgatgagagtactgatgaggaaagtgaaaaccaaactgatctctctgggttggcttcagctgctgtaagtaaagatgattccattatttcaagtcttgatgtcactgatattgcaccaagtagaaaaaggagacagcgaatgcaaagaaatcttgggacagaacctaaaatggctcctcaggagaatcagcttcaagaaaaggaaaagcctgattcttcactacctgagacgtctaaaaaggagcacatctcagctgaaaacatgtctttagaaactctgagaaacagcagcccagaagacctctttgatgagatttaacagtctcaaaaaatactttgatgttcactagactatgttttctattcatttctttaaaatgaaaaaggagaatttcaagtcagcagccgctattaccgtatcttacaatttaattacatacacagtgaattgaaaccattgtgcaaaatggattacacatgtatacaaagatacgatttgatgatgacactggcacattattctaaactattcattcagcatgcctataattacataaattgtatgagactttttgttgcaaaggacacatttatcatattcattcacacatattatatgtgatagctgtccaacatcctgtctgggaagattttgaaaacaggacaaagaaaacatcattttaaaatgtcttcagctttttttgaatagacgtattcaaacatattctgaacattgatgtttgaacattttaatttgtgtgatgatgtagaaaatataattttagtttgtacataaacattgtgaaaatctgataataaaatttttgatacattg

SEQ ID NO: 212449 - DNA, 1530 bp, Artificial Sequence
  derived and/or modified sequence
tgaaagcgggcgttttggaagataccggaagtagagtcacggagaggtattaagaaatggagagaaaaataagcagaatccaccttgtttctgaacccagtataactcattttctacaagtatcttgggagaaaacactggaatctggttttgttattacacttactgatggtcattcagcatggactgggacagtttctgaatcagagatttcccaagaagctgatgacatggcaatggaaaaagggaaatatgttggtgaactgagaaaagcattgttgtcaggagcaggaccagctgatgtatacacgtttaatttttctaaagagtcttgttatttcttctttgagaaaaacctgaaagatgtctcattcagacttggttccttcaacctagagaaagttgaaaacccagctgaagtcattagagaacttatttgttattgcttggacaccattgcagaaaatcaagccaaaaatgagcacctgcagaaagaaaatgaaaggcttctgagagattggaatgatgttcaaggacgatttgaaaaatgtgtgagtgctaaggaagctttggagactgatctttataagcggtttattctggtgttgaatgagaagaaaacaaaaatcagaagtttgcataataaattattaaatgcagctcaagaacgagaaaaggacatcaaacaagaaggggaaactgcaatctgttctgaaatgactgctgaccgagatccagtctatgatgagagtactgatgaggaaagtgaaaaccaaactgatctctctgggttggcttcagctgctgtaagtaaagatgattccattatttcaagtcttgatgtcactgatattgcaccaagtagaaaaaggagacagcgaatgcaaagaaatcttgggacagaacctaaaatggctcctcaggagaatcagcttcaagaaaaggaaaagcctgattcttcactacctgagacgtctaaaaaggagcacatctcagctgaaaacatgtctttagaaactctgagaaacagcagcccagaagacctctttgatgagatttaacagtctcaaaaaatactttgatgttcactagactatgttttctattcatttctttaaaatgaaaaaggagaatttcaagtcagcagccgctattaccgtatcttacaatttaattacatacacagtgaattgaaaccattgtgcaaaatggattacacatgtatacaaagatacgatttgatgatgacactggcacattattctaaactattcattcagcatgcctataattacataaattgtatgagactttttgttgcaaaggacacatttatcatattcattcacacatattatatgtgatagctgtccaacatcctgtctgggaagattttgaaaacaggacaaagaaaacatcattttaaaatgtcttcagctttttttgaatagacgtattcaaacatattctgaacattgatgtttgaacattttaatttgtgtgatgatgtagaaaatataattttagttt

SEQ ID NO: 212450 - protein, 152 aa, Artificial Sequence [sequence omitted]

SEQ ID NO: 212451 - protein, 34 aa, Artificial Sequence
  derived and/or modified sequence
MSLVIPEKFQHILRVLNTNIDGRRKIAFAITAIK

SEQ ID NO: 212452 - protein, 82 aa, Artificial Sequence
  derived and/or modified sequence
MQNPRQYKIPDWFLNRQKDVKDGKYSQVLANGLDNKLREDLERLKKIRAHRGLRHFWGLRVRGQHTKTTGRRGRTVGVSKKK

SEQ ID NO: 212453 - DNA, 459 bp, Artificial Sequence
  derived and/or modified sequence
atgagcctcgttatacccgagaaattccagcacatcctgagagtccttaataccaatatagatggcagacgcaagatcgctttcgcaatcaccgcaattaaaggggttggtaggcgctatgcccatgtggtccttcgtaaagccgatattgaccttactaagagggccggcgagctcaccgaggacgaggtggagcgggtcattaccataatgcagaaccctaggcagtacaaaattccagattggttcctgaatagacagaaggatgtgaaagatggtaaatactcacaggtgcttgccaatgggctggacaataaattaagggaggatttagaacgtctgaagaagattagggcacaccggggcttaaggcatttctggggcttacgggtcagaggccagcacaccaaaaccacagggagacgaggacgtaccgtgggcgtgagtaaaaagaaatag

SEQ ID NO: 212454 - DNA, 459 bp, Artificial Sequence
  derived and/or modified sequence
atgtcactggtgataccagagaagttccaacatatccttcgggtgctcaacacaaacatagacggccgacggaagatagctttcgccattactgcgataaagggagtcgggagacggtatgcacacgttgtgctgagaaaggccgatattgatctgacaaagcgtgctggggagctgaccgaagacgaggtcgagagggtgataacgatcatgcagaacccgcgtcagtataagataccagattggtttctgaatcgccagaaggacgtgaaggatggaaagtattctcaggtcctcgcaaacggcctcgacaacaaacttcgcgaggacttagagcgactaaagaagattcgcgcacacaggggccttcggcatttctggggtctgcgtgtgcgcgggcagcataccaagacaactggacggaggggaaggacagtcggtgtcagcaagaagaaatag

SEQ ID NO: 212455 - DNA, 459 bp, Artificial Sequence
  derived and/or modified sequence
atgtccctggtaattcctgagaagttccaacacatactcagagtgttgaatacaaacatagacggccgaaggaagatcgccttcgccatcacggctattaagggggtgggcagacgatatgcacatgttgtacttcggaaggcagacatcgatctgactaagcgagctggtgaattaaccgaggacgaggtggagagggtcataaccatcatgcagaatccaaggcaatataaaatacctgattggttcctgaacagacagaaggacgtaaaagacggaaaatattctcaggttttggcgaatgggctcgataataagttgcgggaagatctcgagcggctcaagaagattcgcgcccatagagggcttcgccatttctggggcttacgagtgcgggggcagcacactaagaccacagggcgcaggggcagaaccgtcggggttagcaaaaagaagtag

SEQ ID NO: 212456 - DNA, 105 bp, Artificial Sequence
  derived and/or modified sequence
atgtccctggttataccagagaaatttcagcacattctgagggtgctgaacactaacatagacggaagacgtaagatcgcattcgcaattaccgcaatcaaatag

SEQ ID NO: 212457 - DNA, 459 bp, Artificial Sequence
  derived and/or modified sequence
atgtctctggttatccccgagaaatttcaacatatcctgcgcgtgctaaacactaacatcgacggacgccgcaaaatagccttcgcaattaccgctatcaagggggtggggcggaggtatgcgcacgtggttctgaggaaagccgatattgacctaaccaaaagggcaggcgaactgactgaggacgaggtggagcgggtgatcactattatgcagaacccaaggcagtacaaaatccctgattggtttctgaaccgacagaaagatgtgaaagacggcaaatacagtcaagtgttagcgaatggcctcgacaacaagctcagagaggacttggagcgcctgaagaagattagagcccacagaggtctcaggcacttttggggactccgagtaagggggcagcacacaaaaacgacaggcagacgcgggcgtaccgtgggcgtatccaaaaagaaatag

SEQ ID NO: 212458 - DNA, 459 bp, Artificial Sequence
  derived and/or modified sequence
atgagcctcgttatcccggagaaatttcagcatatcctgagagtgctcaatactaatatagacggtcgccggaagattgcgtttgctatcacagccataaaaggggtgggcaggagatacgcccacgtggtgttacgtaaggccgacatcgacctcactaaacgggccggcgaactgaccgaagacgaggtcgagcgcgtgattaccattatgcagaatcctcgacagtacaagatccctgactggttcttgaatcggcagaaagacgtgaaagatggaaagtacagccaagtcctcgccaatggacttgataataaattgcgagaagacctggagaggttgaagaaaatcagagcccaccgaggcctccgccacttttggggattgcgagtgcggggacagcacactaaaacaaccggtcggagagggcgcacagtgggagtgagcaagaaaaagtag

SEQ ID NO: 212459 - DNA, 249 bp, Artificial Sequence
  derived and/or modified sequence
atgcagaacccccggcagtataagatccccgattggtttctgaatagacagaaagatgtgaaggacgggaagtatagccaggtccttgcaaacgggcttgacaataaactcagagaagatctcgagcgactcaagaaaatccgtgctcaccgtggcctgagacacttttgggggctgcgagttcgcggacaacatactaaaactactggcagaaggggcagaacggtgggagtttctaagaagaaatag

SEQ ID NO: 212460 - DNA, 249 bp, Artificial Sequence
  derived and/or modified sequence
atgcagaatcctcgccagtacaagatccccgactggtttcttaataggcaaaaggatgtgaaggatgggaagtacagtcaagtactcgccaatggattggataacaagttgagggaggacctggagcgactgaaaaaaatcagagcccaccgcggcctgcggcatttctggggcctgagggtgagaggtcagcataccaagacgacaggacgcagaggccgcaccgtgggcgtgtctaagaagaaatag

SEQ ID NO: 212461 - DNA, 249 bp, Artificial Sequence
  derived and/or modified sequence
atgcagaaccccaggcagtacaaaattcccgactggtttctgaatcggcaaaaagacgtgaaggatgggaagtactctcaggtgttggcaaatgggctggacaataaactgagagaggacctggaacggttaaagaaaatccgcgcccatcgaggcctgcggcatttctggggccttcgcgtgcgggggcagcataccaaaacaaccgggaggaggggccggaccgtcggcgtaagcaaaaaaaagtag

SEQ ID NO: 212462 - DNA, 249 bp, Artificial Sequence
  derived and/or modified sequence
atgcaaaatcctaggcagtataaaataccggattggtttctgaatcgccagaaagacgtcaaggatggaaaatacagccaagtactcgccaatggcctcgacaacaagctgagagaagatctagaaaggttaaagaaaattcgcgcccacagaggactaagacatttttgggggctgcgagtacgcggccaacacacgaagacgacaggtcgccgcggcaggaccgtaggcgttagtaagaaaaagtag

SEQ ID NO: 212463 - DNA, 249 bp, Artificial Sequence
  derived and/or modified sequence
atgcagaatccaaggcagtacaaaattccggattggttcctgaacagacagaaagacgtcaaggacggaaagtactcccaggtactggcgaatggactcgataataagctgcgggaagacctagaacggttaaaaaagatccgtgcccacaggggcctcagacacttttggggactgagagtcagagggcaacacactaagactacaggcaggcgggggcggacagtgggagtttctaagaagaagtag

SEQ ID NO: 212464 - DNA, 459 bp, Artificial Sequence
  derived and/or modified sequence
atgagcctggtgattcctgagaagttccagcacatcctgcgggtgctgaacaccaacattgatggaagaaggaagatcgcctttgccatcacagccatcaagggcgtgggccgccgctatgcccacgtggtgctgaggaaggctgacatcgacctgaccaagagagctggggagctgacagaagatgaggtggagagggtcatcaccatcatgcagaacccccggcagtacaagatcccagactggttcctgaaccggcagaaggatgtgaaggatggcaagtacagccaggtgctggccaacggcctggacaacaagctgcgggaggacctggagcggctgaagaagatccgggcccaccggggcctgcggcacttctggggcctgcgggtgcggggccagcacaccaagaccactggaagaagaggccgcacagtgggcgtgtccaagaagaagtag

SEQ ID NO: 212465 - DNA, 105 bp, Artificial Sequence
  derived and/or modified sequence
atgagcctggtgattcctgagaagttccagcacatcctgcgggtgctgaacaccaacattgatggaagaaggaagatcgcctttgccatcacagccatcaagtag

SEQ ID NO: 212466 - DNA, 249 bp, Artificial Sequence
  derived and/or modified sequence
atgcagaacccccggcagtacaagatcccagactggttcctgaaccggcagaaggatgtgaaggatggcaagtacagccaggtgctggccaacggcctggacaacaagctgcgggaggacctggagcggctgaagaagatccgggcccaccggggcctgcggcacttctggggcctgcgggtgcggggccagcacaccaagaccactggaagaagaggccgcacagtgggcgtgtccaagaagaagtag

SEQ ID NO: 212467 - DNA, 459 bp, Artificial Sequence
  derived and/or modified sequence
atgagcctggtgatccccgagaagttccagcacatcctgcgggtgctcaatacgaacattgacggcagaaggaagattgcttttgctatcacggccattaagggggtcggccgtcgttacgcgcacgttgtgctccggaaagctgacattgacctgaccaaacgcgcgggcgaactcaccgaggacgaagtagaaagggtgatcacaataatgcagaacccacgacagtataagatcccagactggtttctgaacagacagaaggatgtaaaagatgggaaatacagtcaagtgttagccaatggtctggataataagcttcgagaggatttggagcggctgaagaagatcagggcccataggggccttagacacttctggggattaagggtgagaggacagcatacaaaaaccacggggaggcgcggaaggacagtcggcgtgtcaaaaaaaaagtag

SEQ ID NO: 212468 - DNA, 459 bp, Artificial Sequence
  derived and/or modified sequence
atgagcctggtgatccccgagaagttccagcacatcctgcgggtgttgaacacaaacatcgacgggcgtcgcaagatagcctttgccatcacagccatcaaaggcgtagggcgacggtacgcccatgtggtcctacgtaaggcagacattgacctaacgaaacgggcaggggaactaaccgaggacgaagttgagagagtcattacgatcatgcagaatccccgccagtacaagattcccgattggttcctcaaccgacagaaggacgtcaaagacggcaaatacagtcaggttctcgccaatgggttagataataaattgcgcgaagacctggagagacttaagaagattcgggcacaccggggcctgcgccatttctggggtttacgggtgaggggacagcataccaaaactaccggccggcgtggccgcacggtgggcgtgtcaaaaaagaaatag

SEQ ID NO: 212469 - DNA, 459 bp, Artificial Sequence
  derived and/or modified sequence
atgagcctggtgatccccgagaagttccagcacatcctgcgggtgctgaacaccaatatcgacggtaggcgtaaaatcgctttcgctatcactgccataaaaggcgtcggacgtcgttacgcccacgtggtcttgcggaaggcagatattgatctgacgaaaagagccggcgagctgactgaggacgaagtggagagagtgatcaccataatgcaaaacccgcgccagtacaaaatccctgattggttcctcaatcggcagaaggacgtgaaagatggaaagtactcccaggttttggctaatggactggacaataaattaagagaggatttggagagactcaagaagattcgcgcacaccgagggctgcggcacttttggggcctgcgggtgcgggggcagcataccaaaacaaccggacggcgcggccgaaccgtcggcgtttctaagaagaaatag

SEQ ID NO: 212470 - DNA, 105 bp, Artificial Sequence
  derived and/or modified sequence
atgagcctggtgatccccgagaagttccagcacatcctgcgggtgctcaataccaatatcgacggcagaaggaagatagcatttgctattaccgccataaaatag

SEQ ID NO: 212471 - DNA, 459 bp, Artificial Sequence
  derived and/or modified sequence
atgagcctggtgatccccgagaagttccagcacatcctgcgggtgctgaacacaaatatcgacggccgtcgtaaaatcgccttcgccatcacggctattaagggagtggggcgcaggtacgctcacgtcgttctgcgaaaagctgacatcgacttaacgaagagagcaggcgagctgactgaagacgaggttgaacgcgttataacaatcatgcagaatcctcgccagtacaagatccctgactggtttttaaatcgccagaaagacgtcaaggatggcaaatactcacaggtcctcgcaaacgggctagacaataagctccgtgaagacttggagagattgaaaaagatccgggctcacaggggattgagacacttctggggtctgagagtgcgtggccagcataccaaaacaacaggccgccggggtcggaccgtgggcgtgtccaaaaaaaaatag

SEQ ID NO: 212472 - DNA, 459 bp, Artificial Sequence
  derived and/or modified sequence
atgagcctggtgatccccgagaagttccagcacatcctgcgggtgctgaatactaacattgacggaagaaggaaaatcgcctttgccatcactgccatcaagggcgtcggaaggaggtatgctcatgtcgtcctgcgaaaggccgatatcgacttgacaaagagggctggcgaactgacggaagatgaggtggagagagtgataaccataatgcagaacccacggcagtataagattccagactggttcctgaacaggcaaaaagatgtgaaagacggcaagtactcccaagttctcgcaaatgggctcgacaacaagcttagagaggacttggagaggcttaagaagataagggcccacagggggcttcgtcatttttggggcttaagagtgagaggccaacacacaaagacaaccggaagaagagggcgcaccgtgggtgtatctaaaaagaagtag

SEQ ID NO: 212473 - DNA, 249 bp, Artificial Sequence
  derived and/or modified sequence
atgcagaacccccggcagtacaagatccccgactggttcctgaacagacaaaaggatgtaaaagacggaaaatattcacaggtcctcgctaacggactggataacaaattacgagaggacctggagcggttgaagaaaatccgggctcatcggggattgagacatttctgggggttgcgggtgcggggacagcacaccaagacaaccggaagaagaggaagaactgtgggcgtgtctaaaaagaaatag

SEQ ID NO: 212474 - DNA, 249 bp, Artificial Sequence
  derived and/or modified sequence
atgcagaacccccggcagtacaagatccccgactggttcctgaacagacagaaggatgtaaaggatggcaaatatagccaagttttggccaacgggttggataataagttgagagaagatttagagcgattgaagaagataagagcacaccgcggcctgagacatttctgggggctacgggtaagaggtcagcacactaaaacgaccggccgtcgaggtcgcacagtgggagtgtccaagaagaaatag

SEQ ID NO: 212475 - DNA, 249 bp, Artificial Sequence
  derived and/or modified sequence
atgcagaacccccggcagtacaagatccccgactggttcctgaacagacagaaagatgtcaaggacgggaaatactcacaggttctggccaatggattggataacaaacttcgtgaggatctagaacgactgaaaaagatcagggcgcatagggggttaagacacttctgggggctccgggtgcgggggcagcatacaaaaaccaccggccgccggggaaggaccgttggggttagcaagaagaaatag

SEQ ID NO: 212476 - DNA, 249 bp, Artificial Sequence
  derived and/or modified sequence
atgcagaacccccggcagtacaagatccccgactggttcctgaacaggcagaaagatgtgaaggatgggaaatatagccaggtgctagctaatggactcgataacaagctgcgcgaggacctcgaaaggctaaagaagattcgggctcacagaggtctccgccatttctggggacttagagtgcgaggacagcacactaaaactactggccgtcggggtagaaccgtgggcgtgagtaaaaagaagtag

SEQ ID NO: 212477 - DNA, 249 bp, Artificial Sequence
  derived and/or modified sequence
atgcagaacccccggcagtacaagatccccgactggttcctgaaccgtcaaaaggacgtgaaagatggtaagtattcacaggtgttagccaacggactcgataacaagctgagggaagacttagaacgactgaagaagatacgggcacatcgcggtctcagacatttttggggtttgcgagtgcgcgggcaacatactaagactacaggcagacgcggaaggactgtgggggtcagcaagaagaagtag

SEQ ID NO: 212478 - DNA, 459 bp, Artificial Sequence
  derived and/or modified sequence
atgagtctggttatccctgaaaaattccagcacatcctccgagtcttgaataccaacatcgacgggcgacgtaaaatcgctttcgcaataaccgccattaaaggcgttgggaggaggtatgcccacgtagtgcttcgaaaggctgacatagatctgactaaaagggccggagagctcactgaagacgaggtggagagggtcatcacaatcatgcagaaccctcgacaatataaaatccctgactggttcctgaatcggcagaaagacgtgaaggacggaaaatactcccaggttttggccaatgggttggataataagttacgcgaagacctggaaagactgaagaagattcgtgcgcacaggggactccgccacttctggggtctgcgggtaagaggacagcacacaaagaccacaggcaggcggggacggaccgtcggtgtttccaagaaaaagtag

SEQ ID NO: 212479 - DNA, 459 bp, Artificial Sequence
  derived and/or modified sequence
atgagtctcgtaatccccgaaaaatttcaacatatattgagagttctcaatactaatatcgatggacggcgtaagattgctttcgctattacagcaatcaagggggtggggagaagatatgcacacgttgtgctaaggaaggcagatatagatttgacaaaaagagctggcgagctcacagaggatgaggtggaacgagtgatcaccatcatgcagaacccccgacaatataagattccggattggtttctcaacaggcaaaaggacgtgaaggatggaaagtacagtcaggtgttggcaaatggcctagataacaaacttagggaggacctggagaggttgaagaagattagagcacacaggggtctcagacatttctgggggctgcgggtgcgagggcaacatactaaaacaaccggcagaaggggccgaaccgttggggtaagcaaaaagaaatag

SEQ ID NO: 212480 - DNA, 459 bp, Artificial Sequence
  derived and/or modified sequence
atgtctttggtaattcccgaaaaatttcagcatatactgcgagtgcttaacacgaacattgacggcagacgcaaaatcgcattcgccatcactgctatcaaaggtgtgggtcgaagatacgcccatgtggtgctccgaaaagccgacatagatctcactaaacgcgcaggagaactaaccgaagatgaagtggagcgagttatcaccattatgcagaatccgagacaatataaaattcctgactggttcctcaatagacaaaaagacgttaaggatggaaagtattcccaagtgcttgccaatggtttggataacaagctgcgcgaggacctggagaggcttaaaaagataagagcccaccgcggtctcaggcacttctggggtctgagggtccgcggacaacatacaaaaactaccggcaggcgaggacgtacagttggcgtgagtaagaagaaatag

SEQ ID NO: 212481 - DNA, 105 bp, Artificial Sequence
  derived and/or modified sequence
atgtcgctggtgatccccgaaaagttccagcacatcttgagagtgcttaacaccaatattgatggcagaaggaagattgcctttgctataaccgctatcaaatag

SEQ ID NO: 212482 - DNA, 459 bp, Artificial Sequence
  derived and/or modified sequence
atgtctctagtgattcctgagaaatttcagcacattctaagagtccttaacaccaacattgacggtagacggaaaatcgccttcgccattactgccattaaaggtgtgggcagacgttatgcacacgtagtgctcaggaaggcagatatcgatttaaccaagcgcgctggtgaattaacagaggatgaagttgagcgagtcattacaatcatgcagaatccgcgacagtataaaatcccggactggtttctgaaccggcagaaagacgtcaaggatggcaaatactcacaggtgctggccaacggactggacaataaactgagagaagatttggaacggctcaaaaagataagagcccaccgcggactccgccacttctggggactcagggtgagaggacagcatacgaagactacaggcaggagagggaggactgtgggagtgtcaaaaaaaaaatag

SEQ ID NO: 212483 - DNA, 459 bp, Artificial Sequence
  derived and/or modified sequence
atgtcgctagtcatcccagagaaatttcagcacattctgcgggtgctgaataccaatattgacggtagacggaagattgcatttgccattaccgctataaaaggtgtcggaaggcgctacgcgcacgtggtattgagaaaggctgacattgacctcacaaagcgcgcaggagaactgacggaggatgaggtagagagggtgattacaattatgcagaatccacggcagtacaagatcccagactggttcttgaaccggcagaaggatgtcaaggacggaaaatatagccaggtgctggctaatggactcgataacaaactgagagaagatctggaacgcctgaagaaaatcagagcccataggggcctgcggcacttctggggtctaagagtcaggggccaacacaccaaaacaacaggacggagaggtcgaaccgtgggagtctccaagaaaaagtag

SEQ ID NO: 212484 - DNA, 249 bp, Artificial Sequence
  derived and/or modified sequence
atgcagaatcccaggcaatacaagatcccagactggttcctcaatcgacagaaggacgtgaaggacggcaagtactcccaggtgcttgccaacggcttagataataagctgcgcgaggacctcgagcgtctgaaaaagattagggcacatcgtggtcttcgtcacttttggggcttgcgtgtcagaggacagcacactaaaacaactggcagacggggtcggacggtaggcgtgtcaaagaaaaaatag

SEQ ID NO: 212485 - DNA, 249 bp, Artificial Sequence
  derived and/or modified sequence
atgcagaatccccgacagtataagatccctgattggttcttgaatcgtcagaaagacgttaaggacggaaaatattcccaggtactggccaacggcctggataataaattgcgagaggacctagagcgcctcaagaaaatccgtgcacaccggggtttacgtcacttctggggtttgcgggtgagaggacagcacacaaagacgacaggacggagaggccgaaccgtgggtgtttcaaagaaaaagtag

SEQ ID NO: 212486 - DNA, 249 bp, Artificial Sequence
  derived and/or modified sequence
atgcagaatcccagacagtacaagatccccgattggttcctgaacagacagaaagacgtcaaggacggaaagtattctcaggttctggctaacggcttggacaacaaactgagagaggacttagagcgattgaagaagattagggcacatcgcggtctaaggcatttctgggggctgcgcgtccgtggacagcatacaaagaccaccggcaggagaggccgaaccgtaggggtgagcaagaaaaagtag

SEQ ID NO: 212487 - DNA, 249 bp, Artificial Sequence
  derived and/or modified sequence
atgcagaatcctagacaatacaagatccccgactggttcctcaatagacagaaggacgtgaaggatggcaagtattcacaagtccttgctaacgggcttgataataaacttcgtgaggacctggagcggctgaaaaaaatacgggcacatcgtgggctgcggcacttttggggcctgagggttcgcggtcagcacaccaaaacaactggaagacggggaagaaccgtcggcgtgtccaagaaaaagtag

SEQ ID NO: 212488 - DNA, 249 bp, Artificial Sequence
  derived and/or modified sequence
atgcagaacccccgacaatacaagattcccgattggttcctgaacagacagaaggacgtcaaagacggcaagtatagccaggtccttgctaacgggcttgataataagctgcgggaggacctcgagcggttaaagaagatccgggctcaccggggactgcgacacttttggggcttacgggtgagaggtcagcacaccaagaccacaggcagacgcggaagaactgtgggtgtgtccaagaaaaagtag

SEQ ID NO: 212489 - DNA, 613 bp, Artificial Sequence
  derived and/or modified sequence
cttctcctagatcgcaccgcctcttcctcctggaagctatataatgatatcgcgtcacttccgctctctcttccacaggaggcctacacgccgccgcttgtgctgcagccatgtctctagtgatccctgaaaagttccagcatattttgcgagtactcaacaccaacatcgatgggcggcggaaaatagcctttgccatcactgccattaagggtgtgggccgaagatatgctcatgtggtgttgaggaaagcagacattgacctcaccaagagggcgggagaactcactgaggatgaggtggaacgtgtgatcaccattatgcagaatccacgccagtacaagatcccagactggttcttgaacagacagaaggatgtaaaggatggaaaatacagccaggtcctagccaatggtctggacaacaagctccgtgaagacctggagcgactgaagaagattcgggcccatagagggctgcgtcacttctggggccttcgtgtccgaggccagcacaccaagaccactggccgccgtggccgcaccgtgggtgtgtccaagaagaaataagtctgtaggccttgtctgttaataaatagtttatatacctatgg

SEQ ID NO: 212490 - DNA, 212 bp, Artificial Sequence
  derived and/or modified sequence
cttctcctagatcgcaccgcctcttcctcctggaagctatataatgatatcgcgtcacttccgctctctcttccacaggaggcctacacgccgccgcttgtgctgcagccatgtctctagtgatccctgaaaagttccagcatattttgcgagtactcaacaccaacatcgatgggcggcggaaaatagcctttgccatcactgccattaag

SEQ ID NO: 212491 - DNA, 589 bp, Artificial Sequence
  derived and/or modified sequence
ctctcttccacaggaggcctacacgccgccgcttgtgctgcagccatgtttactgtgtctgatttcttcccccgtactttttcaactagtctctagtgatccctgaaaagttccagcatattttgcgagtactcaacaccaacatcgatgggcggcggaaaatagcctttgccatcactgccattaagggtgtgggccgaagatatgctcatgtggtgttgaggaaagcagacattgacctcaccaagagggcgggagaactcactgaggatgaggtggaacgtgtgatcaccattatgcagaatccacgccagtacaagatcccagactggttcttgaacagacagaaggatgtaaaggatggaaaatacagccaggtcctagccaatggtctggacaacaagctccgtgaagacctggagcgactgaagaagattcgggcccatagagggctgcgtcacttctggggccttcgtgtccgaggccagcacaccaagaccactggccgccgtggccgcaccgtgggtgtgtccaagaagaaataagtctgtaggccttgtctgttaataaatagtttatatacctatgg

SEQ ID NO: 212492 - DNA, 685 bp, Artificial Sequence
  derived and/or modified sequence
cacgccgccgcttgtgctgcagccatgtctctagtgatccctgaaaagttccagcatattttgcgagtactcaacaccaacatcgatgggcggcggaaaatagcctttgccatcactgccattaagtagagacagggtttcaccatgttggccaggctggttttgaactcctgccctcaatgtcatctgcccacttgggcctcccaaagtgctgggattacaggcgtgagccactgcgaccggcccaaagttaaccttctgtcgaacggtttatatctggaaagggtgtgggccgaagatatgctcatgtggtgttgaggaaagcagacattgacctcaccaagagggcgggagaactcactgaggatgaggtggaacgtgtgatcaccattatgcagaatccacgccagtacaagatcccagactggttcttgaacagacagaaggatgtaaaggatggaaaatacagccaggtcctagccaatggtctggacaacaagctccgtgaagacctggagcgactgaagaagattcgggcccatagagggctgcgtcacttctggggccttcgtgtccgaggccagcacaccaagaccactggccgccgtggccgcaccgtgggtgtgtccaagaagaaataagtctgtaggccttgtctgttaataaatagtttatatacctatgg

SEQ ID NO: 212493 - DNA, 654 bp, Artificial Sequence
  derived and/or modified sequence
cttctcctagatcgcaccgcctcttcctcctggaagctatataatgatatcgcgtcacttccgctctctcttccacaggaggcctacacgccgccgcttgtgctgcagccatgtttactgtgtctgatttcttcccccgtactttttcaactagtctctagtgatccctgaaaagttccagcatattttgcgagtactcaacaccaacatcgatgggcggcggaaaatagcctttgccatcactgccattaagggtgtgggccgaagatatgctcatgtggtgttgaggaaagcagacattgacctcaccaagagggcgggagaactcactgaggatgaggtggaacgtgtgatcaccattatgcagaatccacgccagtacaagatcccagactggttcttgaacagacagaaggatgtaaaggatggaaaatacagccaggtcctagccaatggtctggacaacaagctccgtgaagacctggagcgactgaagaagattcgggcccatagagggctgcgtcacttctggggccttcgtgtccgaggccagcacaccaagaccactggccgccgtggccgcaccgtgggtgtgtccaagaagaaataagtctgtaggccttgtctgttaataaatagtttatatacctatgg

SEQ ID NO: 212494 - DNA, 459 bp, Artificial Sequence
  derived and/or modified sequence
atgagcctggtgatccccgagaagttccagcacatcctgagagtgctgaacaccaacatcgacggcagaagaaagatcgccttcgccatcaccgccatcaagggcgtgggcagaagatacgcccacgtggtgctgagaaaggccgacatcgacctgaccaagagagccggcgagctgaccgaggacgaggtggagagagtgatcaccatcatgcagaaccccagacagtacaagatccccgactggttcctgaacagacagaaggacgtgaaggacggcaagtacagccaggtgctggccaacggcctggacaacaagctgagagaggacctggagagactgaagaagatcagagcccacagaggcctgagacacttctggggcctgagagtgagaggccagcacaccaagaccaccggcagaagaggcagaaccgtgggcgtgagcaagaagaagtag

SEQ ID NO: 212495 - DNA, 105 bp, Artificial Sequence
  derived and/or modified sequence
atgagcctggtgatccccgagaagttccagcacatcctgagagtgctgaacaccaacatcgacggcagaagaaagatcgccttcgccatcaccgccatcaagtag

SEQ ID NO: 212496 - DNA, 249 bp, Artificial Sequence
  derived and/or modified sequence
atgcagaaccccagacagtacaagatccccgactggttcctgaacagacagaaggacgtgaaggacggcaagtacagccaggtgctggccaacggcctggacaacaagctgagagaggacctggagagactgaagaagatcagagcccacagaggcctgagacacttctggggcctgagagtgagaggccagcacaccaagaccaccggcagaagaggcagaaccgtgggcgtgagcaagaagaagtag

SEQ ID NO: 212497 - protein, 723 aa, Artificial Sequence
  derived and/or modified sequence
MAAAATMAAAARELVLRAGTSDMEEEEGPLAGGPGLQEPLQLGELDITSDEFILDEVDVHIQANLEDELVKEALKTGVDLRHYSKQVELELQQIEQKSIRDYIQESENIASLHNQITACDAVLERMEQMLGAFQSDLSSISSEIRTLQEQSGAMNIRLRNRQAVRGKLGELVDGLVVPSALVTAILEAPVTEPRFLEQLQELDAKAAAVREQEARGTAACADVRGVLDRLRVKAVTKIREFILQKIYSFRKPMTNYQIPQTALLKYRFFYQFLLGNERATAKEIRDEYVETLSKIYLSYYRSYLGRLMKVQYEEVAEKDDLMGVEDTAKKGFFSKPSLRSRNTIFTLGTRGSVISPTELEAPILVPHTAQRGEQRYPFEALFRSQHYALLDNSCREYLFICEFFVVSGPAAHDLFHAVMGRTLSMTLKHLDSYLADCYDAIAVFLCIHIVLRFRNIAAKRDVPALDRYWEQVLALLWPRFELILEMNVQSVRSTDPQRLGGLDTRPHYITRRYAEFSSALVSINQTIPNERTMQLLGQLQVEVENFVLRVAAEFSSRKEQLVFLINNYDMMLGVLMERAADDSKEVESFQQLLNARTQEFIEELLSPPFGGLVAFVKEAEALIERGQAERLRGEEARVTQLIRGFGSSWKSSVESLSQDVMRSFTNFRNGTSIIQGALTQLIQLYHRFHRVLSQPQLRALPARAELINIHHLMVELKKHKPNF

SEQ ID NO: 212498 - protein, 701 aa, Artificial Sequence
  derived and/or modified sequence
MEEEEGPLAGGPGLQEPLQLGELDITSDEFILDEVDVHIQANLEDELVKEALKTGVDLRHYSKQVELELQQIEQKSIRDYIQESENIASLHNQITACDAVLERMEQMLGAFQSDLSSISSEIRTLQEQSGAMNIRLRNRQAVRGKLGELVDGLVVPSALVTAILEAPVTEPRFLEQLQELDAKAAAVREQEARGTAACADVRGVLDRLRVKAVTKIREFILQKIYSFRKPMTNYQIPQTALLKYRFFYQFLLGNERATAKEIRDEYVETLSKIYLSYYRSYLGRLMKVQYEEVAEKDDLMGVEDTAKKGFFSKPSLRSRNTIFTLGTRGSVISPTELEAPILVPHTAQRGEQRYPFEALFRSQHYALLDNSCREYLFICEFFVVSGPAAHDLFHAVMGRTLSMTLKHLDSYLADCYDAIAVFLCIHIVLRFRNIAAKRDVPALDRYWEQVLALLWPRFELILEMNVQSVRSTDPQRLGGLDTRPHYITRRYAEFSSALVSINQTIPNERTMQLLGQLQVEVENFVLRVAAEFSSRKEQLVFLINNYDMMLGVLMERAADDSKEVESFQQLLNARTQEFIEELLSPPFGGLVAFVKEAEALIERGQAERLRGEEARVTQLIRGFGSSWKSSVESLSQDVMRSFTNFRNGTSIIQGALTQLIQLYHRFHRVLSQPQLRALPARAELINIHHLMVELKKHKPNF

SEQ ID NO: 212499 - protein, 598 aa, Artificial Sequence
  derived and/or modified sequence
MEQMLGAFQSDLSSISSEIRTLQEQSGAMNIRLRNRQAVRGKLGELVDGLVVPSALVTAILEAPVTEPRFLEQLQELDAKAAAVREQEARGTAACADVRGVLDRLRVKAVTKIREFILQKIYSFRKPMTNYQIPQTALLKYRFFYQFLLGNERATAKEIRDEYVETLSKIYLSYYRSYLGRLMKVQYEEVAEKDDLMGVEDTAKKGFFSKPSLRSRNTIFTLGTRGSVISPTELEAPILVPHTAQRGEQRYPFEALFRSQHYALLDNSCREYLFICEFFVVSGPAAHDLFHAVMGRTLSMTLKHLDSYLADCYDAIAVFLCIHIVLRFRNIAAKRDVPALDRYWEQVLALLWPRFELILEMNVQSVRSTDPQRLGGLDTRPHYITRRYAEFSSALVSINQTIPNERTMQLLGQLQVEVENFVLRVAAEFSSRKEQLVFLINNYDMMLGVLMERAADDSKEVESFQQLLNARTQEFIEELLSPPFGGLVAFVKEAEALIERGQAERLRGEEARVTQLIRGFGSSWKSSVESLSQDVMRSFTNFRNGTSIIQGALTQLIQLYHRFHRVLSQPQLRALPARAELINIHHLMVELKKHKPNF

SEQ ID NO: 212500 - protein, 125 aa, Artificial Sequence
  derived and/or modified sequence
EFIEELLSPPFGGLVAFVKEAEALIERGQAERLRGEEARVTQLIRGFGSSWKSSVESLSQDVMRSFTNFRNGTSIIQGALTQLIQLYHRFHRVLSQPQLRALPARAELINIHHLMVELKKHKPNF

SEQ ID NO: 212501 - DNA, 2172 bp, Artificial Sequence
  derived and/or modified sequence
atggccgccgccgccaccatggccgccgccgccagagagctggtgctgagagccggcaccagcgacatggaggaggaggagggccccctggccggcggccccggcctgcaggagcccctgcagctgggcgagctggacatcaccagcgacgagttcatcctggacgaggtggacgtgcacatccaggccaacctggaggacgagctggtgaaggaggccctgaagaccggcgtggacctgagacactacagcaagcaggtggagctggagctgcagcagatcgagcagaagagcatcagagactacatccaggagagcgagaacatcgccagcctgcacaaccagatcaccgcctgcgacgccgtgctggagagaatggagcagatgctgggcgccttccagagcgacctgagcagcatcagcagcgagatcagaaccctgcaggagcagagcggcgccatgaacatcagactgagaaacagacaggccgtgagaggcaagctgggcgagctggtggacggcctggtggtgcccagcgccctggtgaccgccatcctggaggcccccgtgaccgagcccagattcctggagcagctgcaggagctggacgccaaggccgccgccgtgagagagcaggaggccagaggcaccgccgcctgcgccgacgtgagaggcgtgctggacagactgagagtgaaggccgtgaccaagatcagagagttcatcctgcagaagatctacagcttcagaaagcccatgaccaactaccagatcccccagaccgccctgctgaagtacagattcttctaccagttcctgctgggcaacgagagagccaccgccaaggagatcagagacgagtacgtggagaccctgagcaagatctacctgagctactacagaagctacctgggcagactgatgaaggtgcagtacgaggaggtggccgagaaggacgacctgatgggcgtggaggacaccgccaagaagggcttcttcagcaagcccagcctgagaagcagaaacaccatcttcaccctgggcaccagaggcagcgtgatcagccccaccgagctggaggcccccatcctggtgccccacaccgcccagagaggcgagcagagataccccttcgaggccctgttcagaagccagcactacgccctgctggacaacagctgcagagagtacctgttcatctgcgagttcttcgtggtgagcggccccgccgcccacgacctgttccacgccgtgatgggcagaaccctgagcatgaccctgaagcacctggacagctacctggccgactgctacgacgccatcgccgtgttcctgtgcatccacatcgtgctgagattcagaaacatcgccgccaagagagacgtgcccgccctggacagatactgggagcaggtgctggccctgctgtggcccagattcgagctgatcctggagatgaacgtgcagagcgtgagaagcaccgacccccagagactgggcggcctggacaccagaccccactacatcaccagaagatacgccgagttcagcagcgccctggtgagcatcaaccagaccatccccaacgagagaaccatgcagctgctgggccagctgcaggtggaggtggagaacttcgtgctgagagtggccgccgagttcagcagcagaaaggagcagctggtgttcctgatcaacaactacgacatgatgctgggcgtgctgatggagagagccgccgacgacagcaaggaggtggagagcttccagcagctgctgaacgccagaacccaggagttcatcgaggagctgctgagcccccccttcggcggcctggtggccttcgtgaaggaggccgaggccctgatcgagagaggccaggccgagagactgagaggcgaggaggccagagtgacccagctgatcagaggcttcggcagcagctggaagagcagcgtggagagcctgagccaggacgtgatgagaagcttcaccaacttcagaaacggcaccagcatcatccagggcgccctgacccagctgatccagctgtaccacagattccacagagtgctgagccagccccagctgagagccctgcccgccagagccgagctgatcaacatccaccacctgatggtggagctgaagaagcacaagcccaacttctag

SEQ ID NO: 212502 - DNA, 2106 bp, Artificial Sequence
  derived and/or modified sequence
atggaggaggaggagggccccctggccggcggccccggcctgcaggagcccctgcagctgggcgagctggacatcaccagcgacgagttcatcctggacgaggtggacgtgcacatccaggccaacctggaggacgagctggtgaaggaggccctgaagaccggcgtggacctgagacactacagcaagcaggtggagctggagctgcagcagatcgagcagaagagcatcagagactacatccaggagagcgagaacatcgccagcctgcacaaccagatcaccgcctgcgacgccgtgctggagagaatggagcagatgctgggcgccttccagagcgacctgagcagcatcagcagcgagatcagaaccctgcaggagcagagcggcgccatgaacatcagactgagaaacagacaggccgtgagaggcaagctgggcgagctggtggacggcctggtggtgcccagcgccctggtgaccgccatcctggaggcccccgtgaccgagcccagattcctggagcagctgcaggagctggacgccaaggccgccgccgtgagagagcaggaggccagaggcaccgccgcctgcgccgacgtgagaggcgtgctggacagactgagagtgaaggccgtgaccaagatcagagagttcatcctgcagaagatctacagcttcagaaagcccatgaccaactaccagatcccccagaccgccctgctgaagtacagattcttctaccagttcctgctgggcaacgagagagccaccgccaaggagatcagagacgagtacgtggagaccctgagcaagatctacctgagctactacagaagctacctgggcagactgatgaaggtgcagtacgaggaggtggccgagaaggacgacctgatgggcgtggaggacaccgccaagaagggcttcttcagcaagcccagcctgagaagcagaaacaccatcttcaccctgggcaccagaggcagcgtgatcagccccaccgagctggaggcccccatcctggtgccccacaccgcccagagaggcgagcagagataccccttcgaggccctgttcagaagccagcactacgccctgctggacaacagctgcagagagtacctgttcatctgcgagttcttcgtggtgagcggccccgccgcccacgacctgttccacgccgtgatgggcagaaccctgagcatgaccctgaagcacctggacagctacctggccgactgctacgacgccatcgccgtgttcctgtgcatccacatcgtgctgagattcagaaacatcgccgccaagagagacgtgcccgccctggacagatactgggagcaggtgctggccctgctgtggcccagattcgagctgatcctggagatgaacgtgcagagcgtgagaagcaccgacccccagagactgggcggcctggacaccagaccccactacatcaccagaagatacgccgagttcagcagcgccctggtgagcatcaaccagaccatccccaacgagagaaccatgcagctgctgggccagctgcaggtggaggtggagaacttcgtgctgagagtggccgccgagttcagcagcagaaaggagcagctggtgttcctgatcaacaactacgacatgatgctgggcgtgctgatggagagagccgccgacgacagcaaggaggtggagagcttccagcagctgctgaacgccagaacccaggagttcatcgaggagctgctgagcccccccttcggcggcctggtggccttcgtgaaggaggccgaggccctgatcgagagaggccaggccgagagactgagaggcgaggaggccagagtgacccagctgatcagaggcttcggcagcagctggaagagcagcgtggagagcctgagccaggacgtgatgagaagcttcaccaacttcagaaacggcaccagcatcatccagggcgccctgacccagctgatccagctgtaccacagattccacagagtgctgagccagccccagctgagagccctgcccgccagagccgagctgatcaacatccaccacctgatggtggagctgaagaagcacaagcccaacttctag

SEQ ID NO: 212503 - DNA, 1797 bp, Artificial Sequence
  derived and/or modified sequence
atggagcagatgctgggcgccttccagagcgacctgagcagcatcagcagcgagatcagaaccctgcaggagcagagcggcgccatgaacatcagactgagaaacagacaggccgtgagaggcaagctgggcgagctggtggacggcctggtggtgcccagcgccctggtgaccgccatcctggaggcccccgtgaccgagcccagattcctggagcagctgcaggagctggacgccaaggccgccgccgtgagagagcaggaggccagaggcaccgccgcctgcgccgacgtgagaggcgtgctggacagactgagagtgaaggccgtgaccaagatcagagagttcatcctgcagaagatctacagcttcagaaagcccatgaccaactaccagatcccccagaccgccctgctgaagtacagattcttctaccagttcctgctgggcaacgagagagccaccgccaaggagatcagagacgagtacgtggagaccctgagcaagatctacctgagctactacagaagctacctgggcagactgatgaaggtgcagtacgaggaggtggccgagaaggacgacctgatgggcgtggaggacaccgccaagaagggcttcttcagcaagcccagcctgagaagcagaaacaccatcttcaccctgggcaccagaggcagcgtgatcagccccaccgagctggaggcccccatcctggtgccccacaccgcccagagaggcgagcagagataccccttcgaggccctgttcagaagccagcactacgccctgctggacaacagctgcagagagtacctgttcatctgcgagttcttcgtggtgagcggccccgccgcccacgacctgttccacgccgtgatgggcagaaccctgagcatgaccctgaagcacctggacagctacctggccgactgctacgacgccatcgccgtgttcctgtgcatccacatcgtgctgagattcagaaacatcgccgccaagagagacgtgcccgccctggacagatactgggagcaggtgctggccctgctgtggcccagattcgagctgatcctggagatgaacgtgcagagcgtgagaagcaccgacccccagagactgggcggcctggacaccagaccccactacatcaccagaagatacgccgagttcagcagcgccctggtgagcatcaaccagaccatccccaacgagagaaccatgcagctgctgggccagctgcaggtggaggtggagaacttcgtgctgagagtggccgccgagttcagcagcagaaaggagcagctggtgttcctgatcaacaactacgacatgatgctgggcgtgctgatggagagagccgccgacgacagcaaggaggtggagagcttccagcagctgctgaacgccagaacccaggagttcatcgaggagctgctgagcccccccttcggcggcctggtggccttcgtgaaggaggccgaggccctgatcgagagaggccaggccgagagactgagaggcgaggaggccagagtgacccagctgatcagaggcttcggcagcagctggaagagcagcgtggagagcctgagccaggacgtgatgagaagcttcaccaacttcagaaacggcaccagcatcatccagggcgccctgacccagctgatccagctgtaccacagattccacagagtgctgagccagccccagctgagagccctgcccgccagagccgagctgatcaacatccaccacctgatggtggagctgaagaagcacaagcccaacttctag

SEQ ID NO: 212504 - DNA, 2172 bp, Artificial Sequence
  derived and/or modified sequence
atggctgccgccgccacgatggcagcagcagccagggaactggttttgcgggctggtacaagtgatatggaagaggaggagggacctttagccgggggacccggtttgcaggagccactgcagctgggggaactcgatatcacatcggacgaattcatcctcgatgaggttgacgtgcatattcaagccaacttagaggacgagctggtgaaggaagcactgaagactggcgtggatctgcgccattattccaagcaggtcgagttagagctccagcagattgagcagaaatccatacgtgattacattcaggagtctgaaaatattgccagtctgcacaatcaaattactgcctgtgacgctgttctggagcgtatggaacaaatgctgggagcctttcagagcgatctgtcctccatttctagcgaaatcagaactctgcaggaacaaagcggagccatgaacatacgattacggaatcgacaggccgttaggggaaaactcggggaacttgtcgacggcctggtggtcccatccgcactggtgactgccattctggaggcccctgtcacagagcccaggttcctcgagcagctgcaggagttggatgccaaagcggctgctgttcgcgagcaagaggcccggggcacagccgcctgcgccgacgtgcggggagtactcgatcgactaagggtgaaagctgtgaccaagataagagaattcatcctacaaaagatctattcgttcagaaagcctatgacaaattaccagattcctcagacagccctcttaaaatatcgatttttctatcagtttctgttgggcaacgaacgggccactgccaaggagatcagggacgagtacgttgaaaccttgtctaaaatttatctcagctattaccgctcctacctagggcggctgatgaaagtgcagtacgaagaggtggccgagaaggacgatctgatgggagtcgaagatacagctaaaaagggctttttctcgaagcctagcctacgtagccgtaacaccatttttacattgggcacccgagggtctgtgataagccccacagaacttgaagccccaattctcgtgcctcataccgcacagaggggggagcaacggtacccattcgaggcactatttcggagtcagcactacgctctattagataacagctgtcgggagtacctgttcatctgtgagttcttcgtcgtcagtgggcccgccgcccatgacctttttcacgccgtcatggggagaacactgagcatgaccctgaaacatttagacagctatctcgccgattgctatgacgcaattgccgtctttctctgtatccatatcgtcctccgatttcggaacattgccgcaaagcgcgatgtacctgctctggacaggtattgggaacaggtgctggcactgctctggcccaggtttgagcttatccttgagatgaatgtgcagagtgtgcgtagcaccgacccacagcggcttggtgggctggacacccggccacattacatcacacgccggtacgccgagttttctagtgcactggtttcaatcaatcagacgattcctaatgagcggacaatgcagctccttggccagctgcaggtagaagttgaaaactttgtattgagggtggcggcagagtttagtagtaggaaggaacagttggtgttcctgatcaacaattacgacatgatgctaggagtcctgatggagcgagcggctgatgacagcaaagaggtcgaatcgtttcagcagttgctgaacgcgagaactcaggagtttatcgaggagcttctgtcccccccgttcggtggtctggtcgcctttgtcaaggaggccgaggcactgatagagagggggcaggccgaaaggctgcgaggtgaggaagctagagtcactcagctgatcaggggtttcggtagcagttggaagagcagcgtagagtctctgtcacaggatgttatgagatccttcacaaacttccggaatgggacttccattatccaaggcgccctaactcaactgattcagctctaccataggtttcatagagtcctgtcacaacctcaacttcgcgcactcccagcgcgcgcagagctcattaatatacaccacctgatggtggagctcaaaaaacataaaccaaacttctag

SEQ ID NO: 212505 - DNA, 2106 bp, Artificial Sequence
  derived and/or modified sequence
atggaggaagaggagggaccattggcagggggtccaggcttgcaggagccactgcagctgggcgagctggacattacatctgacgaatttatactggacgaggttgatgttcacatacaggccaatctggaggatgaactagtcaaggaagcactcaagaccggcgtggatttaaggcattatagcaaacaggtggaactggagcttcagcagattgagcagaagagcatccgcgactatatacaggagtccgaaaacatcgctagtctacataatcagatcacagcttgcgatgctgttttagagcgcatggagcaaatgctgggagctttccagagtgacttgtcctctatttcatcagaaattcgcactcttcaagagcagagcggggctatgaacatcagactgcggaacaggcaggccgtgaggggcaagctgggagaactggtcgacggtttggtggtgccttccgctctcgttaccgctatcctcgaagcccctgtcactgaacccagattcctggagcaactgcaggagctagacgcgaaggcagctgccgttcgagaacaggaagcccgggggactgctgcttgcgcagatgtgagaggcgtgctggacaggctcagagttaaggctgtgaccaaaattcgggagtttatacttcagaaaatctattccttcaggaagccgatgacgaactatcagatcccacaaaccgctttgctcaagtatcggttcttttaccagtttctgcttggtaatgagcgtgccactgcgaaggagatcagagatgagtacgtggagaccctgtctaagatctacctgtcatactatcggtcatacctgggaaggctgatgaaggttcagtacgaggaagttgcagagaaggacgatctgatgggcgtcgaagacacagccaagaagggctttttttctaagccaagtctcaggtctcggaatactatattcacacttggcactagaggaagtgtgatttcccctacagagctggaggctcctatcctggtgcctcacaccgctcaaaggggtgagcaaagatatccattcgaggcattatttcgcagccaacactacgcactcctagacaactcttgtcgcgaatatctgttcatttgtgagttctttgtagtcagtggcccagctgctcacgacttatttcatgcagtgatgggtaggacgctaagcatgacattgaagcacctggactcatatctggctgattgttatgatgctatagccgtctttctgtgcattcacatcgtgttacggttccgcaatattgccgccaagcgcgacgtgcctgctctggataggtactgggaacaggtcctggccctcctgtggcccagattcgagttgatcttagagatgaatgtacagtccgtacgtagcactgatccacagagactgggtggcctcgatactaggcctcactacatcacacggcgctatgcggaattttcctcagccctggttagcatcaaccagacaatcccaaacgaaaggacaatgcagctgctcggccagctccaggtcgaagtagagaactttgtgctccgcgtggctgcagaattcagcagccggaaggagcagctcgtattcctgatcaacaactacgacatgatgcttggtgttctcatggagagagccgctgatgattcaaaagaagtagaatctttccagcaactcctgaacgcccgtacccaggagttcattgaggagcttctctccccaccttttggtgggttagtagcctttgttaaagaggcggaggccctcatagagaggggccaggctgagaggcttcgaggcgaggaagcccgtgttacgcagcttattagggggtttggttcaagttggaaaagctctgtggaatcactctctcaggacgtcatgcgctctttcactaatttcagaaatggaacaagcattattcaaggcgctctgacccagcttatccagctttaccaccggtttcaccgcgtgctatctcagccacagttgcgcgcgctgcccgcccgggccgagttaatcaacattcaccatctgatggtggagctcaaaaagcataaacctaacttttag

SEQ ID NO: 212506 - DNA, 2172 bp, Artificial Sequence
  derived and/or modified sequence
atggctgccgccgcaacaatggcggctgccgccagagagctggtgcttcgcgcaggtacatccgatatggaggaagaggagggaccgcttgccggcggtcctggcctgcaagagcctctgcagctaggggagctggatattaccagcgatgaattcattctggacgaggtggacgtgcatattcaggccaatctcgaagatgaacttgtgaaggaagctttgaagaccggcgtcgatctgcgccactacagcaagcaggtcgagctggaactgcagcagatcgagcagaagagcatacgggactacattcaggagtcagaaaatatcgctagcctccacaaccaaattactgcctgcgacgctgttctggagcggatggaacagatgctgggagcctttcagtcagatttgagcagcatctcctcggaaatcagaacgctccaggagcaaagtggtgcaatgaacatccgtcttcgcaatcggcaggctgttaggggaaagctgggcgagctggtcgatggcctggtcgtgccatctgctttggtcacagctatcttggaagccccagtgactgagccaaggttccttgagcagctccaggaacttgacgccaaagccgctgcagtgagagaacaggaggctaggggcaccgctgcctgtgctgatgtgcgcggcgtgctcgacaggctgagagttaaggcggtgaccaaaatccgtgaattcattctccagaaaatttattcctttcggaaacctatgacgaattaccagatacctcaaaccgccctccttaaatatagatttttctatcagtttttgcttggaaatgaaagagccacagcaaaggaaattagagacgaatacgtggaaaccctgtccaaaatctacttgtcttactataggagttatctgggcagactcatgaaggttcagtatgaggaggttgccgagaaggacgacctgatgggtgtcgaagacaccgctaagaagggcttctttagtaaaccatctctccgatccaggaacacgatttttactctcggcaccagaggttccgtgatttcacccaccgagctggaggctccaattctggtacctcataccgcccagaggggagaacagagatatcccttcgaggccctttttcgaagtcagcactacgccctgctcgacaactcctgtcgggagtatctgtttatctgcgaattcttcgtggtttcagggccagccgcccatgatctgttccacgctgttatgggtaggacgctcagcatgactctgaaacacctcgattcatacctggcagattgctatgatgccatcgccgtcttcctctgcatccacattgtgcttcgattccgaaacatagccgcaaagcgggacgtgccagcactcgataggtattgggaacaggtactggcactcttatggccccgctttgagctgatcctggagatgaacgtgcagagtgtgcgatcgactgacccccagcgcctgggcggcctggacacccgcccacactacatcactcgacggtacgccgagttctctagtgctcttgtgagtataaatcaaactatacccaacgagagaactatgcagctcttagggcagttgcaggttgaagtcgaaaactttgtcctccgagtggcggccgagttctcttcacgcaaggagcagctggtcttcttgatcaacaactatgatatgatgctcggcgttctgatggaacgggccgccgatgatagcaaggaggttgagagcttccaacagctgctaaacgcccgaacacaagagtttatagaggaattactctctcctcctttcggcggcctggtggccttcgtgaaggaggcagaggctctgattgagcggggacaggcagagcgccttcgcggcgaagaagcgcgggtgacacagctaatcaggggtttcggtagttcctggaagtccagcgtcgagtctctgagccaggacgtgatgagatcctttacaaatttccgcaacggcacctccattatacagggcgcccttactcagctaatacagttgtaccatcgctttcatcgtgttctttcccagccccagctcagggcccttcctgccagagcagaactcataaatatccaccatttgatggtggagttaaaaaaacataagcccaatttctag

SEQ ID NO: 212507 - DNA, 1797 bp, Artificial Sequence
  derived and/or modified sequence
atggagcaaatgcttggcgctttccagagcgatctttccagcatctctagtgaaatccggaccctgcaagaacagtccggcgctatgaatatccgtttgagaaatcggcaggccgttaggggcaagttaggcgagctggtggatggcttagttgttcctagcgctctggtcacggcgattcttgaggcccctgtaacagaaccccggtttctggagcagttgcaggagctggacgcgaaagccgccgcagtcagagagcaggaggcacgaggcactgcagcttgcgccgacgtgagaggcgtgctggaccggttacgggttaaggcagtcaccaagataagggaattcatcttgcagaaaatttacagcttccggaagccgatgactaattaccaaattccccagacagctctcttaaaatataggtttttttaccagtttctgctgggaaacgagcgggcaacggccaaggaaatacgggatgaatatgtggagacactgtctaagatttatctgagctactatcggtcgtacctcgggaggttgatgaaggtgcagtacgaggaagtcgcagagaaggacgatcttatgggagtggaagatactgccaagaaaggatttttttcaaagccctctctgcgcagcagaaacaccatcttcactctcggtacacgcggctcagtgatctcgcccacagagttagaggcacccattcttgtgcctcacaccgcccagcgcggagagcagcggtatccattcgaagcattgttccggtcgcagcattatgcacttctggataactcctgcagggagtacctgttcatctgcgaattctttgttgtcagtggacctgcggcacacgacctgtttcatgcagtaatggggagaactctttcaatgactctcaagcacctagactcttatttggcagactgttatgatgccatcgccgtgtttctgtgcatccacatcgtgctacgcttcagaaacatcgccgcaaagcgggatgtgccagcactcgatcggtattgggagcaggtcttagcattgctttggccaaggtttgagcttatcctggagatgaatgtgcagagcgtgcgatccaccgacccccagcgcctgggaggtctggatacgcgaccccattacatcacacgtagatacgcagagttctcatccgctctggtctctatcaaccaaaccatccccaatgagaggaccatgcaattgctgggacagctgcaggtggaagtcgaaaatttcgttctgagggtagccgcggaattcagcagccgaaaggagcagctggtttttcttatcaataattacgatatgatgctgggcgtcctaatggagagagcagccgacgacagcaaggaggtcgagtcttttcagcagcttctcaacgcccggacacaggagtttatagaggagctcctctctcctccattcggaggcttggtggcatttgtgaaagaggcagaggctctcatagagagaggccaagccgagaggctgcgcggagaagaggcgagggtcacccagcttattaggggctttggaagttcatggaagtctagcgttgaatcactcagccaggacgtaatgcggagttttactaacttcaggaacggaacctctattatccagggagccctgacacagctgatacagctctaccatcgctttcaccgcgtgctctcccagcctcagctcagagccctgccagcccgtgccgaattgataaacatccatcatctgatggtcgagttgaaaaagcacaagccaaacttttag

SEQ ID NO: 212508 - DNA, 2172 bp, Artificial Sequence
  derived and/or modified sequence
atggccgctgcagctaccatggctgccgccgcccgggaactggtcttgcgggccggtacttctgatatggaggaagaagagggtcccctcgccggtgggcccgggttgcaggagcctctgcaactcggtgaacttgacattacgagtgacgagtttattttggacgaggtggatgtccatatccaggcgaatctggaagacgaactcgtcaaggaggcactgaagaccggggtcgacctgcgccactattctaagcaggtcgaattggagttacagcaaatcgaacagaagtccatccgagattacatccaggagagcgaaaacatagccagtctgcataatcagattacagcatgtgatgctgtgctggaacgaatggaacagatgctgggggccttccagtccgacctctcaagcatttcctctgaaattcgaacattacaagagcaaagtggggcaatgaacatccgacttcgcaaccgccaggcggtgcgtggaaaactgggggaactggttgacggtctggtggtgccatcggcactggtgacagccatcctcgaggctccagtaacagaacctcgttttctcgaacaattacaggaattggacgctaaggccgccgcagtgcgggaacaggaggctagaggcaccgcagcctgtgccgacgtcaggggggttcttgatcgtttgagagtcaaggcagtgaccaagattcgagagtttatcctacagaaaatctactcattccggaagcctatgacaaattaccaaatccctcagaccgcccttctcaagtaccgcttcttttaccagttcttactcggaaacgaaagggccacagccaaagaaattcgcgatgagtatgtggaaactttaagcaagatctacttgagctactacaggtcttatttgggccgcctgatgaaggttcagtacgaggaggtcgcggagaaggatgaccttatgggggtggaagacaccgccaagaagggcttctttagcaagccgtcactaaggagtcgaaatactatttttacactgggcacccgcggctctgttatatcgccaacagagttggaagctcctatcttagtcccacacaccgcacaacggggcgagcagcggtaccctttcgaagcgttattccggagtcaacactatgctttgctggacaactcatgtagagaatatttgttcatatgcgaatttttcgttgtgtctggacctgccgcccatgatctctttcatgctgttatgggacggacactgtccatgaccctcaagcatttggactcgtacctggccgattgctacgatgccatcgccgtctttctatgcatacacatcgtgttaaggtttcgcaacatcgccgcaaagcgggatgtccctgcactggaccgatactgggagcaggtgctggctctgctgtggcccagatttgagcttatcctggagatgaatgtccaatcagtgaggagtactgacccccagagactagggggcctggatacaaggcctcattatatcacgagacggtacgctgagtttagctccgcactggtgagcatcaaccagactattcccaacgagcggaccatgcagctcctggggcaactgcaagttgaggtggagaacttcgtgctcagagtggctgcagagttcagctcaagaaaagagcagctggtcttcctgattaataattatgacatgatgttgggtgtactgatggagagagctgccgatgactccaaagaggtagagtctttccaacaactgcttaatgcccgcacccaagagttcatcgaggagctcctgagcccaccctttgggggactggtagcctttgtgaaagaggcagaggcactaatagagaggggccaagccgaacgtctgcgtggagaagaggctcgggtgacacagcttatcagaggcttcggaagtagctggaaatccagcgtggagtctctttctcaggacgttatgcgaagctttacgaatttcagaaatggcacctcaattatccagggggcactcacccagctgatccagttgtaccatagatttcacagggtgcttagccaacctcagttacgtgccctgccggcaagagctgaactgattaacatccatcatcttatggtcgaactgaaaaagcacaaacccaatttttag

SEQ ID NO: 212509 - DNA, 2172 bp, Artificial Sequence
  derived and/or modified sequence
atggctgccgcggctactatggcggccgcagcccgggagcttgtgttgcgcgcaggcacaagcgatatggaggaggaggaggggccactggcagggggcccaggcttacaggagccccttcagctgggcgaactggacattacttcagacgagttcatcctcgacgaggtggacgttcacattcaggccaacttggaagatgaattagtgaaagaagccttgaagaccggagttgatttgcggcattacagcaagcaggttgaactcgaattgcagcaaattgagcagaaatccatacgagactacatacaggaatccgagaacatcgctagtctgcataatcagataaccgcatgcgatgcagtactggaacgtatggaacagatgctgggagccttccagtcagatctgagctccatctcctcagagattaggaccttgcaagagcaatctggtgctatgaatattcggctccggaatcggcaggccgtgcgcgggaaactgggagagcttgtcgacggcctcgtcgtcccctctgctctcgtgaccgccattctggaggcaccagtgacagagccgcggtttctagagcagctgcaggaattagacgccaaggcagccgccgtgcgggagcaggaagctcggggcacagctgcctgcgctgatgtgaggggcgtgctcgatcggcttcgtgtgaaggcagtgactaagattagagaattcatcctccagaagatctactcgtttcgcaagccaatgacaaactaccagattccgcagaccgctcttttgaaatatagatttttctaccagtttctgctcggaaatgaaagagcaaccgccaaagagataagagacgaatacgtggagaccttgtcaaaaatatacctgtcttattaccggtcctatctgggaagactgatgaaagtgcagtacgaggaggtggccgagaaggacgatctgatgggcgtggaggatactgctaagaaaggttttttttctaaacctagcttacgaagtcgaaacacaattttcacgctcgggaccagggggtccgtcatttctcctacagagctggaggcccccatactcgtcccccatacagctcaacggggagagcagagatacccattcgaggctctctttcgctcccagcactatgccctgctcgacaattcctgcagagaatacttgtttatttgtgagtttttcgttgtaagcggcccggccgcccatgatctgtttcatgcagtgatggggcgcaccctgagcatgacattaaaacacctggatagctatttagcagattgttatgacgcaattgctgtctttctttgcattcacattgtgctgagattccgcaacattgccgctaagcgcgacgtgcccgctttggaccgatattgggagcaggtgctggcattactgtggcctcggtttgagcttattctggagatgaacgttcaaagcgtgcggagtacagacccgcaaagactgggagggttggacacccgcccccactacatcacccggaggtacgcagaattctctagtgccctggtgagcatcaaccagacgatccccaatgaaaggactatgcaacttcttggccaattacaggtcgaggttgagaattttgttctccgcgtcgccgccgagttcagctcccgcaaggagcagctggtgttcttaatcaacaactacgatatgatgctgggggtcctgatggaacgtgccgcagatgattcaaaggaggtggagtcgttccagcagctgctaaacgctaggacacaagagtttattgaggagctccttagtccaccatttggaggattggtggcgttcgttaaggaagctgaggccttaatcgagagagggcaggccgagaggctgagaggggaagaggctcgggtgacccaactgatacgcgggtttggtagtagctggaaatcatccgtggaatctttatctcaagacgtcatgagatcttttaccaactttagaaatggtacatccattattcaaggggcacttacgcagctcatccaactttaccatcgattccaccgcgtgctgagtcagccacagctacgggccctccctgcacgggccgagcttataaatattcaccacctgatggtggaactcaaaaagcataagccgaacttttag

SEQ ID NO: 212510 - DNA, 2172 bp, Artificial Sequence
  derived and/or modified sequence
atggctgcggccgctactatggctgcagccgcacgagaattggtgctgcgagccgggacatccgatatggaggaggaggaaggaccattggcaggcggaccaggccttcaggaacccctccagcttggtgagctggatattacgagtgatgaattcatcttagacgaggttgacgtccatatacaagctaacctggaggatgagctggttaaggaagccctgaaaacgggcgtcgaccttcggcactacagtaagcaggtggagctcgaactgcagcaaatcgaacaaaaatccatccgggactatatccaggaatctgagaacatcgccagtttacacaaccagatcacagcctgcgatgcagtgttggaacgaatggagcagatgctgggagctttccaatctgatctgtcctctatttctagcgagatcagaacattgcaggaacagtctggcgctatgaatattcgattaaggaatagacaggcagtgaggggaaagctgggtgaattagtggacgggctggtggttccaagcgcgcttgtcacggctatccttgaagccccggtgaccgagccccgctttttggagcagcttcaggagctggatgctaaggctgctgcggtgcgtgaacaggaggcccgcggcacagccgcatgcgcagacgtaagaggagtgctggaccggcttagagtaaaggccgttacgaaaatccgggaattcattcttcagaaaatctactcttttcggaaacccatgaccaactatcagataccacagactgcactgctgaagtacaggttcttttaccaatttctgttaggcaatgagagggcaacagcaaaagagattagagacgaatatgttgagaccctttctaagatatacctgtcctactaccggagttatctagggcggctgatgaaggtgcagtacgaggaggtcgcggagaaggatgacctgatgggcgttgaagacacagctaaaaagggatttttctctaaaccctctttgagaagtagaaacaccatttttacattaggtacccgggggtccgtgatcagccctactgaactggaggcccccattctggtcccgcacacagctcaacggggtgagcagaggtacccgttcgaagccctgtttaggagccagcactacgctctcctggataattcttgtcgagaatatttgtttatttgcgagttttttgtcgtgtccggaccagcggctcacgatttgtttcatgcagtaatggggcgtacactctccatgacccttaagcacctcgatagctacctcgcagattgctatgacgctattgccgtcttcctgtgtatccacattgttctacggtttagaaacatagccgctaagcgcgacgtccctgccctcgataggtattgggaacaggttttggccctgttgtggccacgctttgaactgattctcgagatgaatgttcagtctgtcagatcgacggaccctcagcgtctgggcggtctggacacccgcccccactacattacgcggagatacgctgagttcagcagcgccctggtgtcaatcaaccaaaccatcccaaacgaacgtaccatgcagctcctgggccaattgcaagtggaggttgagaacttcgtgctgagggttgccgcggagtttagtagcagaaaagaacaattggtctttctgattaataactacgacatgatgctgggagttctgatggaaagggccgctgacgatagtaaagaggtggagagttttcagcaactgctgaatgcccggacgcaggagttcatcgaagagctgcttagccccccctttggcggcctggtcgcctttgtcaaggaagcggaagctttgatagagcgaggacaagccgagcggctacggggcgaagaggcacgcgtaacacagctaataaggggattcggctcctcctggaaaagcagcgtggagagcctatctcaggatgtgatgcggtcctttaccaactttagaaatggaacttcaattatacagggcgcgctgacccagctgattcaattatatcatcggttccaccgcgtgctgtcccagccacagttgcgggctctcccagctcgggctgagctgatcaacatccaccacctgatggtcgagcttaagaaacacaaaccaaatttctag

SEQ ID NO: 212511 - DNA, 2172 bp, Artificial Sequence
  derived and/or modified sequence
atggcagccgcggcgacaatggccgccgccgcccgagaactggttttgcgagctggcacgtctgatatggaagaggaagagggacctcttgccggggggcccggcttgcaggaacctctacagctcggggaactggacatcacctctgacgaatttattctggacgaggttgacgtgcatatccaggccaacctcgaagacgagctcgtaaaggaagcgcttaagacgggggtggacctgcgtcactattccaaacaggtggaattagagctacagcagatcgaacaaaaatcaataagagattatatccaagagagcgaaaatatcgcatccctgcacaaccaaattacagcttgcgacgccgtgttggagcggatggaacaaatgctaggagcctttcagtctgatctctccagtatcagtagtgaaatacgcacattgcaggaacagtccggcgcaatgaacattaggctccgaaacagacaggccgtccgaggaaaactcggggagctggtggatggactggtcgtgccttccgccctggtgaccgctattctggaagcaccagtgactgagcctaggtttctcgaacagctacaagagctggatgccaaggcagctgctgtccgcgaacaagaagcccgcggcacagcggcttgcgcagatgttcgaggagtcctagaccggctgcgggtcaaagccgtcacaaagattcgtgaatttatactgcaaaaaatatactccttccggaaacccatgaccaattatcaaataccccagacggctctcctaaagtaccgttttttttatcaattcctgcttgggaacgagagagcaactgcaaaggagatccgcgatgagtatgtcgagacgctcagcaaaatctacctgagctactatcggtcttacctcggccgccttatgaaggttcagtacgaggaggtggctgagaaggacgacctaatgggggtcgaagacactgcaaaaaagggcttcttctccaagccaagtttgcggtcacgtaacaccatcttcaccctcggcacacggggaagcgtaatcagcccaacggagctggaggctccaatcctggtaccccataccgcccaacgcggagagcagagatacccgtttgaagccctgttccggtcccaacattatgccttgctggacaactcctgcagagaatacctcttcatctgtgaattttttgtagtcagcggacctgccgcccacgatctattccacgccgtgatgggccgaactctcagtatgactctgaaacacctcgactcttatctcgccgactgctatgacgccattgccgtttttctatgcatccatatcgtactgagattcaggaacatcgctgctaaacgggacgtgcccgctctggaccgttactgggagcaggtcttggccttgctgtggccccgtttcgagctgatcctggagatgaacgtgcagagcgtgcggagtacagatccgcaacgtctggggggcctggacacgagaccccactatatcacccggcgttacgcagaatttagctcagctctcgtgtctatcaaccagactatacccaacgaacgcactatgcagctgctaggacagctgcaggttgaagtcgaaaacttcgtcttgagagtggccgccgaatttagttcccggaaagaacaactggtgttccttattaacaattacgacatgatgctcggggtcctgatggagagggcagccgacgacagtaaagaagtagagtccttccagcaacttctgaacgcacgcacccaagagtttatcgaggaactactgagccctcctttcggcggactggtggcgtttgtgaaagaggcggaagctctgattgagaggggtcaggcagagcgtttaaggggggaggaagctagggtgacacagctgataagaggctttggcagctcctggaaaagttccgtagaatcactgtcccaggacgtgatgagaagctttacgaatttcagaaacggaacatcaatcatccagggcgctttaactcaattgatacagctgtaccatcggtttcatcgagtgctctcccagccccaactgcgcgctcttcctgctcgtgccgagctgatcaatattcaccacttgatggtcgaactcaagaaacacaagcccaacttttag

SEQ ID NO: 212512 - DNA, 2106 bp, Artificial Sequence
  derived and/or modified sequence
atggaagaagaagaggggcctcttgctggagggcccggcctgcaggaacctctgcagttgggggagctggatatcacaagcgacgagtttatccttgacgaggtggacgtgcacatccaggccaatctcgaggacgagctggtcaaagaggccctgaaaaccggcgtcgacctgcggcactatagcaagcaagtggaactagaattgcagcagatcgaacagaaaagtattcgcgactacatccaggaatcagagaatattgcttctttgcacaaccagatcacagcgtgcgacgccgtgctggagagaatggaacagatgctgggcgcctttcagagcgatctgtcaagcatttcctccgagatacgaacactgcaggagcaatcaggggcgatgaatattcgcctacgcaaccggcaggccgtaagaggcaagctgggggaactggtggatgggttagtcgtgccctcggccctggtgacagctattctggaagctcccgtaactgaaccaagatttctcgaacaactacaggagctggatgccaaagcagccgcagtgcgggagcaggaggctaggggcaccgccgcttgcgcggatgtgcgcggtgtcctcgatcgcttgagggttaaggcggtgactaaaattcgtgaattcattctccagaagatatattcctttagaaaaccaatgacaaattatcagatcccacagaccgcgctcctgaagtatcgattcttttaccagtttctgttgggcaacgagcgcgccactgcaaaggagatacgcgacgagtacgtggagactctcagcaaaatctacctcagttactatcgttcctacctgggtcgcctgatgaaagtccagtatgaagaagtggctgaaaaagacgatctgatgggagttgaagatactgccaagaagggtttcttttctaaaccttcattgcgcagccgcaatacgatttttactctcgggactagaggctcagtgataagccccactgagctggaagcacctattctggtgccccatacagcccagagaggggagcagaggtacccatttgaagccctctttagatcccagcattacgcactactggataatagctgccgagagtatctgttcatctgcgaattcttcgtagtgagcggccccgcagcccacgacctttttcacgcagtgatgggcagaacccttagcatgacactgaaacaccttgactcatatcttgccgattgctacgatgcgattgcagtgttcctgtgcattcatatagtgctgagatttagaaatatagccgctaaacgagatgtaccagctctggacagatactgggaacaagttctggcactcctttggccgcgcttcgagcttatactcgagatgaacgtgcagagcgtgcgctctactgacccacaacgtttggggggcctggacacaagaccccattacataactcgcagatatgcagagttctcatcagcactcgtgtccattaatcagaccattcccaacgaacgcacaatgcagctgctgggtcagcttcaagtcgaggtggaaaattttgtgcttagagtggccgctgagttttccagtcgcaaggaacagctcgtgttcctcataaataattatgatatgatgctcggagtgctgatggagagagccgcagatgactccaaggaagtggaatcctttcaacagttgctgaacgcccggacgcaggagttcatcgaagaactcctgtccccgccctttggcggtctcgtggccttcgtgaaagaagcagaagctctgattgagcgagggcaggcagagcgcttgaggggagaagaggcgcgtgtgacccagctgattcgcggattcgggagctcttggaaaagtagtgtggaaagcctgtctcaggatgtgatgaggtcatttaccaacttccgcaacggcacgagcattatccagggggccctgactcagctgatacagttatatcacagattccacagggtgctttcccaacctcaactgcgcgccctccctgctagagccgagctaataaacattcatcacctcatggtagagttgaagaagcacaaaccgaatttctag

SEQ ID NO: 212513 - DNA, 2106 bp, Artificial Sequence
  derived and/or modified sequence
atggaggaggaggaaggacccttagcagggggcccaggattgcaagaacccctgcagctaggagagctggacatcaccagtgatgaatttattctggatgaggtggatgtgcatatacaagcgaatttggaagatgagctggtcaaggaggcattgaaaactggggtcgatctgcgccactatagtaagcaggtggagctggagttgcaacagattgaacaaaaatctatcagggattacatccaggagagcgagaatatcgcatctctgcacaatcaaattacagcttgtgatgctgtactcgagcgtatggaacaaatgctgggggcattccagtccgacctgtcttctatctctagcgaaattagaactctgcaggaacagtctggagccatgaacattagacttagaaatagacaggctgtgcggggaaagctgggtgagctggttgacggtctggttgttccgagtgccctggtcaccgctatcctggaagctcccgtcacggagccgaggttcctggagcagctgcaggagcttgacgccaaggcagcagcagtgagagaacaggaggctcgaggcacggccgcctgcgcggacgtaagaggcgttctagatcgactgcgagtgaaagctgtgactaaaatccgtgagttcatcctgcagaaaatttactccttcagaaaaccaatgacgaactaccaaattcctcagaccgccttgctgaagtatagattcttctaccagttcctactggggaacgagagggctacggcaaaggagatccgtgatgaatacgtggaaacactgagcaagatatacctttcgtactaccgctcctatctgggccgtctgatgaaggtgcagtatgaagaggtagccgagaaagacgatttgatgggggtggaggacacagccaagaaaggctttttctctaagccttccctccggtcacggaatacaatctttacattgggcactcgtggaagtgtcatttccccaacagagctggaagcgccgattcttgtgccccacaccgcccaacgcggggagcagcgttatcccttcgaagccctcttccggagccagcattacgccctcttggacaatagctgccgcgagtacctctttatctgcgagttctttgttgtgagcgggccagccgctcacgatctgttccatgctgtcatggggcgcactctgagtatgaccttgaagcacctcgactcttatctcgccgactgctatgacgctatagccgtgtttctctgcattcacatcgttttgcggtttcgtaacatcgctgccaagagagacgtgcccgcactggatcgctattgggagcaggtcctagcactcctctggcccaggtttgagttgatattggagatgaatgtgcagtcagtcaggtcaaccgaccctcaaagactgggagggctggacacacgcccgcattatatcactcgacggtacgctgagttctcctccgctctggttagcatcaaccagacaatccccaatgagaggaccatgcagcttctcggacagctgcaagtagaggtggagaacttcgtgctcagagtcgctgccgaatttagcagccgtaaggaacagcttgttttcctcatcaacaactacgatatgatgctcggggtccttatggagagggctgccgacgatagtaaagaagtagaatcctttcagcagttactaaacgctcgcacacaagaattcattgaggagctcctgtctccccccttcggggggttagttgcttttgtgaaggaagccgaagcattgattgagaggggacaggcagagcgcctcaggggagaggaggcacgggtgactcagttgatcaggggttttggatcatcctggaaatctagcgtggaatccctgtcacaggacgtgatgagatcatttactaattttcggaacgggacctcaattatacaaggagccctgacccagctcattcagctgtatcaccggttccatagagtgctaagccagccacaactccgagccttgcccgcaagagccgaactgattaatatacatcatctcatggtggagctcaagaaacacaaacctaacttttag

SEQ ID NO: 212514 - DNA, 1797 bp, Artificial Sequence
  derived and/or modified sequence
atggagcaaatgctgggcgcttttcagtccgacctatcttcaatttcctctgagattcgaacgcttcaggagcaatccggcgcgatgaatatcaggctgagaaatcggcaggccgtacgcggtaagttgggtgaactggtggatggactggtcgtgcccagtgccctggttaccgccattctggaggccccggtgacagaaccaagatttctcgaacagctgcaagaactggacgcaaaggccgcagcggtaagggagcaggaagcacgcggtaccgccgcctgcgccgatgtgcgtggagtcctggaccgactgagagtaaaagctgtgactaaaatcagagagttcatcctccagaagatttattcctttcgcaagcccatgactaactaccagatcccgcaaaccgcactgctgaaatataggtttttctaccagtttctcctggggaacgaacgagccaccgcaaaggaaattagagacgagtacgtagagactctctccaagatctacttgtcctactacaggtcctaccttggccgactgatgaaagtgcagtacgaagaggtcgcagagaaggacgacctgatgggcgttgaggacacagccaagaagggttttttcagcaagccctctttgaggagtaggaatacaatctttacgcttggaaccagaggatccgtcatttcaccaaccgagcttgaagcgcccatcctggttcctcacactgcacagcggggagaacagcggtacccattcgaggctctctttcggtcacagcactacgccctgctcgataacagctgtcgcgagtatcttttcatatgtgagtttttcgtggtgtctggccctgcggctcatgatctgttccatgcggtcatgggcaggacacttagtatgactctcaaacatcttgacagttatctggccgactgctacgatgctatcgccgtcttcctgtgcattcatattgtcctgaggttccgcaatatcgccgccaaaagggatgtacccgccctcgacaggtactgggaacaggtgctggccctcttgtggccgaggttcgaactgatcttggagatgaatgttcagtccgtcaggagtacggacccgcaacgccttggcggactggatactagaccccactatatcacaagaagatacgctgagtttagttcagccctggtgagtatcaatcaaacaatcccaaatgagagaacaatgcaactgctggggcaactacaggtggaagttgagaattttgtgctgagggtcgctgctgaattttcttctagaaaagaacagctggtttttctgataaacaattacgatatgatgcttggcgttttaatggagagagccgccgacgactcaaaggaggttgaatcctttcagcagcttcttaatgcacgaacacaagagtttatagaggagctcctatcacccccatttggcggtctggtggcgttcgtcaaggaggccgaagctctcatcgaaagaggccaagcggaacgcttgaggggcgaagaggcccgtgtgacacaactgattaggggctttgggagttcatggaagagctctgtggagtctctcagccaagatgttatgagatcatttaccaacttcagaaatgggacaagcatcatacagggcgccttaacacagctcatacagttgtatcataggtttcatcgagtgttatctcagccacagctcagagcccttccggcaagagccgagctgatcaatatccaccatctgatggttgaactgaagaaacacaagccgaacttttag

SEQ ID NO: 212515 - DNA, 1797 bp, Artificial Sequence
  derived and/or modified sequence
atggaacaaatgctgggcgcgttccagagcgatctgtcctccataagttcagaaattagaacgttacaggagcagtcaggcgccatgaacatcaggctgaggaaccgccaggctgtgagaggtaagctgggcgaactggtggatggcctagtcgttcccagcgcattagtgaccgccattctcgaggcccctgtgaccgagccccgatttttagaacaactgcaggaacttgacgcgaaagccgctgcagtcagagagcaggaggcgaggggtaccgcggcctgtgccgacgtaagaggcgtgttagatcgcctgcgggtgaaagccgtgacaaagatccgagagtttatccttcagaagatctacagctttagaaaaccgatgaccaactaccagataccccagacagcactgttgaagtatcgattcttttaccaatttctgcttgggaacgaaagggccacggcaaaggaaatcagggacgagtatgtcgagaccctgagcaagatctacctcagttattatagatcttacctggggaggctcatgaaagtacagtacgaggaagtcgcggaaaaggatgatctcatgggtgtggaggacacggctaaaaagggttttttcagtaagcctagtctcaggagccgtaatactatcttcacactcggtacacgcggctccgttataagtcctaccgagctggaggcgcctattctagtgcctcacacggctcagcggggcgaacagaggtatcctttcgaggcactattccggagtcagcactacgctctgctggataatagttgtcgggagtacctgttcatatgcgagtttttcgtcgtatctggaccagcagcacacgacctgttccatgctgtaatggggcggacactaagcatgaccctgaaacacctggacagctacctggccgattgttatgacgccatcgctgtgtttttgtgcatccacatagtgctcaggttcaggaatatagctgcaaagcgggacgtgcctgcccttgatcgatactgggagcaggtgctcgctctcttgtggccccgattcgagctgattctggaaatgaacgttcagagtgttagatctaccgatcctcaaaggctcggtggtttggacacccggccacattatattacaaggcgttacgccgagttttcctccgccctcgtgtctattaaccagacgataccaaacgaacgcaccatgcaactcctcgggcagctccaagtcgaggtggagaacttcgtactaagagtagccgctgaattttctagccggaaggagcaactcgtctttctaatcaataactatgatatgatgctgggggtgctcatggaacgcgcggccgatgacagcaaggaggttgaatcctttcaacagcttttaaatgctcgcacccaagagttcatcgaagagctgctgtctccgccatttggcggtctcgttgcatttgtgaaggaggctgaagccctcatcgaaaggggacaagcggagcggctgcgcggagaggaggcaagagtaacacagctcattcgaggctttggaagtagctggaagtcaagcgtggaaagcctctcacaggacgtgatgcgtagtttcacgaatttccgcaatgggacctcaattatccaaggcgccttgacccagctgattcaactctatcaccgctttcaccgcgttttaagccaaccccagctgagggccttgccagcacgagccgaattgataaatatacaccacttaatggtggaactgaaaaaacacaaacccaacttttag

SEQ ID NO: 212516 - DNA, 2172 bp, Artificial Sequence
  derived and/or modified sequence
atggctgctgctgccaccatggctgctgctgcccgggagctggtgctgcgggccggcaccagtgacatggaggaggaggagggccccctggccggcggccctggcctgcaggagcccctgcagctgggggagctggacatcaccagtgatgagttcatcctggatgaggtggatgtgcacatccaggccaacctggaggatgagctggtgaaggaggccctgaagacaggagtggacctgcggcactacagcaagcaggtggagctggagctgcagcagatcgagcagaagagcatccgggactacatccaggagagtgaaaatattgccagcctgcacaaccagatcacagcctgtgatgctgtgctggagaggatggagcagatgctgggcgccttccagagcgacctgagcagcatcagcagcgagatccgcaccctgcaggagcagagcggggccatgaacatccggctgaggaaccggcaggccgtgcggggcaagctgggggagctggtggatggcctggtggtgcccagcgccctggtgacagccatcctggaggcccctgtgacagagccccgcttcctggagcagctgcaggagctggatgccaaggctgctgctgtgcgggagcaggaggcccggggcacagctgcctgtgctgatgtgcggggcgtgctggaccggctgcgggtgaaggctgtgaccaagatccgggagttcatcctgcagaagatctacagcttcaggaagcccatgaccaactaccagatcccccagacagccctgctgaagtaccgcttcttctaccagttcctgctgggcaatgaaagagccacagccaaggagatcagagatgaatatgtggagaccctgagcaagatctacctgagctactaccgcagctacctgggccgcctgatgaaggtgcagtatgaggaggtggccgagaaggatgacctgatgggcgtggaggacacagccaagaagggcttcttcagcaagcccagcctgcggagcaggaacaccatcttcaccctgggcacccggggcagcgtcatcagccccacagagctggaggcccccatcctggtgccccacacagcccagagaggagagcagcgctacccctttgaggccctcttccgcagccagcactacgccctgctggacaacagctgccgggagtacctgttcatctgtgagttctttgtggtgtctggccctgctgcccatgacctcttccacgctgtgatgggccgcaccctgtccatgaccctgaagcacctggacagctacctggccgactgctatgatgccatcgctgtgttcctgtgcatccacatcgtgctgcgcttcaggaacattgctgccaagagagatgtgcctgccctggaccgctactgggagcaggtgctggccctgctgtggcccaggtttgagctgatcctggagatgaatgtgcagagcgtgcgcagcacagacccccagaggctgggcggcctggacacccggccccactacatcaccaggagatatgcagagttcagcagcgccctggtgtccatcaaccagaccatccccaatgaaagaaccatgcagctgctgggccagctgcaggtggaggtggagaactttgtgctgcgggtggccgctgagttcagcagcaggaaggagcagctggtgttcctgatcaacaactatgacatgatgctgggcgtgctgatggagagagctgctgatgacagcaaggaggtggagagcttccagcagctgctgaatgcccggacccaggagttcatcgaggagctgctgagccccccatttggaggcctggtggcctttgtgaaggaggccgaggccctgattgagcggggccaggccgagcggctgcggggggaggaggcccgggtgacccagctgatccggggcttcggcagctcctggaagagctctgtggagagcctgagccaggatgtgatgaggagcttcaccaacttcagaaatggcaccagcatcatccagggcgccctgacccagctgatccagctgtaccaccgcttccaccgggtgctgagccagccccagctgcgggccctgcctgcccgggcagagctgatcaacatccaccacctgatggtggagctgaagaagcacaagcccaacttctag

SEQ ID NO: 212517 - DNA, 2106 bp, Artificial Sequence
  derived and/or modified sequence
atggaggaggaggagggccccctggccggcggccctggcctgcaggagcccctgcagctgggggagctggacatcaccagtgatgagttcatcctggatgaggtggatgtgcacatccaggccaacctggaggatgagctggtgaaggaggccctgaagacaggagtggacctgcggcactacagcaagcaggtggagctggagctgcagcagatcgagcagaagagcatccgggactacatccaggagagtgaaaatattgccagcctgcacaaccagatcacagcctgtgatgctgtgctggagaggatggagcagatgctgggcgccttccagagcgacctgagcagcatcagcagcgagatccgcaccctgcaggagcagagcggggccatgaacatccggctgaggaaccggcaggccgtgcggggcaagctgggggagctggtggatggcctggtggtgcccagcgccctggtgacagccatcctggaggcccctgtgacagagccccgcttcctggagcagctgcaggagctggatgccaaggctgctgctgtgcgggagcaggaggcccggggcacagctgcctgtgctgatgtgcggggcgtgctggaccggctgcgggtgaaggctgtgaccaagatccgggagttcatcctgcagaagatctacagcttcaggaagcccatgaccaactaccagatcccccagacagccctgctgaagtaccgcttcttctaccagttcctgctgggcaatgaaagagccacagccaaggagatcagagatgaatatgtggagaccctgagcaagatctacctgagctactaccgcagctacctgggccgcctgatgaaggtgcagtatgaggaggtggccgagaaggatgacctgatgggcgtggaggacacagccaagaagggcttcttcagcaagcccagcctgcggagcaggaacaccatcttcaccctgggcacccggggcagcgtcatcagccccacagagctggaggcccccatcctggtgccccacacagcccagagaggagagcagcgctacccctttgaggccctcttccgcagccagcactacgccctgctggacaacagctgccgggagtacctgttcatctgtgagttctttgtggtgtctggccctgctgcccatgacctcttccacgctgtgatgggccgcaccctgtccatgaccctgaagcacctggacagctacctggccgactgctatgatgccatcgctgtgttcctgtgcatccacatcgtgctgcgcttcaggaacattgctgccaagagagatgtgcctgccctggaccgctactgggagcaggtgctggccctgctgtggcccaggtttgagctgatcctggagatgaatgtgcagagcgtgcgcagcacagacccccagaggctgggcggcctggacacccggccccactacatcaccaggagatatgcagagttcagcagcgccctggtgtccatcaaccagaccatccccaatgaaagaaccatgcagctgctgggccagctgcaggtggaggtggagaactttgtgctgcgggtggccgctgagttcagcagcaggaaggagcagctggtgttcctgatcaacaactatgacatgatgctgggcgtgctgatggagagagctgctgatgacagcaaggaggtggagagcttccagcagctgctgaatgcccggacccaggagttcatcgaggagctgctgagccccccatttggaggcctggtggcctttgtgaaggaggccgaggccctgattgagcggggccaggccgagcggctgcggggggaggaggcccgggtgacccagctgatccggggcttcggcagctcctggaagagctctgtggagagcctgagccaggatgtgatgaggagcttcaccaacttcagaaatggcaccagcatcatccagggcgccctgacccagctgatccagctgtaccaccgcttccaccgggtgctgagccagccccagctgcgggccctgcctgcccgggcagagctgatcaacatccaccacctgatggtggagctgaagaagcacaagcccaacttctag

SEQ ID NO: 212518 - DNA, 1797 bp, Artificial Sequence
  derived and/or modified sequence
atggagcagatgctgggcgccttccagagcgacctgagcagcatcagcagcgagatccgcaccctgcaggagcagagcggggccatgaacatccggctgaggaaccggcaggccgtgcggggcaagctgggggagctggtggatggcctggtggtgcccagcgccctggtgacagccatcctggaggcccctgtgacagagccccgcttcctggagcagctgcaggagctggatgccaaggctgctgctgtgcgggagcaggaggcccggggcacagctgcctgtgctgatgtgcggggcgtgctggaccggctgcgggtgaaggctgtgaccaagatccgggagttcatcctgcagaagatctacagcttcaggaagcccatgaccaactaccagatcccccagacagccctgctgaagtaccgcttcttctaccagttcctgctgggcaatgaaagagccacagccaaggagatcagagatgaatatgtggagaccctgagcaagatctacctgagctactaccgcagctacctgggccgcctgatgaaggtgcagtatgaggaggtggccgagaaggatgacctgatgggcgtggaggacacagccaagaagggcttcttcagcaagcccagcctgcggagcaggaacaccatcttcaccctgggcacccggggcagcgtcatcagccccacagagctggaggcccccatcctggtgccccacacagcccagagaggagagcagcgctacccctttgaggccctcttccgcagccagcactacgccctgctggacaacagctgccgggagtacctgttcatctgtgagttctttgtggtgtctggccctgctgcccatgacctcttccacgctgtgatgggccgcaccctgtccatgaccctgaagcacctggacagctacctggccgactgctatgatgccatcgctgtgttcctgtgcatccacatcgtgctgcgcttcagaaatattgctgccaagagagatgtgcctgccctggaccgctactgggagcaggtgctggccctgctgtggcccaggtttgagctgatcctggagatgaatgtgcagagcgtgcgcagcacagacccccagaggctgggcggcctggacacccggccccactacatcacccggcgctatgcagagttcagcagcgccctggtgtccatcaaccagaccatccccaatgaaagaaccatgcagctgctgggccagctgcaggtggaggtggagaactttgtgctgcgggtggccgctgagttcagcagcaggaaggagcagctggtgttcctgatcaacaactatgacatgatgctgggcgtgctgatggagagagctgctgatgacagcaaggaggtggagagcttccagcagctgctgaatgcccggacccaggagttcatcgaggagctgctgagccccccatttggaggcctggtggcctttgtgaaggaggccgaggccctgattgaaagaggccaggccgagcggctgcggggggaggaggcccgggtgacccagctgatccggggcttcggcagctcctggaagagctctgtggagagcctgagccaggatgtgatgaggagcttcaccaacttcagaaatggcaccagcatcatccagggcgccctgacccagctgatccagctgtaccaccgcttccaccgggtgctgagccagccccagctgcgggccctgcctgcccgggcagagctgatcaacatccaccacctgatggtggagctgaagaagcacaagcccaacttctag

SEQ ID NO: 212519 - DNA, 2172 bp, Artificial Sequence
  derived and/or modified sequence
atggccgccgccgccaccatggccgccgccgcccgggagctggtgctccgcgctgggacaagtgacatggaggaagaggaaggaccactggctgggggccccgggctacaggagcccctccagctcggggaactggacatcacatccgacgagtttatccttgacgaggttgatgtgcacattcaggccaatcttgaagacgaactcgtgaaggaggctctgaagacgggggttgatttgagacactactcgaagcaagtcgaactggagctgcaacagatcgaacaaaaaagcattcgtgactacatccaggagagtgaaaatatcgcatccctccataaccaaattaccgcatgtgacgcagtcctggaacgaatggagcaaatgcttggcgctttccagtctgatctgtcatcaatctcctctgaaatcagaacgcttcaggagcagagcggtgcaatgaatatccgcttgcgtaatcgccaggccgtgcgagggaaactgggcgagctcgtggacggtctggtggtgccttccgctctggtaaccgccattctagaggctcccgtcactgaaccgcggttcttggaacagctacaggagctcgacgcgaaagccgccgctgtgcgagagcaggaggcgcggggcactgccgcttgcgccgacgtgaggggtgtgctggacagactgcgcgtgaaggctgtgacgaagattagggagtttatattgcaaaaaatctactcctttcggaagcctatgactaactatcagatcccacagacagccctactgaaatataggttcttctatcaattcttactgggcaatgaaagagcgactgcgaaggaaatacgtgatgaatacgtggaaaccttgagcaagatttacctttcgtactaccgatcttacttgggtagacttatgaaggtgcagtacgaggaagttgcggagaaagacgatctgatgggcgtcgaagatactgccaagaagggcttcttctccaagccatccttgaggagccgaaatactatctttacgcttgggaccagaggaagtgttatctctcccaccgagctggaagctccaatcctcgtgccccatacagcccagaggggggagcagcgttacccgttcgaggccctgttccggagccagcattacgctttactggataactcatgtcgagagtaccttttcatatgtgaatttttcgtggtcagtgggcccgctgctcatgatcttttccacgccgtcatgggacgaacactgtcgatgacgttaaagcaccttgattcttatctggccgactgctacgacgcaatcgccgtcttcctgtgcattcatattgttctgagattccgcaacatcgctgctaagcgggacgttcccgcccttgatcggtattgggaacaggtgctggccctgctatggccgcgcttcgagctgatcctggagatgaatgtgcaaagtgtgagaagcacggaccctcagcggctgggtggactggataccagaccacactatatcaccagacggtatgcggagttctcctcggccttggttagcataaaccagaccatacccaatgagagaactatgcaattactggggcagctgcaggtggaggttgagaacttcgtgttgcgtgttgcagccgaattttccagccgaaaagagcaactggtttttttgattaacaactacgacatgatgctgggggtcttgatggagagggctgccgacgactctaaggaggtggagagctttcagcagttgttgaatgctcgcacacaggagttcattgaggaactactttccccccccttcggcggccttgtggcgttcgtgaaagaagccgaagcgttaattgaaaggggacaagcggaaagacttcgcggagaagaagctcgagtaacacagcttatacgtggttttggttctagctggaagagcagcgttgagagcctgtcacaagacgtaatgagatcattcaccaattttcggaacggaacctcaattattcagggagcactaacacagttaatacaactgtaccatcggtttcatcgggtgctgtcacagccacagctgagggctctacctgctcgcgcagagttgattaatattcaccacctgatggtggagttaaagaaacataaaccaaacttttag

SEQ ID NO: 212520 - DNA, 2106 bp, Artificial Sequence
  derived and/or modified sequence
atggaggaggaggagggccccctggccggcggccccggcctgcaggagcccctacagctcggtgaactagacatcacttccgacgagtttattctggatgaagtcgacgtacatattcaagccaacctggaggacgagttggtgaaagaggcattgaagaccggagttgatctgagacactattccaaacaagtcgaattagagttacaacaaatcgaacagaaatccatccgtgactatatccaggagtcggagaatattgctagccttcacaatcagatcactgcctgcgacgccgtgctcgagcgtatggagcagatgctgggagcctttcagtccgatctgagcagcatttcttccgagatccgcacactgcaggagcagtctggggcgatgaacattcgcttaaggaacagacaagccgtgagaggaaagctcggcgaactagtggatggcttggtggtgcccagcgcactggtaacagctatcctagaagctcccgtcaccgaacccaggttcctggaacaacttcaggagcttgatgccaaggccgctgccgtgagagaacaggaggctcgtggaacagccgcttgcgcagatgtccggggggtgctggacagactcagggtcaaagctgttaccaagatcagagaatttatccttcagaagatctatagcttcaggaagcccatgactaactatcagattcctcagactgctctcttaaagtataggttcttctaccagtttttactagggaatgaaagagctaccgctaaagagattagagacgagtacgtggaaactctctccaaaatctacctgtcctattatagatcctacctaggcaggcttatgaaggtgcagtacgaagaagtggccgagaaagatgatttaatgggcgtcgaggacacagcaaagaaaggcttctttagtaagcctagcctgcggtcgagaaatacaattttcacgctgggcaccagaggtagcgttatttcgcctacagaattggaagcaccaattttggtaccccatacagctcagcggggagagcagcgctaccccttcgaggctctattccggtcccagcattacgcactcctcgacaattcatgcagagagtatctcttcatatgcgaattcttcgtcgtgtccggccccgctgcacatgacctctttcacgccgtgatgggcaggactctatcaatgaccctcaaacatctggacagttatctggcagactgttatgacgcgatcgctgtgtttctgtgcatccacatcgtgctgcgctttcgaaacattgcggccaaaagagacgtccccgccctggatcgatattgggaacaagtgcttgccctgctctggccgaggtttgagctgatcttggagatgaacgtgcaatccgtcagaagtactgacccccagaggctcggtgggttagataccaggcctcattacattactcgtcggtacgccgagtttagttccgcccttgtctcgatcaaccaaacgatccccaacgagagaaccatgcaactcttggggcagcttcaggttgaagtggagaactttgttctacgtgtggcagccgagttttctagcaggaaggagcagctggtctttctgattaacaactacgacatgatgctgggcgttctgatggagagagcagccgatgatagcaaggaggtggaaagctttcaacagctgctcaatgcacgcacgcaagagttcattgaagagttactttctccacctttcgggggcctcgtcgcgtttgtcaaagaagccgaagctctcatcgaaagggggcaggccgaacgcctgcggggggaagaagcgcgtgtcacgcagctcattcgcggattcggatctagttggaagtcatccgttgagtccctgagtcaagatgtcatgcgatcctttaccaatttcagaaacggtacttctatcattcagggtgccctgactcagctgatccagttatatcacaggttccatcgggtgttgtcgcagccccagttgagggcgctcccagcccgtgctgagctcatcaatatccatcacctgatggtcgagctgaaaaagcacaaaccaaatttctag

SEQ ID NO: 212521 - DNA, 2172 bp, Artificial Sequence
  derived and/or modified sequence
atggccgccgccgccaccatggccgccgccgcccgggagctggtgttgcgcgctggcacctccgacatggaggaggaggagggccctctggccgggggtcccggcctgcaggaaccacttcagctaggagaattagacatcacctccgacgaatttattctggatgaggttgacgtgcacattcaagccaatcttgaggacgaactggtgaaagaagcactgaaaaccggagtcgaccttagacactactctaaacaagtggagctggagctacagcagattgagcagaagtctattcgggactacatccaggaaagtgaaaacattgctagcctgcacaaccaaatcacggcttgtgacgctgtgctcgagaggatggaacaaatgctcggtgcattccaaagtgatttatccagcatttcaagtgagattaggacccttcaggagcaatccggcgccatgaatatccggctgcgaaaccgtcaggcagtgcgcggcaagcttggcgagctggtggacgggctggtcgtaccctctgccctagttacggcaatcctggaggcccctgttacggagcctagatttctggagcagttgcaggagctggacgccaaagccgccgcggttagggaacaggaggccagagggactgctgcttgcgccgacgtgagaggcgtgctcgatcgcttgcgggtgaaagcggtcacaaaaatccgtgagtttattctgcagaaaatctacagcttccggaagccaatgacaaactatcaaatcccccagactgctctgttaaagtaccggttcttctaccagtttcttctgggaaacgagcgcgccacagcgaaagagatccgagatgaatatgtcgaaacactgtctaaaatctacctgtcgtactacagatcttatctcggaagactgatgaaggtccaatatgaagaggtagcagagaaagatgatctgatgggtgtcgaagatacagcaaagaaggggttcttctcaaagccatcactgaggtccagaaacacaatcttcacactaggtaccagaggaagcgttattagtccgaccgaactcgaggctccaatcctggtgccacatacggcccagagaggagaacaaagatacccatttgaagccctgttcaggagtcaacactacgccttgttggacaactcttgccgtgaatacttgttcatttgtgagtttttcgttgtgtcaggcccagctgcacatgacctattccacgccgtcatggggcgaacactgagcatgacactcaaacatctggattcatacttagctgactgctatgacgctatcgcggtattcctgtgtatccacattgtgcttcggtttcgcaacatagctgcaaaacgcgatgtgcccgccctggataggtactgggagcaggtgcttgcccttctctggcctcgctttgaactcatattggagatgaatgtacagagcgtgcgatcgactgacccccagcgccttggaggtttagatacgcggccgcactacatcactagacgctatgcagagtttagctcagcactggtttccattaatcagaccataccaaacgagcgcacaatgcagctgttgggccagcttcaggtcgaagtggagaacttcgtcctccgagttgccgccgaattctcaagccgtaaggagcagctggtgtttcttatcaataactacgatatgatgttaggtgtcctgatggaaagggcggccgatgattcaaaagaagtggagtcctttcaacaattgctgaatgcccgtacacaggagttcatcgaagaattgctgtccccacctttcggaggactagtcgcttttgtcaaagaggctgaagccctcattgaacgcggacaagccgagaggctaaggggggaagaagctcgggtgacccagctgatcagaggtttcggaagctcttggaagagttctgtcgaaagccttagtcaggatgtaatgcgaagttttacgaactttaggaacggcacgtctattatccagggggccctgacccagctcatccaactttaccaccgctttcacagagttttgtcgcagccgcaactgcgggcactccctgcacgggccgagctgatcaatatccaccatctaatggtggaattaaagaaacacaaacccaatttttag

SEQ ID NO: 212522 - DNA, 1797 bp, Artificial Sequence
  derived and/or modified sequence
atggagcagatgctgggcgccttccagagcgacctgagcagcatcagctcagagatcagaactctgcaggagcaaagtggagcaatgaatatccgtttgagaaatcgccaggccgtgcgaggaaaactgggagagttagtcgatggtttggtcgtcccttccgcattggtaactgctattctggaggcccctgtgactgagccaagatttctcgagcagctgcaggaactggatgccaaagcagccgcagtccgagaacaggaagcacgtggtaccgcagcttgtgctgatgttaggggcgtgctcgatcgcctccgcgtcaaagcagtgaccaagattagggaatttatcctccaaaagatttatagctttagaaaacctatgaccaactaccaaattccccagacagccctgctgaaatatcgtttcttctatcaattcctgctcggaaacgagagggccacagcaaaggagatcagggatgaatatgttgagaccctgagcaaaatctatttatcctactaccggtcctacctgggacgattaatgaaggttcaatatgaggaagtagccgaaaaggatgacctgatgggggttgaggataccgcaaaaaaaggatttttctccaaaccatcactgagatctcgcaatacaatatttacgctaggcacgcgaggttctgtcattagccccacagaactggaagcaccaatccttgtaccacataccgcacagcggggggaacagaggtacccttttgaagccttgtttagatcgcagcactatgctctccttgacaactcctgtagagagtatctcttcatatgcgaattctttgtcgtttctggccccgcggcccatgatctgtttcacgcggtcatgggccggaccctttccatgaccctgaaacacctggattcctatttagcagattgctacgatgccatcgccgttttcctgtgcattcatattgttctgaggtttagaaatatcgcggccaaacgggacgtgcccgctctggaccgctactgggagcaagtccttgctcttttatggccccgcttcgagctcattctggaaatgaacgttcagtctgtccgatccacagatccccagcggctgggagggcttgatactagaccacattacattacacggcgttacgcggagttctcctccgcactggttagcatcaaccaaactatacctaacgagcgaaccatgcagctcctcgggcaactgcaagtcgaagtggagaatttcgtgcttagggtggcagcggaattctcaagtcgaaaggaacaacttgtgttcctgattaataattatgacatgatgctgggggtgttgatggaacgagcagccgacgacagcaaagaagtagaatctttccagcagctgctgaacgcccggacacaggaattcattgaagaactgctcagccctccatttggtggtctggttgctttcgtgaaggaggccgaggccctcatagagcgcgggcaggctgagcggctccgaggtgaagaagcaagagtcacccagcttatacggggcttcggatcaagctggaaatcttcggtggaaagcctctcccaagacgtcatgcgatctttcacgaatttccgtaacgggacctcgatcatccagggagccctcacacagttaatccagctctaccacagattccacagagtcttgtcacagccacagctgcgcgctctgcccgcccgtgcagaactaatcaatatccatcacctgatggtagaactgaagaaacacaagcccaatttctag

SEQ ID NO: 212523 - DNA, 2172 bp, Artificial Sequence
  derived and/or modified sequence
atggccgccgccgccaccatggccgccgccgcccgggagctggtgctgagggctgggacctctgacatggaagaggaagaagggcctctggcaggcggcccaggtcttcaggagcccctccaactcggcgagttagatattacatctgatgaatttatcttggatgaggtcgatgtgcatattcaggccaacttggaggacgagcttgtgaaagaggcactgaaaacaggcgtcgatctcaggcattactccaagcaggtggagctagagctgcagcaaattgaacagaagagtatcagggactacatacaggagagtgaaaacattgcatcgctccataaccagatcactgcttgcgacgcagttttagaacgtatggagcaaatgctgggagccttccagtctgacctcagttccatctcttccgagattcggaccctgcaggaacagtcaggagcaatgaatataaggctgcgaaacagacaagcagttcgcgggaaactgggagagcttgtggatggtttggttgtcccaagtgccctcgtcacagccattcttgaggccccagtcacagaaccacgtttcctcgagcagctgcaggagctggatgccaaagcagcagctgttcgagaacaagaggcccggggcacagcggcatgcgcagacgttaggggcgtgcttgaccgcctgagggtgaaggccgtcaccaagatcagagagttcatcctccagaagatttattcctttcggaaaccgatgaccaactatcagatccctcagacggctctgctaaagtataggttcttctaccagttcctactcggcaacgagagggctaccgccaaggaaatcagggacgaatacgtggagactctaagtaaaatttatctgtcgtactatcgctcgtatctcggacggcttatgaaagtacaatatgaagaggtagccgagaaggacgacctcatgggagtcgaggacacagctaaaaaaggcttcttcagcaagccctctctgaggtccaggaataccatcttcactctagggaccagagggtcagtgatcagtccaaccgaactcgaggctcccatattagtgcctcataccgcccagaggggggagcaacgctatcctttcgaggccctgttcagaagccagcactacgccctgttggataatagttgccgggagtacctattcatatgtgaattcttcgtggtctccggccctgctgcccatgacctcttccacgctgttatgggacgcacgctgtctatgactctgaagcacctggatagttacctggcagattgttatgacgccattgccgtgtttctgtgtatccatatcgtgctgcgttttagaaacatagccgccaaacgggatgttcccgcattggacaggtactgggaacaggtcctagccctgctatggccaaggtttgagctaatccttgagatgaatgtgcagagcgtgaggtccaccgatccacaacgcctgggcggccttgatacacggcctcactatataacaagaaggtacgctgaattttccagcgccttggtatcaattaatcagaccatacctaatgagcgaaccatgcagctgctgggccagctccaggtggaagtggagaatttcgtgctgagagtggccgctgagttttctagtagaaaagaacagctggtgttcctgattaacaattacgacatgatgctgggggtgctaatggaacgagcagcggatgacagtaaggaagttgagtccttccagcaactgctcaacgcccggacccaagagttcattgaagagctcctttccccaccttttggcggcctggtggcctttgtaaaggaagctgaagccttaattgaaaggggccaggctgaacggctcaggggtgaagaggcccgcgttacgcaacttatccgcggattcggcagctcctggaagtcctcagtcgaatcactgagccaagacgtgatgcgctcgtttacgaactttagaaacggcaccagcattattcaaggcgcgttaacgcaacttatccagctgtaccatcggtttcaccgcgtgctctcccagccccagctccgtgcactccctgcaagagccgaactgataaacatacaccacctgatggtagagctgaaaaagcacaagcctaacttttag

SEQ ID NO: 212524 - DNA, 2172 bp, Artificial Sequence
  derived and/or modified sequence
atggccgccgccgccaccatggccgccgccgcccgggagctggtgcttcgggccggcacatcagatatggaagaggaggaaggacctctggcaggcgggcccgggctgcaggaacctctgcagctgggagaattggatatcacatcagatgaatttattttggacgaagtcgatgtccacattcaagccaaccttgaagacgagctagtaaaggaggccctaaagactggagtcgatctccggcactactccaagcaagtcgaactggaattgcagcaaattgaacagaaatccattcgcgactatatacaagagagcgagaatatcgccagtctgcataaccagattactgcatgtgacgccgtgctggaacggatggagcagatgcttggagcctttcaatctgacctttctagtatttcttccgaaatccggacccttcaggaacagtcaggcgccatgaatatccggttaagaaacagacaggccgtacgcggcaagctgggcgaattggtcgacggattggtcgtgccctccgccctcgttaccgcgatccttgaagcacccgtaaccgagcccaggttccttgagcagctgcaagaactggacgctaaagcggccgccgtgagagagcaggaagccaggggtaccgccgcctgtgctgatgtccggggggtgctggatcggctcagggttaaagccgtgacaaaaatccgggagttcatcctgcagaaaatatactctttccgtaaacctatgacgaattaccagattccacagaccgcacttctcaaatacagattcttctaccaattcctgctgggtaatgagcgcgctacagccaaggagattcgcgacgaatacgtagaaacattgtcgaaaatctacctgagctactatcgcagttacctcggacggctcatgaaagtgcaatatgaggaggtggctgagaaggacgatctcatgggagtggaggatacggctaaaaaagggtttttcagcaaacccagcttacgtagtaggaatacaatctttactttagggacacgggggtcagtcattagccccactgaactagaagcccctatactggtcccgcatactgcacagcggggcgaacagcgctatcccttcgaagccctgtttcgctcacagcactatgcacttttagataactcttgtagggaatacctattcatctgcgaattttttgtggtctctggtcccgccgcacatgatctgtttcatgccgtaatgggacgtaccctgagcatgactctgaagcatctggattcttacctcgcagattgctacgatgcaatcgccgtcttcctgtgcatccacattgttttgagattcagaaacattgctgccaagagggatgtccccgcccttgacagatactgggagcaggttcttgccctcctgtggccaaggttcgagctgatcctggaaatgaacgtacaatctgtaaggtcaaccgatccccagaggttgggaggtcttgacacacgcccacactacattactcgccggtatgctgaattcagcagtgctctcgtgagtatcaatcagacaatccccaatgagcgaactatgcagctgctgggccagcttcaagtggaagtagagaacttcgtgctgcgggtagctgccgagtttagcagccggaaggagcagctagttttcctaattaacaactacgacatgatgctaggcgtgcttatggaacgtgccgccgacgactcgaaggaggtcgaatcctttcagcaactgttaaatgccaggactcaggaattcattgaggaactgctgtctccgccatttggcggcctggtcgcatttgttaaggaagcagaagccttgatcgagagaggacaagcagaaagacttcgcggtgaagaagcacgggttacacagctgatccgcggattcggctcttcttggaaaagcagtgtggagtccctaagccaagatgtaatgcgatccttcaccaactttagaaacggtacgagcatcattcagggcgccttaactcagctaattcaattataccaccgtttccatcgagtactcagccagccccagctgagagccctgcccgctagggccgaactaatcaacatccaccacctgatggtcgagttaaagaagcataagcctaatttctag

SEQ ID NO: 212525 - DNA, 2172 bp, Artificial Sequence
  derived and/or modified sequence
atggccgccgccgccaccatggccgccgccgcccgggagctggtgctgcgcgcaggtacgagtgacatggaggaggaagaggggcccttggccggagggcctgggctccaggagcctctgcagctgggagaacttgatattaccagcgacgagtttattttggacgaagtggacgtgcacatccaagcaaacctggaggacgagctggtaaaagaggccctgaagaccggcgtggatcttcggcattattctaaacaggtggagttggagcttcagcagatagagcagaaaagcatcagggactacattcaggagtctgaaaacattgcgtcattgcataaccaaatcactgcatgcgacgctgtgttggaaagaatggagcagatgctgggcgcgttccagagcgatctgagctctattagctccgagatcaggaccctacaggaacagagtggcgcaatgaacatacgtctgcggaataggcaggccgtgcggggcaaactgggagagctggtggatggactcgtcgttccctccgcactcgtgacagccatcttggaggctccggtcacagagcccaggttcctcgagcagttgcaagaattggacgctaaggctgcggccgtgcgtgagcaggaagctcgtggtaccgcagcttgtgcggacgttagaggtgtactagaccggcttagggttaaggccgtgacgaaaatccgcgagttcatattgcagaagatatattcatttaggaagccaatgaccaactatcagattccacagactgctctcttgaaatatcggtttttttatcaatttctcttgggtaatgaaagggctaccgctaaagagattcgtgacgagtacgttgaaacattatctaaaatttacctgagctattaccggtcatacctggggcgcttgatgaaagtgcaatacgaggaggtggcagagaaggacgacctgatgggagtggaagacaccgccaaaaagggctttttttccaagccttcactgcgcagcagaaacacaattttcacactgggcactcggggctccgtgattagtcccactgagctcgaagcaccaattctcgtaccgcataccgcccagagaggggagcagcggtatccgtttgaggctctgtttcggtctcagcattatgcacttctagacaactcatgtagagaatacttatttatatgtgagttctttgtggtgagtggtcccgcagcccatgacctcttccacgctgtaatgggccgcacgctgtccatgaccctcaagcacctcgactcatatctggctgactgttatgatgcaattgcagtcttcctgtgtatacacatcgtactacggtttcgcaacatcgcagccaaacgggacgtcccagcccttgatcgctattgggagcaagtgcttgcactcctttggccacgatttgaactgatcctcgaaatgaatgtgcagagtgtccgctccactgacccgcagcgactggggggcctggacacgaggccgcactatattaccaggcggtacgctgagtttagcagtgctctggtatcaatcaatcagaccatcccaaacgaaaggacaatgcagcttctgggacagctccaggtggaggtggaaaattttgttctccgggtcgccgcggagttctcttcacgcaaagagcagttggtctttctgattaataactatgacatgatgttgggggttctgatggagcgagccgctgatgactcaaaggaagtagagagttttcaacagctgctaaatgccagaacacaggaattcatcgaagagctgctaagcccgccgtttggggggttagttgcctttgtcaaggaggctgaggcccttatcgagaggggtcaggcagagagactgcgaggtgaggaagctcgggtgacccagctaatccgcggcttcggcagctcttggaaatctagtgtggaatccttgagccaagatgtgatgaggagttttactaattttcggaatggtacctccattatccagggggcgctgacccagctgatccagttgtatcatcgttttcaccgagtgctgagccaacctcaattgcgcgccctgcccgcaagagcagaactgattaacatacatcacctcatggtcgagctgaagaagcacaagccaaatttctag

SEQ ID NO: 212526 - DNA, 2172 bp, Artificial Sequence
  derived and/or modified sequence
atggccgccgccgccaccatggccgccgccgcccgggagctggtgctacgagcgggcacaagcgacatggaggaagaagaagggcctctggctggagggcccggattgcaggagcctctccagctgggggaactggacattacttcagacgagttcatactggacgaggtggatgtccacatccaagccaacctagaagacgagctcgtcaaagaggcccttaaaacgggcgtggatctcagacactattccaaacaagttgagttggaacttcagcagattgaacagaagtccattcgcgactatattcaggagtccgagaatattgctagtctccataaccagatcaccgcctgcgacgctgttctggagcggatggagcagatgttaggcgccttccaaagtgatttatcgtccatctccagcgaaatccgaaccctgcaagaacagtccggggctatgaacatccgtctacggaacaggcaggcagtccggggtaaactgggcgaactggtcgatggcctcgttgtgccaagtgccctggtcaccgccatcctggaagcacccgtgaccgagcccagatttctcgagcaactgcaggaactggacgccaaggctgctgcagttcgggagcaggaggccagggggaccgccgcttgcgcagatgtgaggggggtgctcgatcgcctgcgagtcaaggctgtgacaaaaatccgggagttcattctccagaaaatctactcctttcgcaagccaatgaccaactatcagataccgcagaccgcgcttctgaaatacaggtttttttatcagtttctgttgggcaatgaacgcgcaaccgccaaggaaatcagagatgagtatgtggaaaccttgtctaagatatacctgagttattacaggagctacctgggtcggctgatgaaagtgcaatacgaagaggtcgcggagaaagatgacctgatgggtgtagaagatacagctaagaaaggcttcttctctaagccttcgctgcggtcgcgtaatactatctttactctgggaacacggggtagcgttatctcacctactgagctcgaagcccccatcctcgttcctcacaccgcacaaaggggcgaacagaggtaccccttcgaggcgctgtttagatcacaacattatgcactgctcgataattcctgcagagagtacctgttcatctgcgaattcttcgtcgtgtctggacccgcagcccatgatttgttccacgctgttatgggtagaaccctgtcaatgaccctgaaacacttggatagctatctcgctgattgctatgatgctatcgccgtctttctttgtatccatattgtcttaagatttaggaacatagctgccaaaagagacgttcccgccctcgaccgatactgggagcaggtacttgcactcctgtggccacgcttcgagctgattctggagatgaacgtgcagagtgtgagaagtacagatccccagcgcttgggcggtctggacacgaggccccactacatcacccgaaggtacgcagagttctcaagcgctttggtcagcataaaccaaacaattcccaatgagaggacgatgcagttactcgggcagcttcaggtcgaagtcgaaaacttcgtgctacgggtggctgccgagttctcctcacggaaggagcagttggtgttcctgatcaacaactatgacatgatgcttggcgtgcttatggagagggccgccgacgactctaaggaagtggaatccttccaacagctgctgaacgctcgcacacaggagttcatagaagagctgctgtctccgccgttcggtgggctggtagccttcgtcaaggaggcagaggcactgattgagagggggcaggcagagagacttcggggggaggaggctagggtaacccagcttatacgcggatttggaagcagctggaagtcctccgtcgagtcgctatcacaggatgtgatgcgaagttttacaaattttcggaacgggacaagcatcatccagggggcactgacccagctgatccagctctaccaccgctttcaccgggttcttagccagccccagctccgagctctgccagccagagcggagctgatcaatattcaccatctgatggtcgaactcaagaaacacaagcctaatttttag

SEQ ID NO: 212527 - DNA, 2106 bp, Artificial Sequence
  derived and/or modified sequence
atggaggaggaggagggccccctggccggcggccccggcctgcaggagcccctgcaactcggcgaactggacatcacatctgacgagttcattctagatgaggtggatgtccacattcaggccaacctcgaagatgagcttgtaaaggaggcgctcaaaaccggggtggaccttcggcactacagtaaacaggtcgaactcgagcttcaacagatagagcagaagtccatccgtgattatatccaggaatcggagaacatcgcgagcctccacaaccaaatcaccgcttgcgacgcggttctggagcgcatggaacaaatgctgggcgcctttcagagcgatctgtcgagtatctcctctgaaatcagaacactgcaggaacaatccggggccatgaacattaggcttagaaacagacaggctgtcagaggaaagctgggcgagctggtcgatggcctcgttgtaccaagtgctttggtcactgcaattctggaggctcctgtcacagagccgagattcttggaacaattacaggaactggacgcaaaagccgcagccgttagagaacaggaggcccgtggtacagccgcctgtgcagatgtgcgaggagttctggaccggcttcgtgtcaaagcagtaaccaagatcagagagttcattctccagaagatctactcttttagaaagcctatgaccaattatcagatccctcagactgccctgctgaaataccggtttttctaccagttcttattaggaaatgagcgcgctactgctaaggaaatacgggatgaatacgtggagaccctgagcaagatctacctctcctattataggagctacttaggccgcctgatgaaagtgcagtatgaggaagtggcagaaaaggatgatctgatgggcgtggaagacacggccaagaaggggttcttctcaaagcccagccttcgcagccggaatacgatctttacattggggacgcggggtagcgtgatttcccctactgaactcgaagccccaatcctggttccgcacaccgctcaacggggggagcaacggtatccctttgaagctctcttcagatcacagcactacgccttgctggacaattcatgtcgtgagtacttgttcatatgcgaattttttgtcgtctccgggcccgccgcccacgacctctttcacgctgtgatgggaagaacactgtctatgacccttaaacacctggactcttacctcgcagactgttacgatgcaatagcagtatttctgtgcatacacatcgtgctgcgattcaggaatatcgctgccaaaagagacgtgcccgcgctggatcgttactgggagcaggtcctggccctgttatggccccgtttcgagctgatcttggagatgaacgtccagagcgttaggtccacagatccccagcggttgggggggttggatacccggcctcactacatcacccggcgctatgccgaatttagtagtgccctcgtctcaattaatcagactatccccaatgagcgcacgatgcagcttctgggacagttacaggttgaggtggagaacttcgtgctgcgggtggctgcagagttctccagtcggaaggaacagcttgtgttcttgatcaacaattatgacatgatgctcggcgttctgatggaacgtgccgctgatgacagtaaggaagttgagagtttccaacagctgttgaacgctcgtactcaagagtttattgaggaactgttatcacccccctttggcggactcgtggcctttgttaaagaggcggaagccctcatcgagcgaggacaggctgagcgtcttaggggcgaggaggcacgagtgacccagttaatcaggggatttggcagctcgtggaagtcttccgtcgagagcctctcacaggacgtaatgaggtcgtttaccaattttaggaatggcacctctattattcagggcgctctgacgcaactgatccaactgtaccatagattccatagggtcctttcccagccccagcttcgggcccttcccgcccgcgccgaactcattaacatacaccatctgatggtggagctgaagaaacataaacctaatttctag

SEQ ID NO: 212528 - DNA, 2106 bp, Artificial Sequence
  derived and/or modified sequence
atggaggaggaggagggccccctggccggcggccccggcctgcaggaaccactgcagctcggagaactagacataacctctgatgaatttatcctggatgaagtagatgttcacattcaggctaacctagaggacgaactggttaaagaggccctcaaaaccggagtggacttgcggcactactccaaacaagtcgaacttgaactccaacagatcgagcaaaagagcatccgcgattatattcaggagtccgagaatatcgccagcctccataaccagatcacagcatgtgatgctgtgctcgagcggatggagcagatgcttggagcattccagtcagatctgtcttctatctcttctgaaatcagaaccctgcaggaacagtctggcgcgatgaatatccggttgcggaatcggcaggccgtccggggcaaactcggagagcttgtggatggactggtcgtcccctccgcccttgttactgccatactggaagcccctgtgactgagcccagatttcttgagcaactgcaggaactggatgcaaaggccgcagctgttcgcgaacaggaagctagggggacagctgcttgcgctgatgtccgcggggtcttggataggctccgggtgaaagcagttaccaaaatcagggaatttattctgcagaaaatttatagcttcagaaaaccaatgaccaactatcaaatcccccagacggctctgctaaagtaccgctttttttatcagttcctgttaggtaacgagcgcgctaccgccaaagaaatcagagatgagtacgtagaaaccctcagcaagatctacctgagctactacagaagttacttgggtaggctgatgaaggtgcagtacgaggaggtcgccgagaaggacgatctgatgggagtcgaggatacagccaaaaaaggtttcttcagtaaaccatccctcaggtctaggaacacaatctttacattaggcacgcgaggtagcgtcatctcacctactgaactagaagcgccaattctggtgccgcatacagcacaaagaggggagcagcgctatccatttgaagctctttttcgctctcagcactacgccctcttagataatagctgcagagaatacctctttatctgtgagtttttcgtggttagcgggccagcagcccatgaccttttccatgcagtgatgggaaggaccttaagcatgacgctgaaacatctcgatagctatcttgcggattgttatgacgctatcgcagtttttttatgtattcatatcgtactgcggttccgtaacatagctgctaaaagggatgtgcctgcattggaccgctactgggaacaggtcttagctttgctctggccgcgctttgagctgatcctggaaatgaacgtgcagtctgtaaggtccaccgacccccagcgcctgggcggcttggatacccggccccactacatcacacgaagatacgcagagttttcctctgctctggtgagtattaaccagacaatccccaacgagcgtaccatgcagcttctggggcaactgcaggtggaggtcgaaaacttcgtactgcgggtggcagccgaattctcatcccgcaaagaacaactcgtttttctcataaacaattacgacatgatgctcggggtgctcatggaacgtgccgcggacgattctaaggaggtcgaatcattccagcagctgctgaatgctagaacacaggaatttattgaggagcttctgtcacccccctttggtggactcgtggcattcgtaaaggaggcagaagcgctgattgagaggggacaggcagaacggcttcgtggagaggaggcgcgtgtgacccagcttatcaggggcttcggaagctcctggaagtcaagcgttgagtccctctctcaggacgttatgagatcatttaccaacttcaggaatgggacttcaatcattcagggcgccctgacgcagctgattcaactgtaccatcgatttcatcgcgttttgtctcagccgcaactgcgagcccttccagctagggcagaactcatcaatatccatcatctgatggttgagctgaaaaagcataaacctaatttctag

SEQ ID NO: 212529 - DNA, 1797 bp, Artificial Sequence
  derived and/or modified sequence
atggagcagatgctgggcgccttccagagcgacctgagcagcatctcctcagagattcgaaccctgcaggaacagtctggagcaatgaatatccgccttcggaaccgtcaagcggtgcgcggcaagctgggggaactggtggacgggctggtagtgcctagtgccctggttaccgcgattcttgaggcgccggtgactgaaccaaggttcctggagcagctgcaggaactagacgcaaaagcggccgctgtgagagagcaggaagccagggggacagccgcctgtgctgatgtgcgcggtgtactggaccgtctccgtgtgaaggcagtgacaaagatccgtgagttcattctccagaaaatctatagctttagaaagcccatgacaaattatcagattccgcagaccgccctgctgaaataccgatttttttatcagtttctcctgggcaacgaacgtgctacagctaaggagattagagacgagtacgtggagaccctttccaaaatttatttgagctattatcgatcctacctcgggcggctgatgaaagtgcagtacgaggaagtcgcagagaaggacgaccttatgggggtggaggatacggctaaaaaagggttctttagcaagcctagtctgaggtccagaaatacaatttttacgctcggcacacgcgggtccgtgatcagtcctacagagttagaagcccctattctggttcctcatacagctcagaggggcgagcagcgctatccatttgaggccttgttccggagtcagcactacgccctgctcgataatagctgcagggagtacctgttcatatgcgaattttttgtggtgtccggtcccgcggcacacgatctctttcacgctgtgatgggacgaacgctttccatgactctgaagcacttggactcttacctcgcagattgttacgatgccatcgcggttttcctgtgtattcacattgtgctcagattccgcaacatcgccgccaaaagggacgtaccagccctggaccgctattgggagcaggtgctagcgctcctgtggccaaggttcgagctgatcttggaaatgaacgtccaatcagtgcgatctaccgatccccagcggctggggggcttggatacccgcccccactacattaccaggcggtacgccgagttttcctcggccctcgtgtctatcaaccagaccatcccaaacgagcgcaccatgcagctcctgggacagctccaggtcgaggtggagaactttgtacttagagtggctgctgaattttctagcaggaaagagcagctggttttcctgatcaataactatgacatgatgctgggcgtgttgatggaacgagcagctgacgattctaaagaggtggagagcttccagcagctgctcaacgcaaggacgcaagagttcatcgaggaactgttgtcgcctccattcggcggtctggtggccttcgtcaaagaagccgaggcgctgatcgagaggggccaggcggaacgcctgagaggggaggaggctagagtgacccaattgatacgaggcttcggatcaagctggaagagcagtgtcgagagcctcagccaggacgtgatgcgaagtttcactaatttccgcaacggaacaagcataatccaaggcgctcttactcagctgatccagctgtatcacagatttcatcgagtgttgtcacagccgcaattaagggccctcccagctcgggccgaactcattaacatccatcacttgatggtggagctaaaaaagcacaagcctaacttctag

SEQ ID NO: 212530 - DNA, 1797 bp, Artificial Sequence
  derived and/or modified sequence
atggagcagatgctgggcgccttccagagcgacctgagcagcatctccagtgaaatccgtaccctgcaagagcagtccggtgcgatgaacatccgcctcaggaatagacaggccgtcaggggcaaacttggcgagctcgtagacggactcgtagtgccatctgcgttagtaacagccatcctggaagcgccagtgacagagcccaggtttctggagcaactgcaggaacttgacgccaaagctgctgccgtgcgcgagcaggaggcccgcggcaccgcggcttgcgccgatgtgagaggggtgctcgatcgcctgcgggtgaaagccgtgacaaagataagagagtttattctgcagaaaatatactcttttcgcaaaccaatgacaaactatcagatcccacaaactgccttactgaagtatcgttttttctaccagttcttgctgggtaacgagcgcgccacagccaaagaaataagggacgaatacgttgagacgctgtctaagatatacctgtcctattacagatcgtatcttggcaggcttatgaaggtccaatatgaggaagtagccgaaaaagatgatctgatgggcgttgaggatacagcaaagaaaggattcttttccaagccatcactgcgttcccgaaacactatctttacgctcggaaccaggggttccgtgatctccccaactgaacttgaggctcccatcctggttccccataccgcccagagaggtgaacagcggtacccctttgaggccttgtttagaagccagcattatgctctgttggacaatagttgtcgggagtatctttttatttgcgaattctttgtcgtgtcaggacccgcggctcacgacctttttcacgcagtgatgggcaggacattgtcaatgacgcttaagcatttggactcatacttggcagactgctatgatgccattgccgtattcctgtgtatccatattgttttgcggtttaggaatatagctgcgaaacgggacgtcccagcactggaccggtactgggaacaagtgctggcactactgtggccccgcttcgagctcatcctcgaaatgaacgtccagtctgtgcggtcaacagaccctcagcgtctcggaggacttgacacccgccctcactatattacccggagatacgctgaatttagtagcgccctcgtttctatcaaccagacgattccaaacgagagaaccatgcagctgctggggcagctgcaggtcgaggtggaaaactttgtcctgcgggtggcagctgaatttagctctcggaaagagcagctcgtttttcttatcaataactatgatatgatgctgggtgtactcatggaacgagcagccgatgattcaaaggaagtggaatcatttcaacagttgctgaatgcgcgaacacaggagttcatcgaagaactcctgtcccctcccttcggtggacttgttgcgtttgtgaaggaagccgaggctcttatcgaaagaggtcaggccgaaaggctgaggggggaggaggcccgtgtcacccagctaataaggggattcggctcttcatggaagtctagtgtggagtccctgtcccaggatgtgatgagatctttcaccaacttccggaacggcacatcaataatccaaggtgcattgactcagcttattcaattataccacagatttcatagggtgctttcccagccacaactgcgagcgttacccgcccgggcggagcttataaatatacaccacctgatggtggaactcaagaagcacaaaccaaatttttag

SEQ ID NO: 212531 - DNA, 2172 bp, Artificial Sequence
  derived and/or modified sequence
atggccgcagcggcaactatggcagcagcggctcgcgagttagtgctgagagctggaacgagcgatatggaagaggaggaagggccactggcaggaggacctggcttgcaagaacctctgcagctgggtgaactggatattaccagcgacgagtttattctggacgaagtcgacgtacacattcaggccaaccttgaagacgagctcgttaaagaggcattaaaaactggggtcgatttacgacactattccaaacaggtggaacttgagctgcaacagatagaacagaagtctataagggattacattcaggagtctgaaaacattgcgagtttacataaccagataactgcatgtgatgcagttctagagagaatggagcagatgctgggtgccttccagagtgatctaagcagcatctcatccgagatccgcactctccaggaacagtctggggcaatgaacattaggctgcgcaacaggcaggcagtcaggggcaagttgggagaattggtggacggactagttgtcccctcagcgctggtgactgctattctggaagcaccagttaccgaacctcggttcctggaacagttacaggagctggacgctaaagccgcagccgtgcgcgagcaggaagctaggggaacggcggcatgcgccgacgtgcgcggagtcttagataggctccgggtgaaagcggtcacaaagataagagaattcatactgcagaaaatttatagctttaggaagcctatgaccaattatcaaatcccccagaccgccctgctgaagtataggttcttttaccaattcctcctcgggaacgagcgggctaccgccaaggaaattagagacgagtacgttgagacactgtctaaaatctacctgtcctactaccggagttacctgggtaggctcatgaaggtccaatatgaggaggtggccgaaaaggatgacctgatgggcgtggaagacacagccaaaaaaggattttttagcaagccatcgttgcgctctcgtaacacaatttttaccctgggcacacgaggctcagtgatctctcctactgagctggaagctccaatcctagtgcctcacaccgcccagcggggtgagcaaagatatcctttcgaggcactttttaggtcccagcattacgcactgctggataatagttgtagggagtacctattcatctgtgagttcttcgtagttagcggacctgccgcacatgatcttttccacgccgtgatgggacgaacgctatccatgaccctcaagcaccttgattcatatcttgccgactgctatgatgccattgccgttttcctgtgtatccatatagtgctcaggttcagaaacatcgccgcaaagcgagacgtgcctgccttagacaggtactgggagcaagtgctggccctgttgtggccacgattcgagttgatcttggaaatgaatgttcagtccgttcgctcaacagatccccaaagactgggaggccttgacaccaggccccactacattaccaggcggtacgctgagtttagcagcgccttggtcagtataaaccagacgatccctaacgagcgaaccatgcagctactgggccagctccaagtggaggtagagaatttcgtgttaagggtggccgctgagttctcgtccagaaaagaacagctggtgtttctgattaataactatgacatgatgcttggagtactcatggaaagagcagccgatgattccaaggaggtcgagtcctttcagcaactactcaacgcaagaacgcaggagttcatcgaggagctcctgtcgcctcccttcggcggtcttgtagctttcgtgaaggaagccgaggctctgattgagcgaggtcaggcagagagattgagaggcgaggaagccagagtcacacagctgatcaggggtttcggctcttcttggaaatcatcggtagagtcgctttcccaggacgtgatgcgttccttcactaactttcgcaacggtacctctattatccaaggggctcttactcagctaattcagctgtatcaccgtttccatagagttctctcgcagccacaactgagagccctccccgcacgggcagaactgatcaatatacatcacctgatggtggagctgaaaaaacacaaaccgaacttttag

SEQ ID NO: 212532 - DNA, 2106 bp, Artificial Sequence
  derived and/or modified sequence
atggaggaagaggaaggcccattagccggaggcccaggcttacaggagcccttgcagcttggcgagctggatattacatccgatgagtttatactagatgaggtggatgttcatatacaagctaatctggaggatgaactggtgaaggaggcccttaagacaggcgtggaccttagacattacagtaagcaagtcgaacttgaactgcaacagatcgagcagaaaagcattcgggactatattcaggaatcggaaaacatcgcctcgctccacaaccagattaccgcctgtgacgccgttttggagcgaatggagcagatgctgggtgctttccagtcagatctgtccagtatttcatccgaaatccggaccctacaggaacagtctggggctatgaatattcgcttgaggaatcgccaagcggtaaggggcaaacttggtgagctggtggatggactggtggtgccatccgcactggtaacagcaattctggaggctccagttaccgaacctcgcttcctggagcagctccaagaactcgatgccaaggctgctgcggtcagagagcaagaggctagggggaccgcagcctgtgctgatgtgagaggtgtgctcgacagactgcgcgttaaagccgtaacaaaaatcagggaattcattttacagaagatctacagctttagaaagccgatgaccaactaccagatcccacagaccgcactgctgaaatacaggtttttttatcagtttttactgggcaacgagcgggcaaccgcaaaggaaatccgggatgagtatgtcgaaaccctgagcaagatctacctttcgtattacagaagctatttaggacggctcatgaaagtgcagtatgaggaggtggccgagaaggacgatcttatgggggtggaagacacggcaaagaagggttttttttccaagcccagcctaaggtcaagaaacaccatttttaccctggggactcgaggcagtgtgatttctccaacggagctagaggctcccatcctggtcccgcacaccgctcagcggggagagcagcgttatccatttgaagctctgtttcgcagccagcactacgccttactggataattcctgccgagagtatctcttcatttgcgagttttttgtcgtgtctggcccagcagctcatgatttgtttcacgcagtaatgggcaggactctgagtatgaccctgaaacatttagattcttatctcgccgattgctatgacgctatcgctgttttcctgtgtattcatattgttctcaggtttaggaatattgccgctaaaagggatgtgcctgcacttgaccggtactgggaacaggtgctggcactgctttggcctcgctttgagctgatattggagatgaatgttcagtcggtaagaagcaccgatccgcagcgactaggaggcctggatacaagaccccactacattaccaggcgttatgccgagttctctagcgctctggtgtccatcaaccagacgatccctaatgaacggaccatgcagctcttgggccagctccaggttgaggtagagaatttcgtactgagggtggccgctgaatttagttcgcggaaggagcagttggtctttctcatcaataactatgacatgatgctcggcgtactgatggagagagccgctgatgactccaaagaggtggagtccttccagcaactcctcaacgcacgcacgcaggaatttatcgaagaattgctgtcaccacccttcgggggactagttgcattcgttaaggaggccgaagccctgatcgaaaggggacaggctgagcggctacggggtgaggaagctagggttacacagctcatacggggttttggcagttcttggaagtcctccgtcgagtcgttgtcacaggacgtaatgaggagcttcaccaatttccgcaacggcacatccatcatccaaggcgctttgacacagctgatccagctctatcatcggttccacagggtgctctctcagccacagttgagagctctgccggctcgggcagagttgataaacattcaccaccttatggtggagcttaaaaaacataaacccaacttctag

SEQ ID NO: 212533 - DNA, 2172 bp, Artificial Sequence
  derived and/or modified sequence
atggctgcggcagccaccatggccgctgctgcaagagaactggtgcttagggccggtacctccgacatggaagaggaggaaggacccctcgccggaggccctggactgcaggagcctcttcagcttggcgaactcgatatcacttccgacgaattcatcctggatgaagtcgatgtacatattcaagcgaacttagaagatgaactcgtgaaggaggctctcaaaactggcgtggacctcaggcactactctaaacaggttgagctcgagctgcagcagattgagcaaaaatctattcgcgactatattcaagagagtgaaaatattgcatccctgcacaaccaaatcacagcatgtgacgcagtactcgagcggatggagcagatgctgggggcattccagagcgatttgtcctcaatttcatctgaaatcagaacactgcaggagcaaagtggagcaatgaacatacgtctgcggaaccggcaggcagtccgaggaaagcttggagagttggtggacggcctggtggtgccaagtgcactggtgaccgccatacttgaagcaccagtgacggaacctcggtttctcgagcagcttcaggaacttgatgccaaagccgctgccgtgagggaacaggaggctagagggacagccgcatgcgcagacgtgaggggcgtgctagaccggctgagagttaaggccgtcactaaaattcgagagtttatcttgcaaaagatttacagttttagaaagcctatgaccaattaccagattccgcagaccgctcttctaaagtatcgcttcttctatcagtttttattggggaatgaaagagcaacagctaaagagatccgagacgagtacgtcgagactctaagcaaaatttacctatcctactaccgaagttatttaggcagactgatgaaagtgcagtatgaagaggtagcggagaaagacgatttgatgggcgttgaggacacagctaagaaggggttctttagtaagccttctctgcggagtagaaacaccattttcactttgggcacacggggatcagttatttcccccaccgagttagaagcaccaattctggtcccccacactgcccaacggggagagcagagatacccttttgaggccctgtttcgctcacaacactacgcgctgctggacaatagctgccgggagtacctttttatatgcgaatttttcgttgtgagtggaccagccgctcatgatctgttccacgccgtgatggggagaacattaagtatgacgttaaagcacctcgactcatacctcgccgattgctacgacgcaatcgccgtgtttctctgtatccatatcgtcctacgcttccggaacatcgcagctaaacgagacgtgcccgcactagacagatattgggaacaggttctcgccctgttgtggccacgcttcgagctaattctcgagatgaacgtccagagcgtgcggtctacggacccccagcgccttggtgggctcgatacccggccacattacataacccgccgatacgctgaatttagctcagccctcgtctctatcaatcagaccattccaaacgagcgtaccatgcagctgttagggcagctccaggtcgaagtggaaaacttcgtcctgcgcgtggcagccgagttcagttcccgtaaggaacagctcgtatttctgatcaataattacgacatgatgttaggcgtgcttatggagcgggctgccgatgatagcaaagaggtggagtcctttcagcagcttttgaatgctcgcactcaggaattcatcgaggagctgttgtcaccacctttcggaggcttagtcgcattcgttaaggaggctgaggccttaattgaaagaggccaagccgaacggctacgcggtgaagaggccagagtaacacagctgatcaggggctttggctcttcatggaaatcaagcgttgaatcactgtctcaggacgttatgcgcagcttcactaactttcgcaatgggacctcaatcatccagggggctctgacccagctcatccagctttaccacaggttccacagggtcttgtctcagcctcagctgagggccttacccgctagagcagagctgataaacattcatcatttgatggttgagctgaagaagcacaagccgaacttttag

SEQ ID NO: 212534 - DNA, 1797 bp, Artificial Sequence
  derived and/or modified sequence
atggagcaaatgctgggggcattccagagcgacctttcttctatcagcagcgaaatcagaaccctgcaggagcaatctggtgctatgaacatccgactccgtaaccggcaggcggtcagggggaaactcggcgagttagtagatggactagtcgtgccctctgccctggtgacggccatcctagaggcacccgttaccgaacctcggttcctagaacagctccaggaacttgatgcaaaggccgctgctgtgcgggaacaggaagcccgtggcaccgcggcatgcgccgacgtcagaggcgtgctggacagactacgcgtgaaggctgtgacgaagatcagagagttcattttgcaaaaaatctattcattcagaaagccaatgactaattaccagattccacagacagccttgctgaaataccgctttttttaccagtttctacttggcaatgagcgagccactgccaaggagattagggatgagtacgttgagaccctcagcaaaatatacctgagttactaccggagctatctcggaagactgatgaaggtgcagtatgaggaagttgcagaaaaagacgaccttatgggtgtagaggacactgcaaaaaagggctttttctccaagccttccctgcgctcacgaaataccatctttaccttaggcaccaggggcagtgtaatctccccaactgagctggaagcccctattttggtaccacatacagcccagaggggggaacagcggtatccctttgaggccttgtttcgttcccagcactatgctttattagataattcttgcagggagtatttgttcatctgcgagttcttcgtcgttagcggccctgccgcacacgacctctttcacgctgttatgggtaggactctaagcatgaccctcaagcacctggactcttacctcgccgattgctatgacgccattgccgtattcctctgcattcacatcgtgctccgattccgtaacattgcggctaagcgcgatgtgccagctctcgacaggtattgggaacaggtgctggctctcctgtggccacggttcgagctcatccttgaaatgaatgtccagtcagtgcgttctacggatccccaacgcctgggcggactggacactcgccctcattatataacgcgaagatatgccgagttcagctccgcgctggtgtcaatcaaccaaaccattcctaatgagcgcacgatgcaactgttagggcagttgcaagtggaagtggagaacttcgtgctccgggtggccgctgaattctcgagcagaaaggagcagctggtgtttctgattaataattacgatatgatgctcggcgtgctaatggagcgggctgcggatgattctaaggaggtcgagtcattccaacagctcctgaacgctagaacacaggagtttatcgaagagttactctcgccaccatttggaggcctggtggcgtttgtgaaagaagctgaagcgttgatcgaacgaggccaggccgagagattacggggtgaagaggctagggttacccagctgatcagagggttcggctcctcttggaagtccagtgtggaatccttgtctcaggatgtcatgcgaagttttaccaattttagaaatggtacctctattatccaaggggctctgacccagctgattcagctgtaccacagatttcatagggtattatcacagccgcagcttcgagcgctacctgccagggccgagttgatcaacattcatcacctcatggtggaacttaaaaaacacaaaccaaatttttag

SEQ ID NO: 212535 - DNA, 2172 bp, Artificial Sequence
  derived and/or modified sequence
atggcggcagccgcaaccatggccgcagccgctagggagctggtgctgcgcgcaggtacctcggacatggaggaggaagagggtccactcgcaggcggaccaggactgcaggagcccctgcaattgggagagctggacattacttctgatgagtttatactcgatgaggtggatgttcatatccaggccaacttggaggatgagctcgtgaaagaggctctgaagactggagtcgatctgagacactacagcaagcaggtggagctcgagctgcaacaaattgagcagaaatctataagagactacatccaggaatccgagaatatcgcaagcttgcacaaccagatcactgcctgtgatgctgtgctggagcggatggaacaaatgttaggcgctttccagtcagacttgtcatctatttcttctgaaattcgaaccctgcaggagcagtctggggcaatgaatattagactccgaaaccggcaagctgtgcggggaaagcttggggagctggtcgacgggttggtggtacctagcgccttggtgaccgctatccttgaggcaccggttaccgaacccaggtttctggagcagcttcaagagctggatgctaaggcagctgccgtaagagaacaagaagctcggggaactgccgcatgtgccgacgtgagaggcgtgctcgacagacttcgggtgaaggccgtaactaaaatccgcgagttcattcttcagaagatctacagttttcgtaaacccatgaccaactaccagatacctcagacagctcttctcaagtataggttcttttatcagttcctgctgggcaacgaacgggcaacagcaaaagaaatccgcgacgaatacgtagaaaccttgtctaaaatctatctgagctattaccgaagctatctggggaggctgatgaaagtccagtacgaagaggtagctgagaaggatgacttgatgggcgtggaggacacggctaagaagggtttcttcagtaaaccttcgttgcggagccgaaatacaatttttacgcttgggacgcgtgggagtgtcatatcgccaacagaactcgaagcccctatccttgtgccacacacagcacaaaggggagaacaaaggtatccatttgaggcactttttcgatcacagcactacgcccttcttgataattcatgtagggaatacctgtttatatgtgagttttttgttgtgagtggcccagcagctcatgacctgttccatgctgtgatgggaaggactctgagcatgacattaaagcacctcgactcttatcttgcggactgttacgatgcaatagccgtctttttgtgcatccacatagtgctgcggttccggaacatagctgctaagcgagacgtccctgctctggataggtattgggagcaggtgttggccctgctctggcccagatttgaactaattttggagatgaacgtccagagtgtgagaagcactgatccgcagagactcgggggtcttgataccaggcctcattatatcacacgcaggtacgcagagttcagtagcgccttggtcagtattaaccagaccattcccaacgagaggactatgcaactgctggggcagttgcaggtcgaagtagaaaattttgtgctgcgggtggctgcggaattctccagtaggaaggaacaattagtgttcctcatcaataattacgacatgatgctgggcgtgctgatggagagggccgctgacgactctaaagaagttgaaagcttccagcagctattgaacgctcgaacccaggagttcatcgaggaactcctgtctcccccttttggcggactggtggcattcgtcaaggaggcagaagctttgattgagcgtggccaggccgaaaggctgcgtggcgaggaggctcgcgtaactcagcttattcgtggatttgggagctcctggaagtcatctgtggaatcgctgtctcaggatgtgatgaggagcttcacaaattttcgtaacggaacgagtataatccagggtgcactaacacagctgatacagttgtaccaccggttccacagggttctctcacagcctcagttgagggctctgcccgcacgggcagagctcatcaacatccaccacctgatggttgaacttaagaaacacaaacccaatttttag

SEQ ID NO: 212536 - DNA, 2172 bp, Artificial Sequence
  derived and/or modified sequence
atggctgcggctgccactatggcagctgctgctcgggagcttgtgctgagagcaggtacttcggatatggaagaggaagagggccctcttgccggagggccaggactccaggagcccctgcagttgggcgaactggatattacatctgacgaattcatccttgatgaggtagacgttcacatccaggccaatctggaggatgaattggtaaaggaggctctgaaaactggtgtggatctgcgccactactccaagcaggttgagttagagctgcaacagatagagcagaaatcaatcagggattacatccaggagtctgagaatattgccagcctgcacaaccagatcactgcctgcgacgccgttttagaacggatggaacaaatgctgggcgcattccagtctgatctaagctcgatttcatctgaaatcaggactctgcaggagcagtccggggctatgaacattcgactgaggaatcgtcaggccgtgcgaggcaagctcggcgaattggtggacggattagtcgtgcccagtgctctggtgacggcgattctggaggctcccgttactgagcctagattcctggaacaactccaggagttggacgcaaaggccgctgcggtgcgggaacaggaagctaggggaactgcagcctgcgccgatgtgaggggggtccttgacagactgagagtcaaggccgtgaccaaaatccgggagtttattctccagaagatctattcctttcgtaaacccatgaccaattatcagatcccgcagacagccctgcttaagtatcgtttcttctaccagttcctcctcggaaacgagagagcaaccgccaaggaaattcgagacgagtacgtggaaactctttccaagatctatctctcatactacagatcctacttaggacggctcatgaaggtgcagtacgaagaagtagccgaaaaggacgatttgatgggagtggaagatactgccaagaaagggttctttagtaaaccatctcttcggtccagaaatactatctttactctgggtacgcggggatctgtgatttcacccacggaactggaggccccaatcctggtgcctcacaccgcccagaggggcgaacaaaggtatccgtttgaagctcttttccgttcccagcattacgccctgctggacaatagttgtcgtgaatatctcttcatttgtgaattcttcgtggtgtcaggacccgctgcccatgatctctttcatgccgtgatgggcagaaccttgagcatgacacttaaacacctggactcctacctcgccgattgctacgatgctatagcagtttttctctgcatccacattgtgctccgctttcgaaacatcgccgctaagagggacgtccctgctctcgaccgatattgggagcaggtgctggcactcctgtggccaaggttcgagctcattttggagatgaacgtccagtcagtgcggtctaccgacccgcagcgtctgggcggactcgatactcgaccacattatattacaaggaggtatgccgaattctcctctgcgcttgtcagtattaatcagactattccaaatgagcgcacaatgcagctgctaggccagctgcaggtcgaagtcgagaattttgtgttgagggtggccgcagaattttcctcacggaaggaacagcttgttttcttaattaacaattacgacatgatgctgggtgtacttatggagagggctgcagatgactctaaggaagttgagtcattccagcaacttctcaatgcacgcacccaggagttcatcgaagagctgctgagtccgccatttgggggtctggtggccttcgtgaaagaagcagaggcccttattgagagggggcaggccgagcggctgcggggagaggaggccagagttacccagctgataaggggtttcggctcgagctggaagagctctgtggaatctctcagtcaagatgttatgcgaagtttcaccaacttcaggaacggtacttcaattatacaaggtgctctcacccagttgatacagctctaccacagattccatcgggtgttaagtcagcctcaactgcgcgcactaccagccagggcagaactgatcaatatacatcacttgatggtggaactgaaaaaacataagcccaatttttag

SEQ ID NO: 212537 - DNA, 2172 bp, Artificial Sequence
  derived and/or modified sequence
atggctgcagcggcaacaatggctgctgctgccagagaacttgtcctcagagctggaacatctgatatggaagaagaagaaggacctctggcaggcggaccgggactgcaggagccattacaactgggtgagctagacattacctctgacgagtttatactcgacgaagtcgatgtccatatccaagccaacctggaagatgagctcgtgaaagaggctcttaaaactggcgtggacctgcggcactattcgaagcaagtcgagcttgagcttcagcagatcgagcagaagtccattagggactatatacaagagtcggagaacatcgcctctctccataatcaaattactgcctgcgacgccgtccttgagaggatggaacaaatgctgggggcattccagtctgacctcagcagtattagcagcgaaatcaggactctccaggagcagagcggtgccatgaacatccgcctccgaaacagacaagccgtgcggggaaagttgggtgagctggtcgatgggctcgtagtgccctctgctttagtgacggcaatactggaggctcctgtcaccgagccacggttcttggagcaactgcaggaactcgacgcaaaggccgctgcagtgcgcgagcaagaggctaggggaaccgcggcttgcgccgacgtaagaggggtgctggaccgtctgcgcgtaaaagcagtgactaaaattcgtgaattcatactgcagaaaatctacagtttccgtaaacctatgacaaactaccagattcctcaaacagccctcctgaaatatcgttttttctatcagtttcttctgggcaacgaaagagcaactgccaaggaaataagggatgagtacgtggagaccttgtccaagatctacctgtcatactataggtcttacctggggcgactgatgaaagtgcagtacgaggaggtggccgagaaagatgacctgatgggggtggaggacactgctaagaaaggattctttagcaaaccatcgctgcgcagccgcaacacaatctttacgctgggtacccgcggaagcgtgatcagccctaccgaactggaggcaccaattttagttcctcacacggcacaacggggtgagcagcgctatccgtttgaggccctgtttaggtcccaacactatgcgttgctggacaattcctgcagagaatatttgttcatatgcgagttcttcgtagtcagcggacctgccgcacacgatctctttcatgctgttatgggcagaacactttcaatgactctcaagcacttggacagttaccttgccgactgctacgacgccattgcagttttcctctgtatccatatcgttttgcgatttcgtaacatcgccgcaaaacgtgacgtgccagcactggatcgctattgggagcaggtgctggcactgttgtggcctcgttttgagttgattctggagatgaacgtacagtctgtccgtagtaccgaccctcaaagattggggggactcgacacccgacctcactacataactcggcgatatgccgaattttccagcgcattggtgagcatcaatcagaccattccaaatgagcgcactatgcagctcctggggcagcttcaagttgaggttgagaattttgttctgcgcgtggccgctgagttctcgtccagaaaagagcaactcgtcttcctgattaacaattacgatatgatgctcggcgtcctgatggagcgcgcagccgatgattccaaagaggtggagtcctttcagcagcttctcaatgccagaacccaagagtttatcgaggaactgcttagtccgccttttgggggacttgttgcgttcgtcaaagaagcagaggctctcattgaaagaggccaggccgagaggctgcgaggcgaggaggctcgggtcacgcaactcatcaggggcttcgggtcttcttggaaaagctcagtagagtcgttgagtcaggatgtgatgagatcgttcaccaacttccgcaatggcactagtataatacagggggcattgactcagctcatccagctataccataggtttcatagagtgctgagccagcctcagttgcgcgcacttcccgcacgagctgagctcattaacattcaccacctgatggtggaactgaagaaacacaagccaaacttttag

SEQ ID NO: 212538 - DNA, 2172 bp, Artificial Sequence
  derived and/or modified sequence
atggcagcagccgctaccatggccgctgctgccagggaactcgttcttagagcaggcacctctgacatggaggaagaggaggggccacttgctggagggcctggcttacaagaacctctccagctcggagagctggacatcacctcagacgagtttatcctggacgaggtggacgttcacattcaagctaatctggaggacgaactagtgaaggaggctctcaaaactggcgtggacctgcgtcactattcaaagcaggtggaactggaactccagcagatcgagcaaaaatcgatccgcgactacatccaggagagcgagaatatcgcctccctacacaaccagatcactgcgtgtgacgcagtcctggaaaggatggagcagatgctgggagccttccagtcagatctgtcctccatatcatcagaaattaggaccctccaggagcaatccggagcaatgaacatcaggctgcggaaccgtcaagcggttagggggaagctgggggagttggtggatggactcgttgttccatctgctctggtgacagctattctcgaggcccctgtgacagaaccacgttttctggagcagttacaggagctagacgccaaagccgctgccgtaagggagcaagaggcacgaggcactgcagcctgcgcagatgtgaggggagtccttgaccgactgcgtgtgaaggccgttactaagattcgggaatttatattacaaaaaatttattccttccgaaagcctatgactaactatcagatcccacagacagctctgcttaagtacagattcttttaccagttccttcttggtaacgagcgtgccaccgccaaggaaatccgggatgaatacgtcgagacgctgagtaagatatacttaagctattataggagttatctcggcaggctaatgaaagtgcagtatgaggaagtggccgaaaaagatgacctcatgggggtggaggacacagctaaaaaaggattcttttccaaaccctccctgcggagtaggaataccatctttacacttgggacacgtggttccgtcattagcccaaccgagctggaagcgccaattcttgtcccccacaccgcgcagagaggcgaacaacggtacccattcgaagccctcttcaggagccagcactatgctcttctagacaatagctgcagggaatatctctttatctgtgaattctttgtagtgtccggcccagcagctcacgacctcttccatgcagtgatgggacggacactcagcatgactctgaagcaccttgacagctatctggcagattgctacgacgcgatcgccgtctttttatgtattcatatagtgcttcgctttcgaaacatagccgctaagagggatgtgcccgcactcgatcggtactgggaacaggttctggctctcctgtggccaaggtttgaattgatcctggagatgaacgtgcagagtgttcggtccactgaccctcagcgactcggtggcctggacaccagaccacactatataaccaggcgttatgcagagttttcatctgccctagtttctatcaatcagacaatccctaatgaaaggactatgcagctgcttggtcagctccaggtcgaggtggagaactttgttctgcgggtggccgctgagttttcgtcaaggaaggaacaactggtgtttttaatcaacaactacgacatgatgctaggtgtcctgatggagcgtgcagccgacgactcaaaagaagtggagagttttcagcagctgctcaacgccagaacacaggaattcatcgaggaattactgagtcctcctttcggaggcctggttgccttcgtaaaagaagccgaggcactcattgaaagaggccaagcagaaaggcttagaggcgaggaagccagggtgacccagttaatccgtggatttggctcaagctggaaaagctccgtggaatcgctgagccaggacgtcatgcgatcctttaccaatttccgaaacgggacctctatcatccagggggcactgactcagttgatccaactgtaccaccgcttccatcgcgtgctgtcacagccccaactgcgagctttacctgcacgagccgagctgatcaatattcatcatctgatggtggagctgaagaagcacaaaccgaatttctag

SEQ ID NO: 212539 - DNA, 2106 bp, Artificial Sequence
  derived and/or modified sequence
atggaggaagaggaaggacccttggcaggaggaccagggctgcaggaaccgttgcaacttggcgagttagatattacttctgacgagttcattttagatgaggtggatgtccatattcaggccaatctggaagatgaacttgttaaagaggccctgaagaccggcgtcgacctccgccactactctaagcaggtggaactcgaactgcagcaaattgagcagaagtccatccgggattacatccaggaatccgaaaacatcgccagccttcataaccaaattaccgcttgcgatgctgtgctcgagcgtatggagcagatgctcggtgcatttcagagtgatctaagctctatttcttcggaaatcaggactctgcaggagcagtcaggcgcaatgaacattcggctccgcaatcgtcaggctgtgcgtgggaaactgggagagttggtggacggcctggtcgtgccatccgctctggtgactgcgatcttggaagcccctgtgacggagcccaggtttctggaacagctgcaggagttagatgccaaggccgctgcagtgagggaacaggaggcacgaggaaccgccgcttgcgcagatgtgcgcggtgtccttgaccgactgagggtcaaggccgttacaaaaatcagagagttcattctacagaagatctacagttttcgaaaacccatgacaaattaccaaattcctcagaccgcgctcttgaaatatcgattcttctaccaattcttacttggaaatgagcgggctactgctaaagagatcagggatgagtacgtcgaaactctgtccaaaatctatctgtcctattaccgtagctacctgggccgactcatgaaagtgcagtatgaagaagtggcggaaaaggatgatctgatgggagtggaggacaccgccaagaagggattctttagtaagcccagtcttcgtagccgcaataccatctttaccctggggaccaggggttctgtcatcagcccaaccgagctggaagcgcctattcttgttccacacactgcacagaggggggagcagcgatacccctttgaggccctgttccggtcccagcactacgctctgctcgataactcgtgcagagaatatctgtttatctgcgaattttttgtagtgtccggaccagccgctcacgatctgttccacgctgtgatgggacgaaccctgagcatgacccttaaacacctggacagttatcttgcagactgctatgacgctatagccgtgttcctctgtatacacatcgtgttgcgattcagaaacattgcagcgaaacgagatgtgcccgctctcgatagatactgggaacaggtgcttgcgctgctctggcctcgctttgaactaatcttggagatgaacgtgcagtccgtgagatcaaccgacccccagcggctggggggactcgacacgcgccctcactatataacaaggcgctacgccgagtttagctccgcactcgtgtccatcaatcagactatccccaacgaacggacaatgcaactattaggacagctgcaggtcgaggttgaaaatttcgtcctccgcgtggctgccgagttttcttccaggaaggaacagctagtgttcctgatcaataattacgatatgatgctgggcgtacttatggagcgggcagccgacgactccaaagaggtagagtcttttcagcaactccttaatgcacggacccaggaattcatcgaggagcttctgagtcccccatttggtggactggtcgcctttgtgaaggaagctgaagcgcttattgagcggggtcaggcggaacgactgaggggggaagaggctagggtcactcagctgattaggggtttcggttcatcatggaagagctccgtcgagagcctctcgcaggacgtgatgaggtctttcacaaatttccggaacggcactagcatcatccagggcgctcttacacagctcatccagctgtaccaccgctttcatcgggtcttgtcacagccccagttgagagctctgcctgctcgggcagaacttattaatatccatcacttgatggttgagctaaagaagcacaaaccaaatttctag

SEQ ID NO: 212540 - DNA, 2106 bp, Artificial Sequence
  derived and/or modified sequence
atggaggaagaagagggaccattggctgggggacctggcctgcaggaacccctgcagcttggtgagctcgatataacttctgacgagtttatccttgacgaggttgatgttcatattcaggccaatctagaggacgaactagtcaaggaagccctgaagacaggcgtggacctgagacactacagcaagcaggtggagctcgaactgcagcaaatcgaacagaagagcatccgtgactatatccaggagtccgaaaacatcgcttcactgcataaccagatcacggcatgtgatgctgtcttagagagaatggagcagatgttgggggcttttcagagcgatcttagctcgatcagttccgagattcggaccctccaagaacaaagcggggctatgaacattcggctgagaaatcgtcaggccgtgcgcggaaaactgggagagctcgtcgatggcttggtcgttcctagtgccctggttacggccatccttgaagcacccgtcaccgaacccagatttctggagcagctccaggaattggacgctaaggccgcagcagtccgtgagcaagaagcgcgaggcactgcagcctgtgcagacgttaggggggtcctcgacagactccgggtgaaagctgtcacaaagatcagagagtttatcctccaaaagatctactcctttagaaagcccatgacaaactaccagattccccagacagccttgttgaaatatagatttttctaccaatttctgttgggaaatgaacgggcaacagctaaggagattcgggacgaatatgtcgaaactttgagcaaaatctacctgagttattaccggtcatacctgggacgcctgatgaaggttcagtacgaagaggtcgctgagaaggatgacctcatgggcgtggaggataccgccaaaaaaggattctttagcaagccctcattaagatcgcgcaacacaatctttacactgggtactcgaggaagcgtcatcagccccactgagctggaggcccctatcctggtgccgcacaccgcacagagaggagagcagcggtacccgtttgaggcactgtttcgatcccaacactacgcccttctggataattcctgtcgcgaatatctatttatatgcgagtttttcgtggtatctggacctgcggctcacgacctgttccacgcagtgatgggacgcaccctttcaatgactctaaaacacctagacagctaccttgctgactgctacgacgccattgctgttttcctctgcattcacatcgtgctgaggttccggaatatcgcagctaagagggacgttcccgcactggatcggtattgggagcaagtcctcgccctgctttggcccagattcgaactgatattggaaatgaacgttcagtctgtgagatccaccgatcctcagaggttgggtggactggacacacgccctcattacatcacgagaagatatgccgagttttcctccgccttggtctcgatcaatcagacaatccccaacgagagaacgatgcagttactgggacagctgcaggtggaagtggaaaacttcgtgcttcgggtcgctgctgagttttcctcacggaaggagcagctggttttcctcattaacaattatgatatgatgttgggcgtgctgatggaaagggccgctgatgatagcaaggaggtggagagctttcagcagctcctcaacgccagaacccaggaatttatcgaggagctcctgtcacccccttttggaggacttgtagccttcgtgaaggaagcggaggcactgatagagcgcggtcaagccgaacgcctccggggtgaggaagcaagagtcacccagctgatcagagggtttggatctagttggaagtcatccgtggagtctttatcccaggatgtcatgagaagctttaccaattttcggaatgggaccagtattatccaaggggctctgacacaactgatccagctttaccaccgatttcaccgggttctttcccagccgcagctccgtgctttacctgctcgggctgagttgatcaacatacatcacctcatggtggagctaaagaaacataagccgaatttctag

SEQ ID NO: 212541 - DNA, 1797 bp, Artificial Sequence
  derived and/or modified sequence
atggagcagatgctgggagctttccagagtgatctttctagcatcagctcagagatcagaacccttcaagaacagagcggagccatgaacataagactcaggaatcgtcaggccgtgcgagggaagctcggcgagctggtggacggactagtggtgcccagcgctctcgttaccgcaattcttgaagctcccgttactgagccaaggtttctggagcaactgcaagaactggatgctaaggctgcagccgtgagggagcaggaagcacgcggaacggccgcttgtgccgacgtgaggggcgtgctcgatcggctgcgggtgaaggctgtcacaaagatccgtgagtttatcctgcagaaaatctatagctttaggaagccgatgaccaattatcagatccctcaaactgccctcctgaagtacagattcttttaccaatttttactggggaatgaaagagctacagcaaaggagatcagagacgagtatgtggagacactctccaaaatctatttgagttattatagatcttatctcggacgactgatgaaggtgcagtacgaggaggtggcggagaaggacgaccttatgggcgtagaggacaccgctaaaaaggggttcttttcgaagccttcccttagatcacgtaatacaatcttcacactcgggactcgcggttccgttatctctccaaccgaacttgaagctcccatattggtgccccacacggcgcagcggggtgagcagcgctaccctttcgaggccttgtttcgcagccaacattacgctttgctcgacaacagctgtagagagtaccttttcatctgtgagttcttcgtagtgagcgggcctgcagcccatgatctgtttcatgctgtcatgggcaggaccctgagcatgactttgaagcacctggacagttacctggcggattgctacgacgcgatagctgtgttcctttgcatccacattgttttgcgatttaggaacatcgcagcaaaaagggacgtacccgctctagatcgctactgggagcaggtcctggcactgctgtggccgagattcgaactgatccttgagatgaacgtacagagcgtgcgcagcaccgatcctcaaaggctgggaggccttgacaccagaccacactatatcacacgtagatacgccgaattttcttccgccttggtttctatcaaccagaccattcccaacgaaagaacaatgcagttgctgggtcagctgcaggttgaagttgaaaactttgtgttaagggtcgccgcagagttctcttctcgcaaggagcagttagtcttccttattaataattacgatatgatgttgggggtcctgatggagagggctgctgatgattctaaggaggttgaaagcttccaacaacttcttaacgctcgcacccaggaattcattgaggaactgctgagcccgccatttggtggtctcgtggctttcgtgaaagaggctgaagcgttgattgaaagggggcaagcggagagattgcggggtgaggaggcaagggtgactcaactgatcagagggttcggaagtagctggaagtctagtgtagaatcccttagtcaggacgtgatgagatccttcaccaacttcaggaacgggacgtcaatcattcaaggagcactcacccagcttattcagctttaccatcgcttccaccgagtgctctcccaaccccagcttagagcactgccagcacgtgctgagctcataaatatacaccacttgatggtggaactcaagaagcacaaacctaatttctag

SEQ ID NO: 212542 - DNA, 1797 bp, Artificial Sequence
  derived and/or modified sequence
atggaacagatgctgggggctttccaatccgacctgtctagtatctcaagcgaaatcagaactctccaggagcagagtggagcaatgaacattagactccgtaatcggcaggccgtcagagggaagctgggtgaattggtagatggcctcgtggtgcctagcgctctagtgactgcgatcttggaggcccctgtgacagaacctaggttcctagagcagctgcaggagctggatgcaaaggccgctgctgtacgagagcaggaggccaggggcactgcagcatgcgccgatgtcagaggcgtgctggataggcttcgggtgaaagccgtgacaaagatcagggagtttattcttcagaagatttatagcttcagaaaacctatgaccaactaccagatcccgcagaccgccctgctcaagtaccggttcttttatcagtttttactgggcaacgaaagagccacagccaaagagatccgtgacgagtatgtagaaaccctgtctaaaatctacttgtcatattaccgttcctacttgggcagactcatgaaggtgcaatacgaggaggtagccgagaaagacgatcttatgggagtcgaagacacggccaagaaagggtttttctcgaaaccgtccctcaggtcacgtaacacaatctttaccttgggcactagaggctctgtgattagccccacagaactggaagccccaattcttgtgccacatacagcccagcgcggagagcagagataccccttcgaagcattgtttcgtagccagcactatgccctgctggataactcatgtagggagtatctcttcatttgcgagtttttcgttgtcagtggtcctgccgcacacgacctcttccacgcagtgatggggagaaccctgtcaatgacgcttaagcatctggatagttatctggccgactgttacgacgctatagctgttttcctttgcattcatattgtgcttcgattcaggaatatcgccgctaaaagagatgttccggctctggaccggtattgggagcaggtgcttgcacttctctggccaaggtttgagttaattctcgaaatgaacgttcagtcagttagatctactgatcctcagcggctgggtgggctcgatactcgacctcactatataacacggagatacgctgagttctcatcagctcttgtatctatcaaccagactattcctaatgaaagaaccatgcagctgctgggacagctgcaagtggaggtcgaaaattttgtcctgagagtagccgcagaattctcgtctcgcaaagagcaactcgtgtttctcatcaataactacgatatgatgctgggcgttctgatggaaagggcggctgatgactccaaggaagtcgaaagctttcagcagcttcttaacgcgcgaacccaggaatttatcgaggagctgctgtccccgccttttgggggactagtggcctttgtgaaggaagccgaggcccttatcgaaagagggcaagcggaaaggctgcgcggagaagaagcaagagtcacacagcttatcaggggatttggctcctcctggaaatcatccgtggagagtctcagccaggacgtgatgaggtccttcacgaattttagaaatggtacatccataatccagggagccctcacgcaattgatacagctttaccaccggttccacagagtgctgtctcagccgcagctgcgcgcactccccgctcgagcagagttaattaatatccatcacctgatggttgagcttaagaaacataagccgaacttctag

SEQ ID NO: 212543 - DNA, 2960 bp, Artificial Sequence
  derived and/or modified sequence
agcgaaggttccggggctagtttgtgtttcagacttccatatttccatttgcagttgggtgaagtggttagagctgaaaggggacagctggagtcaaacaacttaactcaaatatctgggaacgatttcgcgctgaggaagaccctttgggacttgtagctccactccggggaacggactcgccgggactgacagttgccggaagtgaggctgcggggaatggccgccgctgcgaccatggcggctgcggcccgggaactggtgttgcgggctgggacctcagatatggaggaggaagagggcccgctggcgggtggtcctgggctccaggaaccactgcaacttggggagttggatatcacttctgatgaattcatcctggatgaagtggatgttcacattcaggcaaatctggaggatgagttagtaaaggaagctcttaaaacgggtgtagatctccgtcactattcaaagcaagttgagctggagctacagcagattgaacagaaatccattcgggattatattcaagagagtgagaatatagcatctctacacaaccagatcacagcctgtgatgctgtcctggagcgaatggagcagatgttgggagcttttcagagtgacctcagctccatcagctctgagatccggacactgcaggaacagtcaggagccatgaacattcgacttcgaaatcgccaggcagttcgggggaaacttggggagcttgttgatggtctggtggtgccttctgctctggtcacggcaattctggaggctccagtgacagagcccaggttcttggagcagctacaggagctggatgccaaggcagccgcagtcagagagcaggaagctagaggcacagcagcctgcgcagatgtcagaggcgtgctcgatcggctccgggtcaaggcagtgacgaagatccgagagtttatcctccagaagatttattccttcaggaaacccatgaccaactatcagatcccccagacggccctgctgaagtacaggttcttctatcagtttctgctgggcaatgaacgagcaacagcaaaggagatcagggatgaatatgtggagacgctgagcaagatttacctgtcttactaccgctcttacctggggcggctcatgaaggtgcagtatgaggaagtcgctgagaaagatgatctaatgggtgtggaagatacagcaaagaaaggattcttctcaaagccatcgctccgcagcaggaacaccattttcaccctaggaacccgcggctctgtcatctcccccactgaacttgaggcccccatcctggtgcctcacacagcgcagcgcggagagcagaggtatccatttgaggccctcttccgcagccagcactacgccctcctagacaattcctgccgcgaataccttttcatctgtgaattttttgttgtgtctggcccagctgcacacgacctgttccatgctgtcatgggccgtacactcagcatgaccctgaaacacctggattcttatctagctgactgctacgatgccattgctgtttttctctgtatccacattgttctccggttccgtaacattgcagcaaagagggatgttcctgccctggacaggtactgggaacaggtgcttgccttgctatggccacggtttgaactgatcctggagatgaatgttcagagcgtccgaagcactgacccccagcgcctaggggggttggatactcggccccactatatcacacgccgctatgcagagttctcctccgctcttgtcagtatcaaccagacaattcctaatgaacggaccatgcaattgctgggacagctgcaggtggaggtggagaattttgtcctccgagtggcagctgagttctcctcaaggaaggagcagcttgtgtttctgatcaacaactatgacatgatgctgggtgtgctgatggagcgggctgcagatgacagcaaagaggttgagagcttccagcagctgctcaatgctcggacacaggaattcattgaagagttgctgtctcccccttttgggggtttagtggcatttgtgaaggaggctgaggctttgattgagcgtggacaggctgagcgacttcgaggggaagaagcccgggtaactcagctgatccgtggctttggtagttcctggaaatcatcagtggaatctctgagtcaggatgtaatgcggagtttcaccaacttcagaaatggcaccagtatcattcagggagcgctgacccagctgatccagctctatcatcgcttccaccgggtgctgtcccagccgcagctccgagccctccctgcccgggctgagctcatcaacattcaccaccttatggtggagctcaagaagcataagcccaacttctgatgtgccagaaaccgccctgagatctgccggtcatctccatggacttctgcaccccattccatacccttcttcacctggggtaccccttccagttttccccttgcttcccaggcccttgacatggcttacctgccttcactcccagcaccttgcccaacaggataagctggatccccttggccttctgaatatcccagtgtcttcaggtttcccaagaccacttccctgtgggcttccaaaatggcctttatcatttctccagtctgtcaccctcctttcctgctcccatacacccaaggcttgtttcttcccctgtaaaaaccactgcctcaatctctggttcactcaactagtcaccatgtcctgaggcatgaagcctcctcagctcttggaattgctggcaaggggtgactgcctctgagtcattgtgtttttcagagtgatttcttttctgtagctttttgacctaagatctcagcaatttgaacactaacctctcccctcctggctcaagaattactccgaagtcagtctgcagaaaataaatatttagtatgacatgacactta

SEQ ID NO: 212544 - DNA, 2687 bp, Artificial Sequence
  derived and/or modified sequence
tttcagacttccatatttccatttgcagttgggtgaagtggttagagctgaaaggggacagctggagtcaaacaacttaactcaaatatctgggaacgatttcgcgctgaggaagaccctttgggacttgtagctccactccggggaacggactcgccgggaactggtgttgcgggctgggacctcagatatggaggaggaagagggcccgctggcgggtggtcctgggctccaggaaccactgcaacttggggagttggatatcacttctgatgaattcatcctggatgaagtggatgttcacattcaggcaaatctggaggatgagttagtaaaggaagctcttaaaacgggtgtagatctccgtcactattcaaagcaagttgagctggagctacagcagattgaacagaaatccattcgggattatattcaagagagtgagaatatagcatctctacacaaccagatcacagcctgtgatgctgtcctggagcgaatggagcagatgttgggagcttttcagagtgacctcagctccatcagctctgagatccggacactgcaggaacagtcaggagccatgaacattcgacttcgaaatcgccaggcagttcgggggaaacttggggagcttgttgatggtctggtggtgccttctgctctggtcacggcaattctggaggctccagtgacagagcccaggttcttggagcagctacaggagctggatgccaaggcagccgcagtcagagagcaggaagctagaggcacagcagcctgcgcagatgtcagaggcgtgctcgatcggctccgggtcaaggcagtgacgaagatccgagagtttatcctccagaagatttattccttcaggaaacccatgaccaactatcagatcccccagacggccctgctgaagtacaggttcttctatcagtttctgctgggcaatgaacgagcaacagcaaaggagatcagggatgaatatgtggagacgctgagcaagatttacctgtcttactaccgctcttacctggggcggctcatgaaggtgcagtatgaggaagtcgctgagaaagatgatctaatgggtgtggaagatacagcaaagaaaggattcttctcaaagccatcgctccgcagcaggaacaccattttcaccctaggaacccgcggctctgtcatctcccccactgaacttgaggcccccatcctggtgcctcacacagcgcagcgcggagagcagaggtatccatttgaggccctcttccgcagccagcactacgccctcctagacaattcctgccgcgaataccttttcatctgtgaattttttgttgtgtctggcccagctgcacacgacctgttccatgctgtcatgggccgtacactcagcatgaccctgaaacacctggattcttatctagctgactgctacgatgccattgctgtttttctctgtatccacattgttctccggttccgtaacattgcagcaaagagggatgttcctgccctggacaggtactgggaacaggtgcttgccttgctatggccacggtttgaactgatcctggagatgaatgttcagagcgtccgaagcactgacccccagcgcctaggggggttggatactcggccccactatatcacacgccgctatgcagagttctcctccgctcttgtcagtatcaaccagacaattcctaatgaacggaccatgcaattgctgggacagctgcaggtggaggtggagaattttgtcctccgagtggcagctgagttctcctcaaggaaggagcagcttgtgtttctgatcaacaactatgacatgatgctgggtgtgctgatggagcgggctgcagatgacagcaaagaggttgagagcttccagcagctgctcaatgctcggacacaggaattcattgaagagttgctgtctcccccttttgggggtttagtggcatttgtgaaggaggctgaggctttgattgagcgtggacaggctgagcgacttcgaggggaagaagcccgggtaactcagctgatccgtggctttggtagttcctggaaatcatcagtggaatctctgagtcaggatgtaatgcggagtttcaccaacttcagaaatggcaccagtatcattcagggagcgctgacccagctgatccagctctatcatcgcttccaccgggtgctgtcccagccgcagctccgagccctccctgcccgggctgagctcatcaacattcaccaccttatggtggagctcaagaagcataagcccaacttctgatgtgccagaaaccgccctgagatctgccggtcatctccatggacttctgcaccccattccatacccttcttcacctggggtaccccttccagttttccccttgcttcccaggcccttgacatggcttacctgccttcactcccagcaccttgcccaacaggataagctggatccccttggccttctgaatatcccagtgtcttcaggtttcccaagaccacttccctgtgggcttccaaaatggcctttatcatttctccagtctgtcaccctcctttcctgctcccatacacccaaggcttgtttcttcccctgtaaaaaccactgcctcaatctctggttcactcaactagtcaccatgtcctgaggcatgaagcctcctcagctcttg

SEQ ID NO: 212545 - DNA, 2960 bp, Artificial Sequence
  derived and/or modified sequence
agcgaaggttccggggctagtttgtgtttcagacttccatatttccatttgcagttgggtgaagtggttagagctgaaaggggacagctggagtcaaacaacttaactcaaatatctgggaacgatttcgcgctgaggaagaccctttgggacttgtagctccactccggggaacggactcgccgggactgacagttgccggaagtgaggctgcggggaatggccgccgctgcgaccatggcggctgcggcccgggaactggtgttgcgggctgggacctcagatatggaggaggaagagggcccgctggcgggtggtcctgggctccaggaaccactgcaacttggggagttggatatcacttctgatgaattcatcctggatgaagtggatgttcacattcaggcaaatctggaggatgagttagtaaaggaagctcttaaaacgggtgtagatctccgtcactattcaaagcaagttgagctggagctacagcagattgaacagaaatccattcgggattatattcaagagagtgagaatatagcatctctacacaaccagatcacagcctgtgatgctgtcctggagcgaatggagcagatgttgggagcttttcagagtgacctcagctccatcagctctgagatccggacactgcaggaacagtcaggagccatgaacattcgacttcgaaatcgccaggcagttcgggggaaacttggggagcttgttgatggtctggtggtgccttctgctctggtcacggcaattctggaggctccagtgacagagcccaggttcttggagcagctacaggagctggatgccaaggcagccgcagtcagagagcaggaagctagaggcacagcagcctgcgcagatgtcagaggcgtgctcgatcggctccgggtcaaggcagtgacgaagatccgagagtttatcctccagaagatttattccttcaggaaacccatgaccaactatcagatcccccagacggccctgctgaagtacaggttcttctatcagtttctgttgggcaatgaacgagcaacagcaaaggagatcagggatgaatatgtggagacgctgagcaagatttacctgtcttactaccgctcttacctggggcggctcatgaaggtgcagtatgaggaagtcgctgagaaagatgatctaatgggtgtggaagatacagcaaagaaaggattcttctcaaagccatcgctccgcagcaggaacaccattttcaccctaggaacccgcggctctgtcatctcccccactgaacttgaggcccccatcctggtgcctcacacagcgcagcgcggagagcagaggtatccatttgaggccctcttccgcagccagcactacgccctcctagacaattcctgccgcgaataccttttcatctgtgaattttttgttgtgtctggcccagctgcacacgacctgttccatgctgtcatgggccgtacactcagcatgaccctgaaacacctggattcttatctagctgactgctacgatgccattgctgtttttctctgtatccacattgttctccggttccgtaacattgcagcaaagagggatgttcctgccctggacaggtactgggaacaggtgcttgccttgctatggccacggtttgaactgatcctggagatgaatgttcagagcgtccgaagcactgacccccagcgcctaggggggttggatactcggccccactatatcacacgccgctatgcagagttctcctccgctcttgtcagtatcaaccagacaattcctaatgaacggaccatgcaattgctgggacagctgcaggtggaggtggagaattttgtcctccgagtggcagctgagttctcctcaaggaaggagcagcttgtgtttctgatcaacaactatgacatgatgctgggtgtgctgatggagcgggctgcagatgacagcaaagaggttgagagcttccagcagctgctcaatgctcggacacaggaattcattgaagagttgctgtctcccccttttgggggtttagtggcatttgtgaaggaggctgaggctttgattgagcgtggacaggctgagcgacttcgaggggaagaagcccgggtaactcagctgatccgtggctttggtagttcctggaaatcatcagtggaatctctgagtcaggatgtaatgcggagtttcaccaacttcagaaatggcaccagtatcattcagggagcgctgacccagctgatccagctctatcatcgcttccaccgggtgctgtcccagccgcagctccgagccctccctgcccgggctgagctcatcaacattcaccaccttatggtggagctcaagaagcataagcccaacttctgatgtgccagaaaccgccctgagatctgccggtcatctccatggacttctgcaccccattccatacccttcttcacctggggtaccccttccagttttccccttgcttcccaggcccttgacatggcttacctgccttcactcccagcaccttgcccaacaggataagctggatccccttggccttctgaatatcccagtgtcttcaggtttcccaagaccacttccctgtgggcttccaaaatggcctttatcatttctccagtctgtcaccctcctttcctgctcccatacacccaaggcttgtttcttcccctgtaaaaaccactgcctcaatctctggttcactcaactagtcaccatgtcctgaggcatgaagcctcctcagctcttggaattgctggcaaggggtgactgcctctgagtcattgtgtttttcaaagtgatttcttttctgtagctttttgacctaagatctcagcaatttgaacactaacctctcccctcctggctcaagaattactccgaagtcagtctgcagaaaataaatatttagtatgacatgacactta

SEQ ID NO: 212546 - DNA, 2355 bp, Artificial Sequence
  derived and/or modified sequence
cggtgcgcctttctttacagttcgtaaggttcataggcgggtggtcctgggctccaggaaccactgcaacttggggagttggatatcacttctgatgaattcatcctggatgaagtggatgttcacattcaggcaaatctggaggatgagttagtaaaggaagctcttaaaacgggtgtagatctccgtcactattcaaagcaagttgagctggagctacagcagattgaacagaaatccattcgggattatattcaagagagtgagaatatagcatctctacacaaccagatcacagcctgtgatgctgtcctggagcgaatggagcagatgttgggagcttttcagagtgacctcagctccatcagctctgagatccggacactgcaggaacagtcaggagccatgaacattcgacttcgaaatcgccaggcagttcgggggaaacttggggagcttgttgatggtctggtggtgccttctgctctggtcacggcaattctggaggctccagtgacagagcccaggttcttggagcagctacaggagctggatgccaaggcagccgcagtcagagagcaggaagctagaggcacagcagcctgcgcagatgtcagaggcgtgctcgatcggctccgggtcaaggcagtgacgaagatccgagagtttatcctccagaagatttattccttcaggaaacccatgaccaactatcagatcccccagacggccctgctgaagtacaggttcttctatcagtttctgctgggcaatgaacgagcaacagcaaaggagatcagggatgaatatgtggagacgctgagcaagatttacctgtcttactaccgctcttacctggggcggctcatgaaggtgcagtatgaggaagtcgctgagaaagatgatctaatgggtgtggaagatacagcaaagaaaggattcttctcaaagccatcgctccgcagcaggaacaccattttcaccctaggaacccgcggctctgtcatctcccccactgaacttgaggcccccatcctggtgcctcacacagcgcagcgcggagagcagaggtatccatttgaggccctcttccgcagccagcactacgccctcctagacaattcctgccgcgaataccttttcatctgtgaattttttgttgtgtctggcccagctgcacacgacctgttccatgctgtcatgggccgtacactcagcatgaccctgaaacacctggattcttatctagctgactgctacgatgccattgctgtttttctctgtatccacattgttctccggttccgtaacattgcagcaaagagggatgttcctgccctggacaggtactgggaacaggtgcttgccttgctatggccacggtttgaactgatcctggagatgaatgttcagagcgtccgaagcactgacccccagcgcctaggggggttggatactcggccccactatatcacacgccgctatgcagagttctcctccgctcttgtcagtatcaaccagacaattcctaatgaacggaccatgcaattgctgggacagctgcaggtggaggtggagaattttgtcctccgagtggcagctgagttctcctcaaggaaggagcagcttgtgtttctgatcaacaactatgacatgatgctgggtgtgctgatggagcgggctgcagatgacagcaaagaggttgagagcttccagcagctgctcaatgctcggacacaggaattcattgaagagttgctgtctcccccttttgggggtttagtggcatttgtgaaggaggctgaggctttgattgagcgtggacaggctgagcgacttcgaggggaagaagcccgggtaactcagctgatccgtggctttggtagttcctggaaatcatcagtggaatctctgagtcaggatgtaatgcggagtttcaccaacttcagaaatggcaccagtatcattcagggagcgctgacccagctgatccagctctatcatcgcttccaccgggtgctgtcccagccgcagctccgagccctccctgcccgggctgagctcatcaacattcaccaccttatggtggagctcaagaagcataagcccaacttctgatgtgccagaaaccgccctgagatctgccggtcatctccatggacttctgcaccccattccatacccttcttcacctggggtaccccttccagttttccccttgcttcccaggcccttgacatggcttacctgccttcactcccagcaccttgcccaacaggataagctggatccccttggccttctgaatatcccagtgtcttcaggtttcccaagaccacttccctgtgggcttcc

SEQ ID NO: 212547 - DNA, 2960 bp, Artificial Sequence
  derived and/or modified sequence
agcgaaggttccggggctagtttgtgtttcagacttccatatttccatttgcagttgggtgaagtggttagagctgaaaggggacagctggagtcaaacaacttaactcaaatatctgggaacgatttcgcgctgaggaagaccctttgggacttgtagctccactccggggaacggactcgccgggactgacagttgccggaagtgaggctgcggggaatggccgccgctgcgaccatggcggctgcggcccgggaactggtgttgcgggctgggacctcagatatggaggaggaagagggcccgctggcgggtggtcctgggctccaggaaccactgcaacttggggagttggatatcacttctgatgaattcatcctggatgaagtggatgttcacattcaggcaaatctggaggatgagttagtaaaggaagctcttaaaacgggtgtagatctccgtcactattcaaagcaagttgagctggagctacagcagattgaacagaaatccattcgggattatattcaagagagtgagaatatagcatctctacacaaccagatcacagcctgtgatgctgtcctggagcgaatggagcagatgttgggagcttttcagagtgacctcagctccatcagctctgagatccggacactgcaggaacagtcaggagccatgaacattcgacttcgaaatcgccaggcagttcgggggaaacttggggagcttgttgatggtctggtggtgccttctgctctggtcacggcaattctggaggctccagtgacagagcccaggttcttggagcagctacaggagctggatgccaaggcagccgcagtcagagagcaggaagctagaggcacagcagcctgcgcagatgtcagaggcgtgctcgatcggctccgggtcaaggcagtgacgaagatccgagagtttatcctccagaagatttattccttcaggaaacccatgaccaactatcagatcccccagacggccctgctgaagtacaggttcttctatcagtttctgctgggcaatgaacgagcaacagcaaaggagatcagggatgaatatgtggagacgctgagcaagatttacctgtcttactaccgctcttacctggggcggctcatgaaggtgcagtatgaggaagtcgctgagaaagatgatctaatgggtgtggaagatacagcaaagaaaggattcttctcaaagccatcgctccgcagcaggaacaccattttcaccctaggaacccgcggctctgtcatctcccccactgaacttgaggcccccatcctggtgcctcacacagcgcagcgcggagagcagaggtatccatttgaggccctcttccgcagccagcactacgccctcctagacaattcctgccgcgaataccttttcatctgtgaattttttgttgtgtctggcccagctgcacacgacctgttccatgctgtcatgggccgtacactcagcatgaccctgaaacacctggattcttatctagctgactgctacgatgccattgctgtttttctctgtatccacattgttctccggttccgtaacattgcagcaaagagggatgttcctgccctggacaggtactgggaacaggtgcttgccttgctatggccacggtttgaactgatcctggagatgaatgttcagagcgtccgaagcactgacccccagcgcctaggggggttggatactcggccccactatatcacacgccgctatgcagagttctcctccgctcttgtcagtatcaaccagacaattcctaatgaacggaccatgcaattgctgggacagctgcaggtggaggtggagaattttgtcctccgagtggcagctgagttctcctcaaggaaggagcagcttgtgtttctgatcaacaactatgacatgatgctgggtgtgctgatggagcgggctgcagatgacagcaaagaggttgagagcttccagcagctgctcaatgctcggacacaggaattcattgaagagttgctgtctcccccttttgggggtttagtggcatttgtgaaggaggctgaggctttgattgagcgtggacaggctgagcgacttcgaggggaagaagcccgggtaactcagctgatccgtggctttggtagttcctggaaatcatcagtggaatctctgagtcaggatgtaatgcggagtttcaccaacttcagaaatggcaccagtatcattcagggagcgctgacccagctgatccagctctatcatcgcttccaccgggtgctgtcccagccgcagctccgagccctccctgcccgggctgagctcatcaacattcaccaccttatggtggagctcaagaagcataagcccaacttctgatgtgccagaaaccgccctgagatctgccggtcatctccatggacttctgcaccccattccatacccttcttcacctggggtaccccttccagttttccccttgcttcccaggcccttgacatggcttacctgccttcactcccagcaccttgcccaacaggataagctggatccccttggccttctgaatatcccagtgtcttcaggtttcccaagaccacttccctgtgggcttccaaaatggcctttatcatttctccagtctgtcaccctcctttcctgctcccatacacccaaggcttgtttcttcccctgtaaaaaccactgcctcaatctctggttcactcaactagtcaccatgtcctgaggcatgaagcctcctcagctcttggaattgctggcaaggggtgactgcctctgagtcattgtgtttttcaaagtgatttcttttctgtagctttttgacctaagatctcagcaatttgaacactaacctctcccctcctggctcaagaattactccgaagtcagtctgcagaaaataaatatttagtatgacatgacactta

SEQ ID NO: 212548 - DNA, 2687 bp, Artificial Sequence
  derived and/or modified sequence
tttcagacttccatatttccatttgcagttgggtgaagtggttagagctgaaaggggacagctggagtcaaacaacttaactcaaatatctgggaacgatttcgcgctgaggaagaccctttgggacttgtagctccactccggggaacggactcgccgggaactggtgttgcgggctgggacctcagatatggaggaggaagagggcccgctggcgggtggtcctgggctccaggaaccactgcaacttggggagttggatatcacttctgatgaattcatcctggatgaagtggatgttcacattcaggcaaatctggaggatgagttagtaaaggaagctcttaaaacgggtgtagatctccgtcactattcaaagcaagttgagctggagctacagcagattgaacagaaatccattcgggattatattcaagagagtgagaatatagcatctctacacaaccagatcacagcctgtgatgctgtcctggagcgaatggagcagatgttgggagcttttcagagtgacctcagctccatcagctctgagatccggacactgcaggaacagtcaggagccatgaacattcgacttcgaaatcgccaggcagttcgggggaaacttggggagcttgttgatggtctggtggtgccttctgctctggtcacggcaattctggaggctccagtgacagagcccaggttcttggagcagctacaggagctggatgccaaggcagccgcagtcagagagcaggaagctagaggcacagcagcctgcgcagatgtcagaggcgtgctcgatcggctccgggtcaaggcagtgacgaagatccgagagtttatcctccagaagatttattccttcaggaaacccatgaccaactatcagatcccccagacggccctgctgaagtacaggttcttctatcagtttctgttgggcaatgaacgagcaacagcaaaggagatcagggatgaatatgtggagacgctgagcaagatttacctgtcttactaccgctcttacctggggcggctcatgaaggtgcagtatgaggaagtcgctgagaaagatgatctaatgggtgtggaagatacagcaaagaaaggattcttctcaaagccatcgctccgcagcaggaacaccattttcaccctaggaacccgcggctctgtcatctcccccactgaacttgaggcccccatcctggtgcctcacacagcgcagcgcggagagcagaggtatccatttgaggccctcttccgcagccagcactacgccctcctagacaattcctgccgcgaataccttttcatctgtgaattttttgttgtgtctggcccagctgcacacgacctgttccatgctgtcatgggccgtacactcagcatgaccctgaaacacctggattcttatctagctgactgctacgatgccattgctgtttttctctgtatccacattgttctccggttccgtaacattgcagcaaagagggatgttcctgccctggacaggtactgggaacaggtgcttgccttgctatggccacggtttgaactgatcctggagatgaatgttcagagcgtccgaagcactgacccccagcgcctaggggggttggatactcggccccactatatcacacgccgctatgcagagttctcctccgctcttgtcagtatcaaccagacaattcctaatgaacggaccatgcaattgctgggacagctgcaggtggaggtggagaattttgtcctccgagtggcagctgagttctcctcaaggaaggagcagcttgtgtttctgatcaacaactatgacatgatgctgggtgtgctgatggagcgggctgcagatgacagcaaagaggttgagagcttccagcagctgctcaatgctcggacacaggaattcattgaagagttgctgtctcccccttttgggggtttagtggcatttgtgaaggaggctgaggctttgattgagcgtggacaggctgagcgacttcgaggggaagaagcccgggtaactcagctgatccgtggctttggtagttcctggaaatcatcagtggaatctctgagtcaggatgtaatgcggagtttcaccaacttcagaaatggcaccagtatcattcagggagcgctgacccagctgatccagctctatcatcgcttccaccgggtgctgtcccagccgcagctccgagccctccctgcccgggctgagctcatcaacattcaccaccttatggtggagctcaagaagcataagcccaacttctgatgtgccagaaaccgccctgagatctgccggtcatctccatggacttctgcaccccattccatacccttcttcacctggggtaccccttccagttttccccttgcttcccaggcccttgacatggcttacctgccttcactcccagcaccttgcccaacaggataagctggatccccttggccttctgaatatcccagtgtcttcaggtttcccaagaccacttccctgtgggcttccaaaatggcctttatcatttctccagtctgtcaccctcctttcctgctcccatacacccaaggcttgtttcttcccctgtaaaaaccactgcctcaatctctggttcactcaactagtcaccatgtcctgaggcatgaagcctcctcagctcttg

SEQ ID NO: 212549 - DNA, 2355 bp, Artificial Sequence
  derived and/or modified sequence
cggtgcgcctttctttacagttcgtaaggttcataggcgggtggtcctgggctccaggaaccactgcaacttggggagttggatatcacttctgatgaattcatcctggatgaagtggatgttcacattcaggcaaatctggaggatgagttagtaaaggaagctcttaaaacgggtgtagatctccgtcactattcaaagcaagttgagctggagctacagcagattgaacagaaatccattcgggattatattcaagagagtgagaatatagcatctctacacaaccagatcacagcctgtgatgctgtcctggagcgaatggagcagatgttgggagcttttcagagtgacctcagctccatcagctctgagatccggacactgcaggaacagtcaggagccatgaacattcgacttcgaaatcgccaggcagttcgggggaaacttggggagcttgttgatggtctggtggtgccttctgctctggtcacggcaattctggaggctccagtgacagagcccaggttcttggagcagctacaggagctggatgccaaggcagccgcagtcagagagcaggaagctagaggcacagcagcctgcgcagatgtcagaggcgtgctcgatcggctccgggtcaaggcagtgacgaagatccgagagtttatcctccagaagatttattccttcaggaaacccatgaccaactatcagatcccccagacggccctgctgaagtacaggttcttctatcagtttctgttgggcaatgaacgagcaacagcaaaggagatcagggatgaatatgtggagacgctgagcaagatttacctgtcttactaccgctcttacctggggcggctcatgaaggtgcagtatgaggaagtcgctgagaaagatgatctaatgggtgtggaagatacagcaaagaaaggattcttctcaaagccatcgctccgcagcaggaacaccattttcaccctaggaacccgcggctctgtcatctcccccactgaacttgaggcccccatcctggtgcctcacacagcgcagcgcggagagcagaggtatccatttgaggccctcttccgcagccagcactacgccctcctagacaattcctgccgcgaataccttttcatctgtgaattttttgttgtgtctggcccagctgcacacgacctgttccatgctgtcatgggccgtacactcagcatgaccctgaaacacctggattcttatctagctgactgctacgatgccattgctgtttttctctgtatccacattgttctccggttccgtaacattgcagcaaagagggatgttcctgccctggacaggtactgggaacaggtgcttgccttgctatggccacggtttgaactgatcctggagatgaatgttcagagcgtccgaagcactgacccccagcgcctaggggggttggatactcggccccactatatcacacgccgctatgcagagttctcctccgctcttgtcagtatcaaccagacaattcctaatgaacggaccatgcaattgctgggacagctgcaggtggaggtggagaattttgtcctccgagtggcagctgagttctcctcaaggaaggagcagcttgtgtttctgatcaacaactatgacatgatgctgggtgtgctgatggagcgggctgcagatgacagcaaagaggttgagagcttccagcagctgctcaatgctcggacacaggaattcattgaagagttgctgtctcccccttttgggggtttagtggcatttgtgaaggaggctgaggctttgattgagcgtggacaggctgagcgacttcgaggggaagaagcccgggtaactcagctgatccgtggctttggtagttcctggaaatcatcagtggaatctctgagtcaggatgtaatgcggagtttcaccaacttcagaaatggcaccagtatcattcagggagcgctgacccagctgatccagctctatcatcgcttccaccgggtgctgtcccagccgcagctccgagccctccctgcccgggctgagctcatcaacattcaccaccttatggtggagctcaagaagcataagcccaacttctgatgtgccagaaaccgccctgagatctgccggtcatctccatggacttctgcaccccattccatacccttcttcacctggggtaccccttccagttttccccttgcttcccaggcccttgacatggcttacctgccttcactcccagcaccttgcccaacaggataagctggatccccttggccttctgaatatcccagtgtcttcaggtttcccaagaccacttccctgtgggcttcc

SEQ ID NO: 212550 - DNA, 1797 bp, Artificial Sequence
  derived and/or modified sequence
atggagcaaatgctcggagcgtttcagtctgatctgtcaagcattagcagcgagatccgtaccctgcaggaacaatccggagctatgaatattcgtctcaggaacaggcaggctgtgcggggcaaactgggcgagttggtagatggtctggtggtcccttccgcgctggttacagctattcttgaagcccctgtaactgaaccacggttcctcgagcaactccaggaactggacgctaaggctgccgccgttagggagcaagaggctagagggactgccgcttgtgctgatgttagaggcgtcctggaccgactccgcgtcaaagctgttacgaaaatccgggagttcattctgcaaaaaatctactccttccgtaagccaatgacgaactaccagatcccccagaccgccttgctgaagtatcgctttttctaccagttcctgctgggtaatgaaagagctactgcaaaagaaatccgggatgagtacgtggaaacgctctcaaagatttatctgtcttactaccgaagttacctgggtagactaatgaaggtgcagtacgaagaagtggctgagaaagacgacctgatgggcgtcgaggataccgctaagaaaggttttttcagcaaaccctccctgaggagcagaaacactatctttaccctgggtacacgggggagcgtcatctcccccacagaattggaggcccctatcctcgttccacatacagcccagcgtggtgaacaaaggtaccccttcgaagctctttttagatcacagcactatgcgctgctggacaacagttgtagggagtacttgttcatttgcgaattttttgtggtgagtggacccgcagcgcacgacctctttcacgcagtaatggggaggactttaagtatgacgttgaaacacctggacagctacctcgccgattgttatgatgccatcgcggtctttctgtgtattcacattgtcctgaggttcaggaacatcgctgccaagcgagacgtgccagccctcgatcgatattgggaacaggtcctggccctgctatggccaagatttgagctgatattggaaatgaacgtccagagcgtccgctcaaccgaccctcagaggctggggggtcttgataccaggccccactacattactcgaaggtacgcagagttctcaagcgccttggtttcgatcaaccaaacaatccctaacgaaaggaccatgcagctcctcggccagcttcaggtcgaggtcgaaaatttcgtgctgcgggtggcagccgaatttagttcccggaaagaacagttggtgttcttgataaacaattacgatatgatgctgggggttctgatggaaagagccgccgatgacagcaaggaggtagagtcattccaacagttacttaatgcacggacccaagagtttatcgaggagctactgtcaccccccttcggcgggcttgtagcgttcgtcaaggaggcagaagccttgatagagagaggccaagccgaacggctgcggggcgaggaggcccgcgtgacacagctgattcgaggctttggaagcagctggaagagcagcgtcgaaagtctctctcaggatgttatgcgatctttcacaaacttccggaatggaacatctattatccagggggcccttacccagctaattcagctctaccaccgatttcatagggtcctcagtcagccacagctccgcgccctgcccgcacgggccgagctgataaatatccaccatttgatggtggagctcaagaaacataaaccgaatttttag

SEQ ID NO: 212551 - DNA, 1797 bp, Artificial Sequence
  derived and/or modified sequence
atggaacagatgttaggcgctttccaaagcgaccttagctcgatcagcagcgaaatccgcacattacaggaacagtccggggccatgaacattcgcctacgcaacagacaggccgtgaggggcaagttgggtgagctggttgacgggctggtggtgccctctgcactcgtgaccgccatcctcgaggctccggtgactgagcctcgcttcctcgagcagttgcaggagttagacgcaaaggcagctgccgtcagagaacaggaggctaggggaacagcggcatgcgcagacgtccgcggcgtattggaccggttgagggttaaagcagtgacaaagatcagagagtttattttacaaaagatttattcatttagaaagccaatgacgaattatcaaatcccacaaacagccctcttgaagtaccgctttttctaccagtttctgctcggtaatgaacgcgccaccgccaaggaaataagggacgagtacgtcgagaccctgtcgaaaatctacctgtcctactacaggtcttacctagggcgcctaatgaaggtgcaatatgaagaagttgccgagaaggatgatctgatgggcgtggaagacacagcgaaaaaggggttctttagcaagccctctctcaggtcacgaaataccatttttacccttggcactcggggctccgtgattagccccacagagctggaagcccccatcttggtcccccacacggcccagcggggcgagcaacggtacccctttgaggccttgtttagatcacagcactacgcccttctggataattcatgccgggagtatcttttcatttgcgagttttttgtggtgtctgggccagccgcccatgatcttttccacgccgtgatgggccggacactgtctatgaccctcaaacacttggactcttatctggccgattgctatgatgctattgcggtgtttctgtgtatccacatcgtgctgcgctttaggaacattgccgccaagcgtgacgttcctgccctggataggtattgggagcaagtccttgctctgctgtggccacggttcgagctcatcttagagatgaatgtgcagtccgtgcgttccacagacccacagagacttgggggcctggatacacgtccacattatatcactaggaggtacgcagaattttcaagcgcattggtgtccatcaaccagacaattcccaacgaaaggactatgcagttacttggccagctgcaagtggaggttgaaaatttcgtcctgagggtagccgccgagttcagctccagaaaagaacagctagtgttcctgatcaacaactacgacatgatgctcggagtgcttatggagcgggctgcggatgactccaaggaggtcgagtccttccaacagctcctcaatgccaggacccaagagtttatagaggagctgctatctcccccttttggtggccttgtggcctttgtgaaagaggccgaggcccttattgaacgcgggcaggccgaacggctgcgcggggaagaggccagagttacgcagttgatccgcggcttcggatcttcgtggaaatctagcgtcgaaagcctttcacaggacgtgatgcgctcgttcacgaactttaggaacgggacctctataattcagggggctttgacccagttaattcagctatatcatagattccatcgggtcttaagccagccccagttaagagccttgcccgcccgcgcagaactgattaatatccaccatttgatggtggagctcaaaaagcataagcccaatttctag

SEQ ID NO: 212552 - DNA, 2106 bp, Artificial Sequence
  derived and/or modified sequence
atggaagaagaggaggggcctttggccggcggccctgggctgcaggaaccccttcagcttggagagctggacattacttccgatgagttcatcctggacgaagtggacgtacatattcaagctaatttggaggatgagctggtgaaagaggccctgaaaactggggtggatttaagacattactcaaaacaagtcgagctcgaattgcaacagatcgaacaaaagagtatcagggactacatccaggagtccgagaatattgcttctctgcacaaccagattaccgcatgcgacgctgtccttgaaagaatggagcagatgttgggtgcttttcagtccgacctgagttccatcagcagcgagataaggaccctccaggagcagagcggggcaatgaacattcgtctaagaaaccgccaggcagtcaggggcaagctcggggagttggtcgacggcttggtcgttccatctgcactggtcaccgcaatccttgaagcccccgtcacggagcctaggtttctcgaacaactacaggaactggatgctaaggcagcagccgtcagagaacaagaggctaggggaaccgccgcgtgcgctgatgtgcggggcgttctcgacagactgagagtgaaggctgtcactaagattcgagagttcattctccaaaagatatactcattccgcaagcccatgactaactaccagatcccacagaccgcgcttttgaagtacaggttcttttaccaatttctgctgggtaacgagcgagcaacggccaaagaaatccgcgacgagtacgtagagaccctttccaagatctacctaagctactatagatcttacctcggccggctgatgaaggtccaatacgaggaggtggccgagaaggatgacctgatgggtgttgaggacacggcaaagaaagggttcttctcgaaaccgagtctgcgttcacggaacaccatctttacactcggcacccgcggcagtgttataagtcccaccgaacttgaggctcccattctggtgcctcacacggcacagcgtggtgagcaacgttatcccttcgaggctttatttcgctcccagcattacgctctgctagataattcttgcagagagtacttgtttatctgtgaattcttcgtggtgagcggaccagctgcacacgatctctttcatgcagtcatgggacgcactctctcgatgaccctgaaacatctggattcctatctggcggattgctatgatgctattgcagtgttcctctgtatacacatcgtgttacgctttcgcaacattgctgctaaaagagatgtcccggccttggatcgatattgggagcaggttctggccctgttgtggccgagatttgagctgattctagagatgaacgttcaatcagtgcgtagcacagacccccaaaggctcggaggcctggacactagacctcactatatcacccggaggtatgcggaattcagtagcgcgctggtttcaattaaccagactatccctaatgaaagaacgatgcagctgctgggacaactgcaagtggaggtggaaaatttcgtgctgcgagtagcagcagaattctcgagcagaaaagaacagctggtgttcctgatcaacaactacgatatgatgctcggagtgctcatggagagagctgcagatgatagcaaagaggttgaaagcttccagcaattgttaaatgctaggacccaagaatttatcgaagaacttctgagcccacctttcggaggactcgtggcattcgttaaagaggccgaggcgcttattgaacgcgggcaagctgagcggttgcgcggcgaggaggcgcgggtgacacagttaattcgcggattcggctcctcctggaaaagtagcgtggaatctctgtctcaggacgtgatgcgctcttttacaaacttcagaaatggaacgtctataatacagggagccctgacccagctgatccagctgtaccacaggtttcatcgcgtcctcagccagccacagctgcgggctttgccagctcgcgccgaactgataaatatccaccaccttatggtcgagctgaaaaagcataaaccaaatttctag

SEQ ID NO: 212553 - DNA, 2106 bp, Artificial Sequence
  derived and/or modified sequence
atggaggaggaggagggacccctggccggaggcccagggctacaagaaccccttcaattgggggagctggacatcacttcagatgaatttatccttgacgaagtggatgtgcatattcaggccaatctagaagacgaactcgtcaaggaagccttaaagacgggtgtggacctgcgccattactcaaagcaggtagagcttgagctacaacagattgagcagaaatctattagggactacatccaggagtctgaaaacattgcgtctctacacaatcagatcactgcttgtgatgccgtcttggagcggatggaacagatgctgggcgccttccaatccgatctgtcctctatatcatcagaaataagaaccctgcaggaacagtctggggctatgaatatacgactgaggaatcgacaggccgtgcgggggaagctgggtgagctcgttgacggactggtcgtgcctagcgctttggtaacagctatcttggaagcgcccgtcaccgagcctcggttcctggagcagctgcaggagctcgatgcgaaagctgcagccgtgagagaacaggaggcacggggcacagccgcctgtgctgacgtgagaggtgtcttggaccggttgcgggtcaaagctgtgacaaagattcgggaatttatcctccagaagatctatagttttcgaaagcccatgacaaactaccagatcccacagaccgctctgctcaagtatcgtttcttttatcagtttctacttggaaacgagcgtgccactgcgaaagagatccgggacgagtacgtcgaaacactcagtaagatctacctgagctattatagatcatacctcggacgcttgatgaaggtgcagtatgaggaagtagctgagaaggatgacctcatgggtgtcgaagatactgcaaagaaaggcttttttagtaaaccctctttgcgatctaggaacacaatcttcacccttggcactcgcgggtcagtgatcagcccaactgaacttgaagctcccatcttggttccgcacacagcgcaacgcggagaacaacggtacccctttgaggccctgtttaggtcccagcattacgctttgctcgataacagctgccgagagtacctgttcatttgcgaattttttgtggtctcaggccctgccgcccacgacctgttccacgccgtgatgggtcgaacattgtctatgactctcaaacatttagactcatatttggcggattgttatgatgctatagcggtattcctgtgcatccacattgtgctcaggtttcggaacatagccgccaagcgcgacgttccagccttggaccggtactgggagcaagtacttgcattgctttggccgagattcgagctcatcctcgagatgaacgtgcagtcagttcggtccactgacccacagagattggggggtctggataccagaccacattatatcacacgtaggtatgccgagttctcaagcgcccttgtgagtatcaaccagaccattcccaatgaaaggacgatgcagttactcgggcagctgcaggtggaggtagagaacttcgttctaagagtggcggctgagttttcatctcggaaagagcagctggtgttcctcatcaacaactatgatatgatgctgggagtgctgatggaaagagcggccgatgactccaaggaggtggaatcatttcaacagcttctgaatgctcgcacccaggagtttatcgaggaactgctgagccctccgtttggtggcctagtggcctttgtgaaggaggccgaggcactcattgagaggggacaggcagaacgactgcggggggaggaagctcgcgttacacagttaatcaggggcttcggttcgagctggaagagttcggttgagtctcttagtcaggacgtgatgagatctttcacaaatttccgcaacggtaccagtatcatccaaggcgcactcacacagctgatacagctttaccaccggtttcaccgggtcctgagtcagccacagcttagggctcttccggctcgggcagaactgattaacatccatcacttaatggtggaactgaaaaaacacaaaccgaacttttag

SEQ ID NO: 212554 - DNA, 1797 bp, Artificial Sequence
  derived and/or modified sequence
atggagcagatgttgggcgcctttcagtccgacctcagttccatttcttcggaaattcgtacccttcaggagcagagtggtgcgatgaatatcaggctgcgcaacagacaggctgtccggggcaaacttggagaactcgtcgacgggctcgtggttcccagcgccttggtgactgccatactggaggcccctgtgaccgaaccacggttcctggagcagcttcaggagctggacgctaaggcagctgccgtcagagagcaggaggcacgaggtacagccgcttgtgctgacgtccggggagtactagataggttacgggtgaaggccgttaccaagataagggaattcatcctgcagaaaatctattcctttaggaagccaatgacaaactatcaaatcccacagacggccctcttaaaatatagattcttctaccagttcttgctgggcaacgagcgggcaaccgccaaagagatccgagacgaatacgtggagactttgagcaaaatttacctgtcgtattaccgttcctatctgggtcgtctgatgaaggtgcagtacgaagaagtcgccgagaaggacgacctgatgggggtagaggataccgcgaaaaaagggttcttctctaagccctcactgaggagccgaaataccatattcacactgggcactaggggatcagtcattagtccaaccgaactggaggcccccatactcgttccccataccgcccaaaggggagaacagagataccctttcgaggcattgtttagatcccaacactacgccctactggataactcatgccgcgaatacctattcatatgtgaatttttcgttgtctctggacctgccgcgcacgatctttttcacgctgtgatgggccggactttgtcaatgactctcaaacatctggatagttatctggcagactgttacgacgctatagcagtttttttgtgtattcacatcgtcctgaggtttcggaatattgctgccaaacgcgacgtcccagcgttggaccggtactgggagcaagtgctcgcactgttgtggcccagatttgaactgatcctggaaatgaacgtgcagagcgtaaggagtacagacccccagcgcctgggtgggctggacactagacctcactacattactcgccgttatgccgaattctcaagcgcattggtatccataaatcaaacaatcccaaatgaacgcaccatgcaacttctgggccaattgcaggtggaggttgagaatttcgttctgcgggtagccgcggagttcagtagccggaaggaacaattggtctttctgatcaacaattatgacatgatgctgggcgtgctgatggaacgggccgctgacgacagcaaagaagttgaaagtttccaacagctactgaacgctcgcacccaggaatttattgaggagttgctgtccccccctttcggaggccttgtggcgttcgtgaaggaagccgaggccctgattgaacgcgggcaggcagaaagactacggggggaggaagcacgcgtgacacaacttattcgcggcttcggatcttcatggaaatccagtgtcgaaagcttgagtcaggacgtgatgaggtcctttaccaatttccgaaacggaaccagtatcatacagggagcgttgactcaactgatccaactgtaccatcggtttcaccgcgtgcttagccaaccacaactccgggctctaccagcaagagccgagttgatcaatatacatcacctgatggttgagctcaaaaaacacaaacctaacttctag

SEQ ID NO: 212555 - DNA, 2106 bp, Artificial Sequence
  derived and/or modified sequence
atggaggaggaagagggacccctcgcaggcggtcccggtctgcaggaacctcttcagctcggcgaactcgacattacaagtgacgagtttatcctggatgaagttgatgtgcacattcaggcgaatctggaggacgaactggtgaaagaggcactcaaaaccggcgtggacctacggcactactcaaaacaggtagagcttgagctacaacagattgagcagaagagtatcagagactatattcaagagagcgagaatattgcctccctgcacaaccagatcaccgcttgtgatgctgtactggagagaatggagcagatgctgggcgctttccagtctgatctgtcctccatatccagcgagatacgtacccttcaagaacagtctggagcaatgaatattaggttacgtaacaggcaggccgtgcgtgggaagttgggagaattggtagatggattagtcgtccccagcgctctagtgactgctatcctagaggctcccgtgacagaaccaagattcctggaacagttgcaggagctggatgccaaagcggctgccgttcgcgaacaggaagcgcggggcacagcggcatgtgccgacgtgcgtggcgtgcttgatcggctccgagtgaaagccgttacaaaaattagagagtttattcttcaaaaaatttactccttccgcaagcctatgacgaactatcagattcctcagactgcactgctgaagtacaggtttttctaccagttcctactgggaaacgagcgtgcaaccgctaaggagatcagagatgagtacgtggagacactttcgaagatctacctcagctactaccgctcatacctggggcgactaatgaaagtgcagtatgaagaggtggccgaaaaagatgacctcatgggcgttgaggataccgcaaagaaggggtttttttctaaaccttcattgagatctcgtaataccatctttacactgggaacacgcggctccgtgatcagccctaccgaacttgaagcgcctatcttagtgccccacactgcgcagaggggagaacagcgctaccctttcgaggctttatttcgatcccagcattacgcactcctcgacaactcttgccgggaatacttatttatctgcgagttcttcgttgtgtctggacctgccgctcatgacctgttccatgctgtcatgggccggacactttcaatgactctgaaacatctggatagctacctcgcagactgttacgacgccatcgctgtctttctttgtatccatatagtactccgctttcgaaatatcgccgctaagagagatgttccagccctcgataggtactgggaacaggtactggccctcctgtggcccagattcgaactgatattagagatgaatgtgcaatccgttagatccactgacccacagcgactgggaggcctggatacacgaccccattacatcacacgacgctacgccgaattcagctctgccctggtcagcataaaccagaccatccccaacgagcggaccatgcagcttctgggccaattacaggtggaagtggaaaacttcgtcctgcgcgttgctgccgaattctcctcgcgcaaggaacagcttgtctttttgataaacaattacgatatgatgttgggggtgctgatggagcgagcagccgatgattcaaaagaggtggaatcctttcagcaactgctgaatgcacgaacccaggagtttattgaagaactgctcagcccacccttcggcggcctggtggctttcgtgaaggaagcagaggcactcattgagcgggggcaggcggagagactccggggagaggaggcacgcgttacccagcttatcaggggattcggtagctcttggaagtccagcgtggaaagcctgtctcaagatgtaatgcggtcctttacaaattttagaaacggaaccagcatcatacaaggcgcattaactcaactgatacagctgtatcatcggttccatagagtcctaagtcagccccagctacgagcccttcccgccagggcagaactgatcaacattcaccatctaatggtcgaactgaagaagcacaaacctaacttttag

SEQ ID NO: 212556 - DNA, 1797 bp, Artificial Sequence
  derived and/or modified sequence
atggagcagatgctgggcgccttccagagcgacctgagcagcatctctagtgagatccggacactgcaggaacagtctggggcgatgaatataaggctgcgcaaccgacaagcagtgcgaggtaagctgggagaactcgttgatgggctagtggtcccctctgcccttgttaccgccatcctggaggcaccggtgactgaaccccggtttctggaacagctgcaggaattggacgcaaaggcggccgcagtgagagagcaggaagcccggggtaccgccgcctgcgctgacgtgcggggcgtgctggaccgtctcagggttaaggctgtcacaaagatcagggagttcatcctccagaagatctactcttttcgaaaaccaatgacaaattaccagatccctcagaccgcgttactgaagtaccgattcttttaccaattccttttaggaaatgagcgtgcgaccgcaaaagaaatccgggacgaatacgtcgagactttgtccaaaatttacctaagttactatagatcctacctggggaggctgatgaaagtgcaatatgaggaggtagctgaaaaggacgaccttatgggtgttgaggatacagccaaaaaagggttctttagtaaaccctcgctgagatcgaggaacaccatcttcactctgggcaccagaggctccgtgatctccccaaccgaactggaagcccccattttggttccgcacactgcgcaacgaggggagcagcgttaccctttcgaggctttattccgtagccagcactacgcacttcttgacaattcctgccgcgaatatctctttatttgtgagttcttcgtcgttagcggaccagccgctcacgatctatttcatgccgtgatgggacggacattgtctatgacgctaaagcatctggattcctacctggccgactgctacgacgctattgcagtcttcttatgtattcatatcgtactaaggttccggaacattgcggcaaagcgagacgtgccagccctcgatcgctactgggaacaggtgttggcactattgtggcctagatttgagttgatcctggagatgaatgtgcagagtgtccggagtacagatccccagcgattgggtgggctggacacgagaccacattatatcacacggcggtatgcagaattctcctccgccctggtgagcatcaaccaaacaattcctaacgagcgcacgatgcagctgcttggccagctgcaggtggaagtcgaaaatttcgttctgcgcgtcgctgcagaatttagcagccgcaaggagcaactggttttcttaataaacaactacgatatgatgctgggggttttgatggaacgcgcagccgatgatagtaaagaggtcgaatcttttcagcagttacttaacgcgcgaacacaagagttcatcgaagaactgctctcaccaccctttgggggcctggtggcttttgtgaaagaggctgaggccctgatcgagaggggccaggctgaaagactgaggggtgaagaggccagggttacccaactcattcgcggttttggctccagttggaaatccagcgtggaatcattatctcaggatgtgatgcggtctttcacgaatttcaggaacggaaccagcattattcagggagccctgactcagctgatccagttgtaccatagattccatagagtcctgagccagcctcagttgagagcactgcccgctcgggccgagttaattaatattcatcatctcatggtagagctgaaaaaacataagcccaatttctag

SEQ ID NO: 212557 - DNA, 1797 bp, Artificial Sequence
  derived and/or modified sequence
atggagcagatgctgggcgccttccagagcgacctgagcagcatctcctctgaaatcagaactctgcaggaacagagcggggctatgaacattcggctgaggaatcgtcaggctgtgcgggggaagctgggcgagctggtggacggccttgtggtgccatctgctctcgttacggctatcctggaagcccccgtaaccgaaccccgcttcctcgaacagcttcaggaactggatgccaaggccgcagcagtgcgggagcaggaggcaagaggcacagcagcctgcgctgacgttcgcggtgtccttgacagactacgggtgaaggcagttactaagattcgagaatttatacttcagaagatctactcatttcggaagcccatgactaattatcagatccctcaaacggcactactgaagtacaggtttttttatcagttcctcctcggcaacgagagagctaccgcaaaagagattcgggatgagtacgtggagacactgagcaaaatttacctgagttattacaggagttatctcgggcgtttgatgaaagtgcagtatgaggaggtcgccgagaaggatgatctaatgggcgtcgaagataccgctaagaaagggttcttctcaaagccatctctgcgctccaggaataccatttttaccctcggcacacgaggctcagttattagccctactgagctcgaagcacccattctggtcccacatacggcccagaggggcgaacagcgctatccctttgaggccttgtttagatctcagcattacgcactgctggacaactcttgccgggaatacctattcatttgtgagttcttcgtcgtgagcggccctgctgcccatgacttattccacgcagttatggggagaacactgtcaatgaccctgaaacacctcgactcgtatttagccgattgctatgacgctattgccgtttttctctgcatccatatagtgttacgcttccgcaatattgccgccaagagagatgtgccggcccttgaccgttactgggaacaagttttggccttactgtggccccggttcgaactgatccttgagatgaatgtacagtccgttcggagcaccgacccgcagagactggggggtctggacacacgtcctcattacattacaaggcggtatgctgaattctcttccgccctggtcagcataaatcaaactatacccaatgagcggaccatgcagctgctgggccaattgcaggttgaagtggaaaattttgtactgcgggtggctgcggaattctccagccgtaaagagcagttagtgtttctgatcaataattacgacatgatgttgggcgtcctgatggagcgagcggccgatgacagcaaagaagtcgagtcattccagcagcttttgaacgctagaactcaggaattcattgaagaattattaagtccaccattcggcggtctggtggcattcgtaaaagaagcagaggccctaatcgagagaggacaagcagaacgtctgcggggagaggaagctcgggtgacacagttgatcagaggatttggctcctcatggaagtcaagcgtggagtcactttcacaggacgtaatgcgtagttttaccaattttaggaatggcacaagcatcattcaaggggctctaacccagttaatccaactgtaccacaggtttcaccgagtgctctctcagccccagctgcgagcactaccagcaagggctgagctcataaacattcaccatctgatggtcgagctcaagaaacacaagcccaacttctag

SEQ ID NO: 212558 - DNA, 2106 bp, Artificial Sequence
  derived and/or modified sequence
atggaggaggaggagggccccctggccggcggccccggcctgcaggaacctctgcagcttggcgagcttgacatcacaagtgatgaattcatcttggatgaagtcgatgtgcacatccaggcaaacctggaggacgagctagtcaaagaagcgttaaaaactggcgtcgatcttaggcactatagtaaacaagttgaacttgagctgcagcagatcgagcagaagtcaatccgggattatattcaggagagcgagaacatcgcctccttgcacaaccagattaccgcatgcgacgctgtcttagaaaggatggagcagatgcttggcgcttttcagagtgatcttagctctatctcaagtgagatccgaacactgcaggaacagtcgggcgcaatgaatattaggctaagaaaccgtcaggccgtgagagggaaactcggagagctggtagatggccttgtggtccccagtgcgctggtcaccgctattcttgaagcacccgtgaccgaacccaggtttttagagcagttgcaggaactcgacgccaaggcagcagcggtgcgcgaacaggaagcccgtgggacagcagcctgtgctgatgtacgcggagttcttgacaggctgagagtgaaagctgtgacgaagataagagaattcattctgcagaaaatttacagttttcgcaaacccatgacaaattatcagatcccacagaccgctcttctcaaatatcgatttttttatcagtttctcttaggcaatgagcgagcgactgctaaagagattcgggacgaatatgtcgaaacgctctctaagatttatttgtcttactacagatcataccttggccggctcatgaaagtgcagtacgaagaggttgccgagaaggacgatcttatgggcgttgaagacaccgcaaaaaaaggcttcttctccaagccaagccttcgctctaggaacaccatatttacacttggcacccggggcagcgtcatctcacccactgaactggaggcccctatcctggtgcctcataccgcacagcgcggcgagcaaagatatccattcgaagctctgtttagatctcagcattacgccctcctggataactcctgtagggagtacctgtttatttgtgaattctttgtcgtctctggccccgcagcacatgatctctttcatgccgttatgggacggactcttagtatgactctgaagcatctcgattcctacctggcggactgttatgatgccatagctgtattcttgtgtatccacatcgtcctgcgttttaggaatatcgctgcaaagcgggatgtgcccgctctggatcggtactgggaacaggtcctggcattactttggccccggttcgagctaatccttgaaatgaacgtccagtccgtcaggtccaccgatccacagaggctgggtgggcttgatacccgtcctcactacatcacccggcgttacgctgagtttagcagtgcccttgtgtctataaatcagacgatacctaacgaacgcaccatgcaactgctggggcaactacaggtcgaagtggagaactttgtgctgcgggtggccgctgagtttagcagtcgaaaggaacagctggtgttccttatcaacaactatgacatgatgctgggcgttcttatggaacgcgcggccgatgatagcaaagaagtcgagtcatttcagcagttgctcaacgctagaacccaggagttcattgaggagctcctttctcctccttttggaggactcgtggccttcgtgaaggaggcagaagccttaatagagcggggacaggctgagcgcctcaggggggaggaggccagagttactcagctgatccgggggtttggtagttcctggaagtcgtctgtggagtcgctgagtcaggacgtcatgcggagtttcactaactttagaaacggcacgtcaattatacagggtgcactaacacagcttatacaactgtaccacagattccatagagtgctatcccagccacagcttagagcgttacccgcaagagccgaactcattaatattcatcacttgatggtcgaacttaagaaacacaaaccgaacttttag

SEQ ID NO: 212559 - DNA, 2106 bp, Artificial Sequence
  derived and/or modified sequence
atggaggaggaggagggccccctggccggcggccccggcctgcaggagccacttcaattgggagagctggatataacctccgacgaattcatcctggacgaagttgacgtgcacatccaagcgaatctggaagatgaactagtgaaagaggccctcaagacaggtgtcgacctgaggcactatagcaagcaggttgagctcgagctgcagcagattgagcaaaagagcatccgggactacattcaagagagcgagaatatcgccagcctccataatcagattaccgcctgcgatgctgtgttagaaagaatggaacagatgctgggggccttccagtctgaccttagctcaatcagctctgaaattcgaactctccaggagcaaagtggcgccatgaatatcaggctgcgaaatcgccaggctgtgcgggggaagttaggggagttggtcgatggactagtcgtgcctagtgctcttgtgacggccattttggaggcgccagtcaccgaacctcgattcctggaacagctccaggaactagatgcaaaagcagctgctgtccgggaacaggaggctcgcggcacagcagcctgtgctgatgtacgtggcgtgctggaccgactgagagtcaaggccgtgaccaaaattcgagaattcattctgcagaagatctacagtttccgtaaacccatgaccaactatcagataccccagacagctctcttgaagtataggtttttttaccagtttctgctggggaatgaacgagccacagcaaaggagatccgcgatgagtatgtggagaccttgtctaagatctatctgtcttactacagatcatacctaggaagactcatgaaggtgcagtatgaggaggtcgctgaaaaagatgacctgatgggagtcgaagacaccgctaagaaagggttcttcagcaaaccctccctcaggtcacgcaacacaatttttaccctgggcaccaggggctcagtgatctctccaacagagctggaggcgccgattctcgtcccgcacaccgcccaaagaggggaacagaggtacccatttgaggctctctttagatctcaacactacgcactcctcgataattcatgcagggagtatctttttatatgtgagttcttcgtagtctctggcccggctgctcacgacctgttccacgccgtgatgggccgcactcttagcatgacccttaaacacttggacagctaccttgcagattgttacgacgcgattgcagtctttctgtgtatacacatcgtgctaagatttagaaacattgctgccaagagggatgtccctgccttggatagatactgggagcaagtactggctttgctgtggcctaggttcgaactgatactcgaaatgaatgtgcaatcagtccgctctactgatccacaaaggctgggtggcctggacaccaggccacactacatcacacgcaggtatgccgagttctccagtgccctggtgagtatcaatcagactatcccaaacgagagaactatgcagcttctgggccagctccaggtggaagtggagaacttcgtgctgcgggtggctgcagagtttagctcacggaaagaacagctggtcttcttaataaataattatgacatgatgctgggggttctgatggagagggctgcagatgacagcaaggaggtggaatctttccagcagctgttgaatgcgcgtacccaggagtttatagaggaacttctgtcccccccatttgggggcctggtggcttttgtcaaagaagccgaagcgctgatagaacgaggacaggccgaacgtcttcgcggggaggaagcccgggtgacccaactcattcgtggcttcggatcaagctggaagagctccgtggaaagcttgagtcaagacgtgatgcgttctttcaccaattttcgaaacggcacatctataattcagggggccttgactcaattgatccagctgtaccacagatttcaccgggtgttatcacagccacaactcagagccctgcctgcccgtgcggaactcatcaacatacaccatttgatggttgaactgaagaaacacaaacccaatttctag

SEQ ID NO: 212560 - DNA, 1797 bp, Artificial Sequence
  derived and/or modified sequence
atggagcagatgctgggcgccttccagagcgacctgagcagcatcagtagtgaaatccggaccctacaggaacaatctggggctatgaacattagactgcggaatcggcaggccgttagaggcaaattaggcgagctcgtcgacgggcttgtggtgcccagtgcgttggtgacggccatcctcgaagccccggtgacagaacctaggtttctcgaacaactacaggaactggatgccaaagctgccgccgtccgcgagcaggaggcgcgcggtaccgccgcgtgcgccgatgtgcgtggcgtgctagaccgcctgagggtcaaggctgtgactaaaatccgagagttcattcttcaaaaaatatactctttccgaaagccaatgacaaactaccaaataccacagacagccttgcttaaataccgattcttttatcagttcttgctcggcaatgaaagggcaaccgcaaaagaaatcagagatgagtacgtagagacccttagtaaaatatatctatcgtactacaggtcctacctgggtagactgatgaaagtgcaatatgaagaggttgcagagaaggatgatcttatgggcgtggaagacacggcaaagaaaggctttttctccaagccttctctgaggagccgtaacaccatcttcactctgggcacgcgtggctcagtgatctccccaacagaacttgaagcgccgatactggtcccccatactgcacaaagaggggaacagcggtacccattcgaggccctgtttaggagccagcactacgccctcttagacaatagctgcagagagtacctgtttatctgcgagttcttcgtggtatctggacctgctgctcacgatctgttccacgcagtaatgggtaggaccctgtcaatgaccttgaagcacctggattcatacctcgcggactgctacgatgcaattgcagtgtttctgtgcatccatatcgtgttgaggtttcgtaatatagccgccaagagagacgtcccagccctcgataggtattgggagcaggtgctggctctgttatggccccgcttcgaattaattttggaaatgaatgtgcagagcgttagaagtaccgatccccagaggcttgggggactcgacacaagacctcactacatcacacgtaggtacgcagaattcagctccgccctggtgagtattaaccagaccatcccgaacgagagaactatgcagttgctcggccaacttcaggtggaagtagagaactttgtgctcagagtggcagctgagttctcttccaggaaagagcaactggtgttccttattaataattacgacatgatgctcggagttctgatggaacgggcagcagatgactctaaagaggttgaatccttccagcaacttctgaacgcccggacacaggagtttatcgaagagctcctttcaccaccgtttggggggctcgttgcattcgttaaagaggccgaagctttgattgaacggggccaggccgagagactgaggggagaggaggccagagtcactcagcttattcggggcttcggcagcagctggaaatccagtgtagagtctcttagccaggatgttatgaggagcttcactaacttcaggaacggcacaagcataatacagggagccctcacccagctcattcagctctatcacaggtttcacagagtgttgagccaacctcagctcagggcactgcccgcccgagccgagctgattaacatccaccacctgatggtagaactgaagaagcacaaacctaatttttag

SEQ ID NO: 212561 - DNA, 2106 bp, Artificial Sequence
  derived and/or modified sequence
atggaggaggaggagggccccctggccggcggccccggcctgcaggagccactccagctgggagaactggacattacatctgatgagttcattctggacgaggtagacgtgcatattcaggccaatctagaagatgagctggtcaaggaagcgcttaagacaggagttgatctgcgacactacagcaagcaggtggagctggaattgcaacagatcgagcagaagagcatcagggactatatccaggagagtgagaatatcgcgtctctccataaccaaattactgcttgtgatgcggtcctcgagcggatggagcaaatgctgggggccttccagagcgacctgtccagtataagctcagagatccgtacgcttcaggagcagtccggcgctatgaacattcgccttagaaaccgccaggctgtaaggggcaagctcggggagttggtggatggtcttgtggttccctccgctctggtgaccgctatcctggaggctcccgtgacagagccccggtttctagagcagcttcaagaactcgacgctaaggctgcagccgtacgggagcaagaggccagaggcaccgccgcctgtgctgacgttcggggagtcctggaccgtctgcgagtcaaagccgtgactaagatcagagagttcatccttcaaaagatctattcatttcgaaaaccaatgaccaactaccagataccccagaccgctttactcaaatatagattcttctatcagttcttgctggggaatgaaagggctacagccaaggagatcagggacgaatacgtggaaactcttagcaaaatttacctctcatattatcggtcttacctaggccgattaatgaaggttcaatatgaggaggtagccgaaaaagacgatctgatgggcgtggaggatactgccaagaagggctttttttccaaaccttctctgcggagtagaaatactattttcacgctaggtactcggggatcagttatctcacccacggagttggaggctcccatcctggtgccccacaccgcccagcgtggagagcagcggtatccgtttgaggcactgtttaggagccagcactacgcactgctcgacaattcttgcagggagtacttattcatttgtgaattcttcgtggtctcgggcccggccgctcacgacctcttccacgccgtcatgggccggacactcagcatgacgctaaaacacctcgacagctacctagctgattgctacgatgccatcgctgtattcctctgcattcatatcgtgttgcggttccgaaacattgctgctaagcgcgacgtgcctgccctcgatagatactgggagcaagtattagcgctcttgtggccccggtttgagttgatcttggaaatgaatgtgcaaagcgttcggtctactgacccccagcggctgggaggcctcgatacaagaccgcattatataacccgccgctatgctgaattcagcagtgccctcgttagtatcaatcagaccatccctaacgagcggacaatgcagctactcggccagcttcaggtggaagtagagaatttcgtgctgcgcgtggctgccgagttttcttcaaggaaggaacagctcgtgtttctcatcaataactacgacatgatgctcggagtgctgatggagagggccgctgacgacagcaaagaagttgagtcatttcagcagttgctgaacgcgcgcacacaggaatttatagaagaacttctctcacccccattcggggggctggtggcctttgtgaaggaagcagaggctcttatagagcggggtcaggccgagcggcttcggggtgaggaagcccgtgtgacgcagctgatccgaggctttgggagcagttggaagtccagcgtcgagtccctgtcacaggatgtcatgagatcattcactaactttagaaacggcaccagcatcatccagggcgctctgacacaactgatccagctgtatcaccgatttcatagagtcttgtcccagccacagcttagggccctgccagctagagccgaattaataaacatccaccaccttatggtggagctaaaaaagcataagcctaatttctag

SEQ ID NO: 212562 - DNA, 1797 bp, Artificial Sequence
  derived and/or modified sequence
atggagcaaatgctgggagccttccaatccgatctgagttccatttctagtgagattcggaccttgcaagagcagtcaggcgcaatgaatatccgtctgagaaaccgacaggcggtcaggggcaagctgggagagctcgtcgacggtctagttgtgcctagcgcactggtgactgctatcctggaggctcctgtgaccgagccgagattcttggagcaattgcaggagctggatgcaaaagctgccgcagtgagggagcaggaggcacgcggtactgccgcatgtgctgatgtccgaggagttctcgacaggctcagagtgaaagccgtgaccaaaatcagagagttcattctgcagaaaatctactcttttcgaaagcctatgactaactatcagattcctcaaaccgcactcctgaaataccggttcttttaccagttcctgctgggaaacgagagagcgactgccaaggagatccgggatgagtacgtggagaccctatcaaagatctatctgtcctattaccgctcatatctaggacggctcatgaaagtgcagtacgaggaagtggctgagaaggatgacctgatgggggtggaggatactgcgaagaaggggtttttttctaaaccaagtctgcgtagccggaacacgatctttaccctgggaactaggggtagcgtgattagtcctactgagctagaggcccctatcttagtgccccataccgcccaacgaggagagcagcggtatccatttgaggctctgttccgatctcagcactatgccctgctcgataatagttgcagagagtacttgttcatctgcgaattctttgtggtctctggaccggctgcacatgacttgttccacgccgttatgggtcggactctatccatgaccttgaagcacctggattcctacttggcagactgttacgacgctatcgcagtcttcttgtgtatccacatcgtcttaaggttccggaacatagcagccaaacgagatgtgccggctctggacaggtactgggagcaggtgctcgctctcctgtggcctaggtttgagctgatcctggagatgaatgtgcagtcagtgaggtccacggacccccagcgcctgggcggacttgacacacggccacattacatcaccagaagatacgccgaattctcttccgccctggtgagcatcaatcaaaccattccgaatgaaaggaccatgcagttgcttggtcagttacaggtggaagtagagaactttgtactgagggttgccgctgagttcagttcgagaaaggaacagctggtgttcttgattaacaactacgatatgatgctcggcgtgctgatggagagagccgctgacgacagtaaagaggtggaatcttttcagcagctgctgaatgctagaacgcaggagtttattgaagaacttctgtcccctccgttcggtggactggtcgcattcgtcaaggaggctgaagctctcatcgagagaggtcaagctgagcgcctgagaggcgaggaagccagagtgacacagctaatcaggggattcggatcatcatggaaaagctcggtggaaagcctgtctcaagacgtgatgagaagtttcactaactttcgcaatgggacctccatcattcagggagccttaacacaactcatacaattgtaccaccggttccatagggtcctgtcccaaccacagctccgtgccctacctgcccgagcggagctgatcaatattcatcacctcatggtcgaactgaaaaaacataaaccaaacttttag

SEQ ID NO: 212563 - DNA, 1797 bp, Artificial Sequence
  derived and/or modified sequence
atggaacagatgctgggggctttccagtccgatttgagttctatcagcagcgaaatccgaaccttacaggagcaatccggtgccatgaacatcaggcttcggaatcggcaggctgtgcgcggaaagctgggtgagctcgtggatgggttggtcgtgcctagcgcactcgtcaccgcaatactcgaggcccctgtcactgagcctagatttctcgagcagcttcaggagttggatgctaaagccgctgccgtgagagaacaagaggcccgaggcactgctgcttgcgctgacgtgagaggggtgttggataggctccgagtcaaagccgttaccaaaatccgggagtttattctgcagaagatatacagctttcgaaagcccatgaccaactatcagattccccaaacagcactgctgaaatacaggttcttctatcagtttctactcggcaacgagcgagctaccgcaaaagaaatccgtgacgaatatgtagaaaccctgtcaaagatttacctctcttactacagaagctatctcggcagactcatgaaggtacagtacgaagaggtggctgagaaagatgatttgatgggcgtcgaagacacagccaagaaaggtttcttctctaaaccctctctgcggtctagaaacaccattttcaccctgggaaccagaggatccgtgattagtcctacagagctggaggcaccaattctggtgcctcacaccgcgcagcggggtgaacaacggtacccgttcgaagccctcttccgttctcaacactacgccctattggacaatagctgcagagaatacctgtttatctgcgaattttttgtggtgagcgggccagctgcccatgatctctttcacgccgttatggggcgaacactttcaatgacactcaaacatcttgattcctacctcgctgattgttatgacgctatcgcagtcttcctttgcatccacattgttttgcggttccggaatatagcagcaaaaagggatgttccagccctcgaccgatattgggagcaggtgctagccttgctatggcccaggtttgagttgatactggagatgaacgtccagtcggtgaggtctaccgacccccagaggctcggaggactggatacaagaccacattatatcacccgcagatacgcagagttctcgagtgctctggtgtccatcaatcagactatccccaatgagagaacaatgcaattactcggccagcttcaggtcgaagttgagaacttcgttttacgagttgccgctgagttttcaagtcgaaaggagcagttggtgtttctgatcaataactacgatatgatgctcggagtgctcatggagagggccgcagatgatagcaaggaggtagaatcttttcagcagttattgaatgctcgaactcaggaatttattgaggagctcctttctcccccttttggaggcttggtcgcgttcgtgaaggaagctgaggccttgattgagagaggccaggcagaaagattaaggggtgaagaggccagagtgactcagcttataaggggcttcgggtcaagttggaagagctctgtggagtccctttcacaggatgtgatgcgatcatttactaacttccgaaatggtacatctattatccagggcgctctgactcagctcattcagttgtaccatcgttttcacagagtactgagccagccccagctgcgagctcttcctgccagagccgaactgatcaacattcatcacctgatggtggagttaaagaaacataaacctaacttttag

SEQ ID NO: 212564 - DNA, 2106 bp, Artificial Sequence
  derived and/or modified sequence
atggaagaagaggaaggaccactggctggagggcctggtctgcaggaacctctccagctcggggaactagatatcacatctgacgagtttatcttggacgaggtagatgtgcatatacaggcaaatctggaagatgaactcgtgaaagaagcactcaagacgggggtggacctgcgacattactccaaacaggtggaattggaactgcagcagatagagcagaaatcgattagagactatatccaggagagcgagaacatcgcttccttgcataaccagatcacggcctgcgacgccgtcctggaacgaatggaacagatgctgggcgctttccaaagtgacctgtctagcatttcttcagagatacggacacttcaggaacagtctggcgcaatgaacatccggttgcgaaatcggcaggcagtgcgcggtaaactcggtgagctcgtcgacggcctggtcgtgccatctgcgcttgtgaccgctattttagaggccccagtgacggagcctcgcttcctggagcagctgcaggagctcgacgccaaagccgcagctgttagggaacaggaggccaggggcacggcagcatgtgccgacgtccggggtgtgttggatagactgcgcgtaaaggccgtgacaaagattcgcgagttcatcttgcagaaaatatactcattccgcaaacctatgaccaattaccagatcccccagaccgctcttctaaaatacaggttcttttaccagtttttgttgggcaacgaacgcgctacagccaaggaaattagagatgagtatgtggaaaccctctctaaaatctatttgtcctactacagaagttacctggggaggctgatgaaggtacagtacgaggaagttgccgaaaaagatgacctgatgggagtcgaagacaccgccaagaagggatttttcagcaagccatctctgcgtagccggaatacaatttttacactgggcactcgcggtagtgttatctctcccacagagttagaggcccctatccttgtccctcacactgcacagcgcggagagcagagatacccctttgaggcactattcaggtcacaacattacgctctgctggataattcatgccgagaatacctcttcatttgtgagttttttgtagtttctggacctgcagctcacgacctgtttcatgccgtgatggggcgtaccctgtccatgactttaaagcacctggactcatacctggctgactgttatgacgccatcgctgtcttcctgtgcatccatattgtattgcggtttagaaacattgcagctaagagagatgtccctgcactcgataggtattgggaacaagtcttggctctgctgtggccaagattcgagctgatcttagagatgaacgtgcagagcgtccggtcaaccgatccgcaacggctgggcggactcgacacacgtccacattatatcacaaggcgttacgctgagttttcaagcgcccttgtatcgattaaccagaccatacccaatgagcggacaatgcaacttctgggacaactccaagtggaagtggagaatttcgtgctccgggtggcggctgaattttcgtctcgtaaggaacaacttgtatttcttatcaacaactatgacatgatgcttggagtgctaatggaaagagcagctgacgatagtaaagaagtcgagagctttcaacagctcctgaatgcgagaacccaggagttcattgaggagttgttgagcccacctttcggtggcctggtggcattcgttaaagaggccgaggctttaattgagagggggcaggccgaacgccttagaggagaagaggctcgcgtcactcagctgattaggggttttgggagtagctggaaatcgtctgtggaatccctgtctcaggacgtgatgagatctttcacaaacttcagaaatggcacctctatcattcagggggctctgacccaactaattcaactgtaccaccgcttccaccgggtcctgtcacagccgcagctcagagctctcccggcacgagcggagttgatcaatattcaccatttgatggtggaactgaagaaacataagcccaacttctag

SEQ ID NO: 212565 - DNA, 2106 bp, Artificial Sequence
  derived and/or modified sequence
atggaggaagaagaaggacctttagcgggaggacctggtctacaggagccgttacaattaggagagctggatattacctcagacgaattcattctcgacgaggttgacgttcacattcaagccaacttggaagatgagctcgtgaaggaggccctgaaaaccggggtcgatctgcgtcactattcaaaacaagtggagttagaattacagcagatcgagcagaagtctattcgcgattacatccaggagtccgaaaatatcgcctccctgcataatcagataacagcatgcgatgccgtgcttgaacgcatggaacaaatgttgggggcatttcagtctgacctgtcctccattagctcagaaattagaactctgcaggaacagtccggcgctatgaacattaggttacggaacaggcaggctgtgcggggtaaacttggcgagttagtcgatgggcttgtggtgccttctgcactcgtgaccgccatcttagaggccccagttactgagcccaggttcctggagcagctgcaggagttagacgccaaagctgccgctgtgcgggaacaggaggccaggggcaccgctgcctgcgctgatgtgaggggtgtcctcgaccggctcagggtgaaggctgtcaccaagatcagggaatttatcctgcagaaaatctacagcttcagaaaacctatgaccaactatcaaatcccccaaactgccctgcttaagtatcgctttttctaccaatttttattgggcaacgagcgcgctaccgcgaaagagatccgcgacgaatatgtcgagaccctgtcaaagatttatctaagctactatcgcagctaccttgggcgtctcatgaaagttcagtacgaagaagtcgcagaaaaagacgacctgatgggggtggaagatacagctaaaaagggcttttttagcaaaccaagtctgcgctctaggaacactatcttcacattgggtacgcgcggatcggtcattagccctactgaattggaagccccaattctggtgcctcacaccgctcagagaggggaacagagatacccatttgaggcgttgtttcgttcacagcattacgctttgcttgataactcatgccgcgagtatctgttcatctgcgaattttttgtggtttcaggtcctgccgcacatgatctgtttcacgccgtcatgggcagaactctgagcatgaccctgaagcacctcgattcctatctggctgactgctacgacgctattgcagttttcctttgcatccacattgtgcttagattcaggaacatcgcagccaagagggatgttcccgcactggacaggtactgggagcaagtcctggccttgctctggccacgcttcgagctgatactggagatgaatgtccaaagtgtccgcagtaccgacccacagcgactcgggggtctggacacacggcctcactatatcactagaagatacgccgagttcagctccgctcttgtctctataaatcagaccatccctaatgagcgaactatgcaacttcttggccaattgcaggttgaagtggagaattttgtcctgcgggtagctgccgagttttctagccgtaaagagcagcttgtgtttctgatcaataattacgatatgatgttaggcgtcctgatggaacgggcagccgatgactctaaagaagttgaaagcttccagcaactcctgaatgccaggacccaggagttcatcgaagagctgctctctcctcctttcggaggccttgtcgccttcgtgaaggaggccgaagccttgatagagagaggacaggcagaaaggctccggggtgaggaagcccgagttacacagttaatccgtggttttgggagcagctggaaatcctctgtggagagcctgagccaggacgtcatgagatccttcacgaactttcgcaacgggaccagtattatacagggggcactcactcagctcatccagctttatcacagatttcaccgtgtgctctcgcaaccacaactcagggccctgcctgcgagggcagaactcattaacatacaccaccttatggtggaactgaagaagcataagcccaacttctag

SEQ ID NO: 212566 - DNA, 1797 bp, Artificial Sequence
  derived and/or modified sequence
atggaacagatgctgggagcctttcagtcagacctgagcagcataagcagcgaaatccgtacactccaggagcagtcaggtgccatgaatattagactccggaacagacaagccgttagaggaaaactgggagaacttgtcgacggactcgtggtgcccagcgccctggtaacagctattctggaagcgccagtgactgagccgcgttttctggagcagctgcaggagctcgatgcgaaggcagccgcagtgcgtgagcaagaggccagggggaccgccgcatgcgcagacgtgagaggcgttcttgaccgtctccgagtgaaggccgtgactaagattagagaatttatattacagaagatctactccttccggaaacccatgactaactaccagatcccacaaacagcattgttgaaatacagattcttctaccagtttcttttggggaatgaacgggcaacagccaaggagatccgagacgagtacgtggagacactgtctaaaatctacctatcatattaccgctcctatctggggcgactgatgaaagtccagtacgaggaggtggctgagaaggatgacctcatgggggtcgaagacacggccaagaaaggcttctttagcaagccttcactaagatccaggaataccatttttaccctcgggacgcgaggatcagttattagccccaccgagctggaggccccaattctcgtgcctcacacagcccagcgcggagagcagagatacccgttcgaggcccttttcagaagtcagcattatgccctgctggacaattcttgtagagagtatctcttcatttgtgaattctttgtggtgagtggccctgctgcccacgatctcttccacgcagttatgggccgaactttatcaatgactctcaagcatctggattcatatttagctgattgttatgacgccattgctgtatttctgtgtattcatatcgtccttcgctttagaaatatcgccgcaaagagagatgtgcctgctcttgataggtattgggagcaggttctggccttgctgtggcctcggttcgagttaatcttggaaatgaatgtgcaaagcgtgcgcagcaccgatccacagaggctagggggactagacacaaggccccactacattacccggaggtatgcagaattctcctccgctttggtgtctattaaccaaactatcccaaacgagaggaccatgcaacttttaggacagcttcaggtggaagtcgagaatttcgtgctcagagtcgcagccgagttttctagccggaaagagcagcttgtgtttttaatcaataactacgacatgatgctcggggtgctgatggaaagggctgctgacgattctaaggaggtggagtctttccagcagcttcttaatgccaggacccaggaattcatagaggagctcctctccccaccattcggcggactcgtcgcattcgtaaaagaggccgaggccctcatagagcgcggtcaggcagaaaggctcaggggggaagaagcacgggttacacagctgatacgaggttttgggagcagctggaagtcctcggtggaatctctcagccaggatgtgatgagaagctttaccaacttcaggaatgggacaagcattatccagggcgctctcacccaactcatccagttatatcacagattccatcgagttttgtctcagcctcagctccgggcacttcccgcacgggcagaactgataaatatccatcatctgatggtggaactcaagaaacataagccaaacttctag

SEQ ID NO: 212567 - DNA, 2106 bp, Artificial Sequence
  derived and/or modified sequence
atggaagaagaggagggtcccctggcgggaggacctggtctccaggaacccttgcagctcggtgaactggacatcacttcagacgaattcatcctcgatgaggtggatgttcatatccaggctaatctcgaggacgagctggtcaaggaagccctcaagaccggagtggatctgagacactattccaagcaggttgaattggagcttcagcaaatagaacagaaatcaatccgagattacatacaagagtccgagaacatcgcgagcctgcataaccagattaccgcttgcgacgctgtgctcgagagaatggaacagatgcttggcgcatttcaatccgatctgagttcaatctcatccgaaatcagaacactgcaggaacagtcaggggcaatgaatatccgcttgaggaaccggcaggcggtgagaggaaagctgggcgagctggttgatggattagtcgtgccatctgccctcgtgacagccatcttggaggcccctgtcaccgaacccagattcctggagcagctgcaagagctggatgctaaagctgccgcagtgagggaacaagaggccagaggaactgctgcctgcgcggacgtacgaggagtcctcgacagactcagagtgaaagccgtgacgaaaattcgcgaattcattctgcagaagatatatagcttccggaaacccatgaccaattaccagatcccacagacggcactgctgaagtacagatttttttaccagttcctcctcgggaatgaacgggctacagccaaggaaatccgagatgaatacgtcgaaactctcagcaaaatttatctgagttattacagaagctatctgggcaggctgatgaaggtccaatacgaggaagtagctgaaaaagacgacctgatgggggttgaagatactgcaaaaaagggctttttttcgaagccaagtctgagatcacgcaataccatctttacgttgggtacgcgcggatcggtcatcagccctaccgagctggaggctcctatactagtcccgcacactgcccagcgaggagaacagagatatccgttcgaggcactgttcaggagccagcactatgccttgctagataactcttgcagagaataccttttcatctgtgaatttttcgtcgtctcaggcccagcagcacacgatctgttccatgcagtcatgggcaggacgctctccatgacgctgaaacacctggatagctatctggctgactgctacgacgcgatcgccgtctttctgtgcatccatatagtccttaggttcagaaatattgctgctaagcgggacgtgccagcgttagaccgatactgggagcaggtgttggccctgctgtggcccagattcgagctgatcctcgaaatgaatgtgcaatcagtccgttcaactgatccgcagagacttgggggtctggatacacgtccacattatattacacgacggtatgctgagttcagctccgccttggtttcaattaaccagacaatcccaaatgagaggaccatgcagctgcttggccagctgcaggttgaggttgagaatttcgtcctgagggtcgccgcagaattctcatcacggaaggagcagctggtgtttctaatcaacaattatgacatgatgctgggcgtgctcatggagagagctgccgacgacagtaaagaagtcgaatcttttcaacagctgctgaacgctcgcacgcaggaatttattgaggagctgctctctcccccttttggcggattggtagccttcgtcaaagaggccgaagccctgatcgaacggggacaggcggagcgcttaaggggggaggaggctagagtcactcagcttattcggggatttggatctagttggaaatcctctgtggaaagtctctctcaggatgtaatgcgcagctttacaaacttcagaaacggaacgagcataatccagggagcactgacccaattaatacagttataccaccgtttccaccgcgtgttatcacagcctcagctgcgcgcactgcctgccagggccgagctcataaatatccatcatctcatggtcgagttgaagaaacacaaaccaaatttctag

SEQ ID NO: 212568 - protein, 266 aa, Artificial Sequence
  derived and/or modified sequence
MVCLKLPGGSSLAALTVTLMVLSSRLAFAGDTRPRFLELLKSECHFFNGTERVRFLERHFHNQEEYARFDSDVGEYRAVRELGRPDAEYWNSQKDLLEQKRGQVDNYCRHNYGVGESFTVQRRVHPQVTVYPAKTQPLQHHNLLVCSVSGFYPGSIEVRWFRNGQEEKAGVVSTGLIQNGDWTFQTLVMLETVPRSGEVYTCQVEHPSVTSPLTVEWSARSESAQSKMLSGVGGFVLGLLFLGAGLFIYFRNQKGHSGLQPTGFLS

SEQ ID NO: 212569 - protein, 266 aa, Artificial Sequence
  derived and/or modified sequence
MVCLKLPGGSSLAALTVTLMVLSSRLAFAGDTRPRFLELRKSECHFFNGTERVRYLDRYFHNQEEFLRFDSDVGEYRAVTELGRPVAESWNSQKDLLEQKRGRVDNYCRHNYGVGESFTVQRRVHPQVTVYPAKTQPLQHHNLLVCSVSGFYPGSIEVRWFRNGQEEKAGVVSTGLIQNGDWTFQTLVMLETVPRSGEVYTCQVEHPSVTSALTVEWRARSESAQSKMLSGVGGFVLGLLFLGAGLFIYFRNQKGHSGLQPTGFLS

SEQ ID NO: 212570 - DNA, 801 bp, Artificial Sequence
  derived and/or modified sequence
atggtctgcctgaagctgcctggggggtcctccctggcggcactgacggtcaccctgatggtgctgagctcacgcctggcttttgcgggcgatacgcggcctcgatttctggaactcctgaagagtgaatgccatttcttcaacggcactgagcgggtgcgctttctcgagcgccactttcacaatcaggaggagtacgcgcggttcgatagtgacgtaggcgagtaccgggcagttcgcgaactcggcagacctgacgccgagtattggaactcccagaaggatctcctcgaacagaaacgcggacaggtggataactattgtcgacataattatggagtgggggagagcttcaccgtgcaaaggagagtgcacccccaagtcactgtttatccagcgaaaacccagccactgcagcaccacaacctcctggtgtgctcagtgtcagggttttatcccggttctatcgaggtgcgctggtttcgaaacggacaggaagagaaggctggcgttgtgagtacagggctgatccaaaatggagactggacttttcagactctcgttatgctcgagaccgtgccccgcagtggcgaggtatacacgtgccaagtggagcatccttctgtaacttcccctcttaccgtggagtggagcgccagatcagagtccgctcagagtaaaatgctgagcggagtaggcggattcgtgctgggacttctcttcctgggagccgggctcttcatctacttccgtaatcaaaaaggccatagcgggttgcagccaacaggcttcctctcatag

SEQ ID NO: 212571 - DNA, 801 bp, Artificial Sequence
  derived and/or modified sequence
atggtttgtctgaaactgcctgggggaagttctctggctgccttaaccgtgaccctgatggtactgtcaagtcgtttagcctttgccggggacacgaggccacgctttctggagctgagaaagagcgaatgccacttttttaatgggacggagagagtgagatatctcgatcgatattttcataatcaggaagagttcctgcgttttgactccgatgtgggtgaataccgcgcggtcactgagctcggcaggccggtggccgagagctggaattcccagaaggacctgttagagcagaagagaggcagggtggacaactattgtcggcacaactacggagtgggtgagtccttcactgtgcagcggcgggtccacccacaggtcaccgtataccccgccaaaacgcaacccctgcagcaccacaacctgcttgtctgttcggtttctggcttctatcctggtagcattgaggtccgatggttcaggaacggccaggaagaaaaagcaggggttgtgtctacaggactgattcagaacggcgattggacctttcagaccctggtgatgctggagacagtccccaggagtggggaggtctatacatgtcaggtagagcatccaagcgtgacttccgcccttacggttgagtggagagccaggtcagaatcagcgcagtcaaaaatgctctccggggtcggcggctttgtgctggggctgctattcttgggagcaggcttgtttatctatttcaggaatcaaaaggggcatagcggacttcagcccaccggcttcctatcatag

SEQ ID NO: 212572 - DNA, 801 bp, Artificial Sequence
  derived and/or modified sequence
atggtttgtttaaagttgcctgggggatcatctctggctgcgctgacagtgaccctgatggtgctgagcagcagactggcctttgccggtgatactcgaccgaggtttctagagctgctcaaatccgagtgtcactttttcaatggcaccgaacgcgtcagattcctggagaggcattttcacaaccaggaagagtatgcaaggttcgactccgacgtgggggagtacagggccgtgcgagaactgggcagaccagatgctgaatattggaatagccagaaagacctcctcgagcaaaagcgagggcaggtagataattactgtcgccacaactacggggtaggagagagttttacggtgcagcggagagtgcacccacaggtgactgtctaccccgcaaaaacacagcctctccaacatcacaatctgctggtctgtagcgtcagcgggttctacccaggaagtatagaagtgaggtggtttcggaatgggcaggaagaaaaagctggcgtggtgagcacgggactaatccagaacggggattggactttccaaacccttgtcatgctagagaccgtgccccgtagcggggaagtgtacacttgtcaggtcgaacatccatccgtgacatcaccacttaccgtggagtggtcagctaggtcggaaagcgcgcagtcaaagatgttgtctggcgtgggggggttcgttctgggcttgctctttctgggggccggccttttcatctactttcggaatcagaagggccactctggtctccagccgacagggtttctctcatag

SEQ ID NO: 212573 - DNA, 801 bp, Artificial Sequence
  derived and/or modified sequence
atggtgtgcctgaagctgcccggcggcagcagcctggccgccctgactgtgaccctgatggtgctgagcagccggctggcctttgctggggacacccggccccgcttcctggagctgctgaagtctgagtgccacttcttcaacggcacagagcgggtgcgcttcctggagcggcacttccacaaccaggaggagtatgccaggtttgacagtgatgtgggggagtacagagctgtgcgggagctgggccgcccagatgctgagtactggaacagccagaaggacctgctggagcagaagaggggccaggtggacaactactgccgccacaactacggcgtgggggagagcttcaccgtgcagaggagagtgcacccccaggtgacagtgtacccagccaagacccagcccctgcagcaccacaacctgctggtgtgcagcgtgtctggcttctacccaggcagcattgaggtgcgctggttcagaaatggccaggaggagaaggccggcgtggtgtccacaggcctcatccagaatggagactggaccttccagaccctggtgatgctggagaccgtgcccaggtctggagaggtgtacacctgccaggtggagcaccccagcgtgaccagccccctgactgtggagtggagcgcccggtctgagagcgcccagagcaagatgctgagcggcgtgggcggctttgtgctgggcctgctcttcctgggcgccggcctcttcatctacttcaggaaccagaagggccacagcggcctgcagcccaccggcttcctgtcctag

SEQ ID NO: 212574 - DNA, 801 bp, Artificial Sequence
  derived and/or modified sequence
atggtgtgcctgaagctgcccggcggcagcagcctggccgccctgactgtgaccctgatggtgctgagcagccggctggcctttgctggggacacccggccccgcttcctggagctgaggaagtctgagtgccacttcttcaacggcacagagcgggtgcgctacctggaccgctacttccacaaccaggaggagttcctgcgctttgacagtgatgtgggggagtacagagctgtgacagagctgggccggcctgtggccgagagctggaacagccagaaggacctgctggagcagaagaggggccgggtggacaactactgccgccacaactacggcgtgggggagagcttcaccgtgcagaggagagtgcacccccaggtgacagtgtacccagccaagacccagcccctgcagcaccacaacctgctggtgtgcagcgtgtctggcttctacccaggcagcattgaggtgcgctggttcagaaatggccaggaggagaaggccggcgtggtgtccacaggcctcatccagaatggagactggaccttccagaccctggtgatgctggagaccgtgcccaggtctggagaggtgtacacctgccaggtggagcaccccagcgtgaccagcgccctgactgtggagtggagggcccggtctgagagcgcccagagcaagatgctgagcggcgtgggcggctttgtgctgggcctgctcttcctgggcgccggcctcttcatctacttcaggaaccagaagggccacagcggcctgcagcccaccggcttcctgtcctag

SEQ ID NO: 212575 - DNA, 1178 bp, Artificial Sequence
  derived and/or modified sequence
atagttctccctgagtgagacttgcctgctcctctggcccctggtcctgtcctcttctccagcatggtgtgtctgaagctccctggaggctccagcttggcagcgttgacagtgacactgatggtgctgagctcccgactggctttcgctggggacacccgaccacgtttcttggagctgcttaagtctgagtgtcatttcttcaatgggacggagcgggtgcggttcctggagagacacttccataaccaggaggagtacgcgcgcttcgacagcgacgtgggggagtaccgggcggtgagggagctggggcggcctgatgccgagtactggaacagccagaaggacctcctggagcagaagcggggccaggtggacaattactgcagacacaactacggggttggtgagagcttcacagtgcagcggcgagtccatcctcaggtgactgtgtatcctgcaaagacccagcccctgcagcaccacaacctcctggtctgctctgtgagtggtttctatccaggcagcattgaagtcaggtggttccggaacggccaggaagagaaggctggggtggtgtccacgggcctgatccagaatggagactggaccttccagaccctggtgatgctagaaacagttcctcggagtggagaggtttacacctgccaagtggagcacccaagcgtaacgagccctctcacagtggaatggagtgcacggtctgaatctgcacagagcaagatgctgagtggagtcgggggctttgtgctgggcctgctcttccttggggccgggctgttcatctacttcaggaatcagaaaggacactctggacttcagccaacaggattcctgagctgaagtgcagatgacaatttaaggaagaatcttcttccccagctttgcaggatgaaaagctttcccgcctggctgttattcttccacgagagagggctttctcaggacctagttgctactggttcagcaactgcagaaaatgtcctcccttgtggcttcctcagttcctgcccttggcctgaagtcccagcattgatggcagcgcctcatcttcaacttttgtgctcccctttgcctaaaccctatggcctcctgtgcatctgtactcaccctgtaccacaaacacattacattattaaatgtttctcaaagatgga

SEQ ID NO: 212576 - DNA, 1207 bp, Artificial Sequence
  derived and/or modified sequence
ggtggaggggggtcatagttctccctgagtgagacttgcctgctcctctggcccctggtcctgtcctcttctccagcatggtgtgtctgaagctccctggaggctccagcttggcagcgttgacagtgacactgatggtgctgagctcccgactggctttcgctggggacacccgaccacgtttcttggagctgcgtaagtctgagtgtcatttcttcaatgggacggagcgggtgcggtacctggacagatacttccataaccaggaggagttcctgcgcttcgacagcgacgtgggggagtaccgggcggtgacggagctggggcggcctgtcgccgagtcctggaacagccagaaggacctcctggagcagaagcggggccgggtggacaattactgcagacacaactacggggttggtgagagcttcacagtgcagcggcgagtccatcctcaggtgactgtgtatcctgcaaagacccagcccctgcagcaccacaacctcctggtctgctctgtgagtggtttctatccaggcagcattgaagtcaggtggttccggaacggccaggaagagaaggctggggtggtgtccacgggcctgatccagaatggagactggaccttccagaccctggtgatgctagaaacagttcctcggagtggagaggtttacacttgccaagtggagcacccaagcgtaacgagcgctctcacagtggaatggagagcacggtctgaatctgcacagagcaagatgctgagtggagtcgggggctttgtgctgggcctgctcttccttggggccgggctgttcatctacttcaggaatcagaaaggacactctggacttcagccaacaggattcctgagctgaagtgcagatgacaatttaaggaagaatcttctgccccagctttgcaggatgaaaagctttcccgcctggctgttattcttccacgagagagggctttctcaggacctagttgctactggttcagcaactgcagaaaatgtcctcccttgtggcttcctcagttcctgcccttggcctgaagtcccagcattgatggcagcgcctcatcttcaacttttgtgctcccctttgcctaaaccctatggcctcctgtgcatctgtactcaccctgtaccacaaacacattacattattaaatgtttctcaaagatggagttaaatatcatctg

SEQ ID NO: 212577 - DNA, 1839 bp, Artificial Sequence
  derived and/or modified sequence
cctccctataatttggaatgtgggtggaggggggtcatagttctccctgagtgagacttgcctgctcctctggcccctggtcctgtcctcttctccagcatggtgtgtctgaagctccctggaggctccagcttggcagcgttgacagtgacactgatggtgctgagctcccgactggctttcgctggggacacccgaccacgtttcttggagctgcttaagtctgagtgtcatttcttcaatgggacggagcgggtgcggttcctggagagacacttccataaccaggaggagtacgcgcgcttcgacagcgacgtgggggagtaccgggcggtgagggagctggggcggcctgatgccgagtactggaacagccagaaggacctcctggagcagaagcggggccaggtggacaattactgcagacacaactacggggttggtgagagcttcacagtgcagcggcgagtccatcctcaggtgactgtgtatcctgcaaagacccagcccctgcagcaccacaacctcctggtctgctctgtgagtggtttctatccaggcagcattgaagtcaggtggttccggaacggccaggaagagaaggctggggtggtgtccacgggcctgatccagaatggagactggaccttccagaccctggtgatgctagaaacagttcctcggagtggagaggtttacacctgccaagtggagcacccaagcgtaacgagccctctcacagtggaatggagtgcacggtctgaatctgcacagagcaagatgctgagtggagtcgggggctttgtgctgggcctgctcttccttggggccgggctgttcatctacttcaggaatcagaaaggacactctggacttcagccaacaggattcctgagctgaagtgcagatgacaatttaaggaagaatcttcttccccagctttgcaggatgaaaagctttcccgcctggctgttattcttccacgagagagggctttctcaggacctagttgctactggttcagcaactgcagaaaatgtcctcccttgtggcttcctcagttcctgcccttggcctgaagtcccagcattgatggcagcgcctcatcttcaacttttgtgctcccctttgcctaaaccctatggcctcctgtgcatctgtactcaccctgtaccacaaacacattacattattaaatgtttctcaaagatggagttaaatatcatctggtccatttggctccaaagacaaaaaatgaaaagaaaagaaaagaaaaagggaagattatttcctaacagaataatgattttcacgtgtgtgtcatgagtatgtgaggtaatgtatatgttaaataccatgatttagtcattccacactataggcatataacaaaacttcatgcttccacataaatatgctatacaatttttacttgtcaattaaaaaagtaatgctaacatttaaaaaggcagtgcataaaaactgagaacagactataacaactgaaacaaacttggcaaaccgatgagaaaccagccagcaagtcaatcagaactcttcaccccatctacaatattttgtatttataactgtaaattagtgtatagtgtttcactccagagacttcaataatatagtgttatcaaaggacttgtacagatttcagagaaagacacatttagaagacggagaatggagtctccattatgttctacctgagagtcagtatgaaatgtcaaatataaaagtacataattcagaggtctatttcaaagtaataatcatttgagcataatttctccactgacagagacgactgttattttattttcaatcaaa

SEQ ID NO: 212578 - DNA, 801 bp, Artificial Sequence
  derived and/or modified sequence
atggtgtgcctgaagctgcccggcggcagcagcctggccgccctgaccgtgaccctgatggttttatcttctcgcctcgctttcgctggtgataccagacctaggtttctggagctgctgaagtccgagtgccatttcttcaacgggacagagcgagtgaggtttctcgagcgacacttccataaccaggaagaatatgccaggttcgactccgacgttggagagtaccgcgcagtacgggaactgggcagacccgacgcggagtactggaactcccagaaggaccttctcgagcagaagcggggacaggtagataactattgtagacacaactacggcgtcggagagtcctttaccgtccagagacgagtgcatccccaggtgacagtctatccagccaagacccagcccttgcaacaccacaatctcttggtgtgttctgtctcggggttctaccccgggtctattgaggtccgttggtttcggaatgggcaagaagagaaagcgggcgtggtctccaccggccttatccagaacggcgattggacttttcagacactggtcatgttggagactgtgccccgaagtggtgaagtgtacacctgccaggtagagcaccctagtgtgacgagccccctgactgtggaatggagtgcccggagcgaaagcgcccagagtaaaatgttatcaggagtgggtggatttgttcttgggctgctatttctgggcgctggactcttcatttattttcgaaatcagaaggggcattctggattgcaaccaactggctttctaagctag

SEQ ID NO: 212579 - DNA, 801 bp, Artificial Sequence
  derived and/or modified sequence
atggtgtgcctgaagctgcccggcggcagcagcctggccgccctgacagtgactttaatggtcctctcgagccgtctggcatttgccggtgatacaagaccgaggtttctcgagctgcgtaagagcgaatgccacttctttaacggcaccgagcgcgtgagataccttgacaggtattttcataatcaggaggagttcctgagatttgattctgacgtaggcgagtaccgtgctgtgacagagttgggcagacctgtggcggagagctggaacagccagaaggatctgctggaacaaaaaagggggcgagtggacaattactgtaggcacaactacggcgtcggggaaagctttacagtgcagcgcagggtacacccgcaggtcacagtttacccagctaagacacaaccactgcagcatcataatctcttggtttgcagcgtgtcggggttctaccccgggtctatcgaagtcaggtggttccgaaatggtcaggaggagaaggccggcgtggtctcgacaggactgatccagaatggtgactggacttttcagacactcgttatgctggagaccgtccccaggtccggggaagtatacacctgccaggtggaacatccatctgtcacaagcgctctgaccgtcgaatggcgcgctcggtccgagtcagcccagagtaagatgctgagtggcgttggtgggttcgtactgggtctgctcttcttaggagccggcctgtttatctatttccgcaaccagaaaggccactctggcctccagcctaccggatttctttcatag

SEQ ID NO: 212580 - DNA, 801 bp, Artificial Sequence
  derived and/or modified sequence
atggtgtgcctgaagctgcccggcggcagcagcctggccgccctgacagtcacgctcatggtcctgagtagtcgcctcgcctttgcaggggatacaagacctagattcttggaacttttgaaaagcgaatgtcactttttcaatggtacagagagagttcggtttcttgaacggcactttcacaaccaggaagaatacgcaaggttcgactccgatgtgggtgagtatagagccgtgcgggagctgggccgacctgacgccgaatactggaactcccaaaaagacctgttagaacagaagcgcggacaggtggacaactactgtagacacaactacggagtgggagagagcttcacagttcaacgcagagtacatccccaggttacagtgtatccagctaagacccaaccattgcagcaccacaacctgctggtctgttctgtgtctgggttttatcccggctcaattgaggtgagatggttccgaaacggccaagaggagaaagccggggtggtgagcacgggattgattcagaacggggactggacgtttcaaaccttggtaatgctcgagacagttcctcggtccggggaggtgtatacatgtcaggtcgagcatccatccgtcacgtcacccctcacagtggaatggtccgcccggtccgagtcagctcagtccaaaatgctgtccggggtgggcgggttcgtgctaggattgcttttcctaggcgctggactctttatctacttccgcaaccaaaagggccacagcgggctacagcctaccgggtttctatcatag

SEQ ID NO: 212581 - DNA, 801 bp, Artificial Sequence
  derived and/or modified sequence
atggtctgtttgaaactgcccggaggatcctcgttggcggcactcactgttacacttatggttctgtcaagtcgcctcgcttttgctggagacactagacccagatttttagagctcttaaaatctgagtgccatttcttcaacggaaccgagagagtgcgctttctagagcgacacttccataaccaggaggagtacgccaggtttgactctgatgtgggggaatatcgggcagtgcgcgagttgggtagacctgacgccgagtattggaacagccagaaggatctgcttgaacagaagaggggtcaggttgacaactactgtcggcataattatggagtgggagaatcttttactgtccagcggcgtgtccaccctcaggtgacagtgtaccccgctaaaacgcagcctctccaacaccataaccttctggtctgttctgtgagcggtttttacccaggtagcatcgaggtgcggtggtttagaaatgggcaggaggaaaaagcaggcgttgtaagcaccgggctgattcagaacggagattggaccttccagacactcgtgatgctcgaaacggttccacgtagcggtgaagtgtacacttgtcaggtggagcaccccagcgtgacgtcacccctgactgtggaatggagcgcaaggtccgagtccgcgcaaagcaagatgctttctggtgttggagggttcgtattaggattactgtttttaggcgcaggcctgtttatttactttcgcaatcaaaagggtcattcgggcctccagccaaccggatttctcagctag

SEQ ID NO: 212582 - DNA, 801 bp, Artificial Sequence
  derived and/or modified sequence
atggtgtgcctgaaattgcccggagggtccagcctggccgctctcactgttaccctgatggttctttccagtcgactggcattcgcaggggatactaggcccaggtttctcgaactccggaaatccgagtgccatttcttcaacggcactgagcgggtgcgttacctcgaccgctacttccacaatcaagaagagttcctgcgatttgacagcgatgtcggggagtatcgggctgtgaccgagctgggtcggcctgttgcggaaagttggaatagccaaaaagacctcctggaacaaaaacgcggacgtgtagataactattgtcgacacaactacggtgtgggcgaatctttcaccgtgcaacgcagagtgcacccgcaggtgacagtgtatccagccaaaacgcagcctttacagcaccataatcttcttgtgtgcagcgtctctgggttctatcctggctcaattgaagtgcgctggttccgcaacggccaggaagagaaggcgggagtggtgagtactggactcatccagaatggtgactggaccttccagaccctggtaatgctggaaactgtccctcgctctggtgaggtatatacgtgccaggtggaacacccgtcagtcacatctgcactgaccgtcgaatggcgcgctagatctgaatcagcacagtccaagatgctctccggggttggcggatttgtgctagggctgctcttcctgggtgcgggtctgtttatttatttccgcaaccagaagggccacagcggccttcaacccactggttttttgagttag

SEQ ID NO: 212583 - DNA, 801 bp, Artificial Sequence
  derived and/or modified sequence
atggtttgtttgaaactgcccggtggatcttccctagcagccttaaccgtcactctaatggtgctctcttctagactcgcatttgcaggcgatacacgaccgcgattcttggagttactcaagtcggaatgtcattttttcaatggcaccgaacgcgtgaggtttctcgagcgccactttcacaaccaggaggaatatgccaggtttgatagtgatgttggtgagtatcgcgcagtgagagagcttggtaggcccgacgctgaatactggaactcgcagaaagatttactagagcagaagcggggtcaggtcgacaattactgtcgtcacaactacggtgtcggggaatcttttacagtccagcgcagggtgcacccacaagtaaccgtgtatccagcaaagacccagcctcttcagcatcataacctgctggtatgcagcgtgtcaggcttctatcctgggtccattgaggtgcgctggtttaggaatgggcaggaggagaaggctggagtcgtctcaacaggcctaatccagaatggcgattggacctttcagacactcgtgatgttggaaaccgtgcccaggagcggggaggtgtacacctgccaggttgagcaccccagcgttacctctccactgactgtcgaatggagcgcccgttcagagagtgcccagtcgaagatgctctcaggagtcggaggattcgtcttgggtcttttgtttcttggcgcaggcttattcatctatttcagaaaccagaagggccactctggccttcagcctaccggcttcctgagttag

SEQ ID NO: 212584 - DNA, 801 bp, Artificial Sequence
  derived and/or modified sequence
atggtgtgcctgaagctgcccggcggcagcagcctggccgccctgaccgtgaccctgatggtgctgagcagcagactggccttcgccggcgacaccagacccagattcctggagctgctgaagagcgagtgccacttcttcaacggcaccgagagagtgagattcctggagagacacttccacaaccaggaggagtacgccagattcgacagcgacgtgggcgagtacagagccgtgagagagctgggcagacccgacgccgagtactggaacagccagaaggacctgctggagcagaagagaggccaggtggacaactactgcagacacaactacggcgtgggcgagagcttcaccgtgcagagaagagtgcacccccaggtgaccgtgtaccccgccaagacccagcccctgcagcaccacaacctgctggtgtgcagcgtgagcggcttctaccccggcagcatcgaggtgagatggttcagaaacggccaggaggagaaggccggcgtggtgagcaccggcctgatccagaacggcgactggaccttccagaccctggtgatgctggagaccgtgcccagaagcggcgaggtgtacacctgccaggtggagcaccccagcgtgaccagccccctgaccgtggagtggagcgccagaagcgagagcgcccagagcaagatgctgagcggcgtgggcggcttcgtgctgggcctgctgttcctgggcgccggcctgttcatctacttcagaaaccagaagggccacagcggcctgcagcccaccggcttcctgagctag

SEQ ID NO: 212585 - DNA, 801 bp, Artificial Sequence
  derived and/or modified sequence
atggtgtgcctgaagctgcccggcggcagcagcctggccgccctgaccgtgaccctgatggtgctgagcagcagactggccttcgccggcgacaccagacccagattcctggagctgagaaagagcgagtgccacttcttcaacggcaccgagagagtgagatacctggacagatacttccacaaccaggaggagttcctgagattcgacagcgacgtgggcgagtacagagccgtgaccgagctgggcagacccgtggccgagagctggaacagccagaaggacctgctggagcagaagagaggcagagtggacaactactgcagacacaactacggcgtgggcgagagcttcaccgtgcagagaagagtgcacccccaggtgaccgtgtaccccgccaagacccagcccctgcagcaccacaacctgctggtgtgcagcgtgagcggcttctaccccggcagcatcgaggtgagatggttcagaaacggccaggaggagaaggccggcgtggtgagcaccggcctgatccagaacggcgactggaccttccagaccctggtgatgctggagaccgtgcccagaagcggcgaggtgtacacctgccaggtggagcaccccagcgtgaccagcgccctgaccgtggagtggagagccagaagcgagagcgcccagagcaagatgctgagcggcgtgggcggcttcgtgctgggcctgctgttcctgggcgccggcctgttcatctacttcagaaaccagaagggccacagcggcctgcagcccaccggcttcctgagctag

SEQ ID NO: 212586 - DNA, 1158 bp, Artificial Sequence
  derived and/or modified sequence
gcctgctgctctggcccctggtcctgtcctcttctccagcatggtgtgtctgaagctccctggaggctccagcttggcagcgttgacagtgacactgatggtgctgagctcccgactggctttcgctggggacacccgaccacgtttcttggagctgcgtaagtctgagtgtcatttcttcaatgggacggagcgggtgcggtacctggacagatacttccataaccaggaggagttcctgcgcttcgacagcgacgtgggggagtaccgggcggtgacggagctggggcggcctgtcgccgagtcctggaacagccagaaggacctcctggagcagaagcggggccgggtggacaattactgcagacacaactacggggttggtgagagcttcacagtgcagcggcgagtccatcctcaggtgactgtgtatcctgcaaagacccagcccctgcagcaccacaacctcctggtctgctctgtgagtggtttctatccaggcagcattgaagtcaggtggttccggaacggccaggaagagaaggctggggtggtgtccacgggcctgatccagaatggagactggaccttccagaccctggtgatgctagaaacagttcctcggagtggagaggtttacacttgccaagtggagcacccaagcgtaacgagcgctctcacagtggaatggagagcacggtctgaatctgcacagagcaagatgctgagtggagtcgggggctttgtgctgggcctgctcttccttggggccgggctgttcatctacttcaggaatcagaaaggacactctggacttcagccaacaggattcctgagctgaagtgcagatgacaatttaaggaagaatcttctgccccagctttgcaggatgaaaagctttcccgcctggctgttattcttccacgagagagggctttctcaggacctagttgctactggttcagcaactgcagaaaatgtcctcccttgtggcttcctcagttcctgcccttggcctgaagtcccagcattgatggcagcgcctcatcttcaacttttgtgctcccctttgcctaaaccctatggcctcctgtgcatctgtactcaccctgtaccacaaacacattacattattaaatgtttctcaaagatggagtt

SEQ ID NO: 212587 - protein, 202 aa, Artificial Sequence
  derived and/or modified sequence
MAAGSRTSLLLAFGLLCLSWLQEGSAFPTIPLSRLFDNAMLRARRLYQLAYDTYQEFNPQTSLCFSESIPTPSNRVKTQQKSNLELLRISLLLIQSWLEPVQLLRSVFANSLVYGASDSNVYRHLKDLEEGIQTLMWRLEDGSPRTGQIFNQSYSKFDTKSHNDDALLKNYGLLYCFRKDMDKVETFLRIVQCRSVEGSCGF

SEQ ID NO: 212588 - DNA, 609 bp, Artificial Sequence
  derived and/or modified sequence
atggccgccggcagcagaaccagcctgctgctggccttcggcctgctgtgcctgagctggctgcaggagggcagcgccttccccaccatccccctgagcagactgttcgacaacgccatgctgagagccagaagactgtaccagctggcctacgacacctaccaggagttcaacccccagaccagcctgtgcttcagcgagagcatccccacccccagcaacagagtgaagacccagcagaagagcaacctggagctgctgagaatcagcctgctgctgatccagagctggctggagcccgtgcagctgctgagaagcgtgttcgccaacagcctggtgtacggcgccagcgacagcaacgtgtacagacacctgaaggacctggaggagggcatccagaccctgatgtggagactggaggacggcagccccagaaccggccagatcttcaaccagagctacagcaagttcgacaccaagagccacaacgacgacgccctgctgaagaactacggcctgctgtactgcttcagaaaggacatggacaaggtggagaccttcctgagaatcgtgcagtgcagaagcgtggagggcagctgcggcttctag

SEQ ID NO: 212589 - DNA, 609 bp, Artificial Sequence
  derived and/or modified sequence
atggcagctggatctaggacttccctgttactagcattcggattgctgtgcctgtcttggctgcaggaagggtctgcctttcccacaatccccttatctagattattcgataacgcaatgttaagggcccgtcgcttataccagctggcatacgacacatatcaggaattcaacccccagacttctctctgtttttctgaatcaattccgacgccgagcaacagagtgaaaacacaacagaaatctaaccttgaactcctgaggatatctcttctcctgattcaatcctggttggaacccgtgcaattgctgaggtctgtatttgctaactcgctcgtgtacggagcctccgattccaatgtctatcgtcacctgaaagatcttgaagagggtattcagaccctaatgtggcgacttgaagacggaagtcctcgcacgggacagatttttaaccagagctattcaaagttcgacaccaagtctcacaatgacgacgcattgctcaagaactacggccttctgtattgcttcaggaaggacatggacaaagtggagacttttcttcgcatcgttcagtgtcggtctgtcgagggttcttgcgggttctag

SEQ ID NO: 212590 - DNA, 609 bp, Artificial Sequence
  derived and/or modified sequence
atggctgctggcagcaggaccagcctgctgctggccttcggcctgctgtgcctgtcctggctgcaggagggcagcgccttccccaccatccccctgagccggctgtttgacaatgccatgctgcgggcccggcggctgtaccagctggcctatgacacctaccaggagttcaacccccagaccagcctgtgcttcagcgagagcatccccacccccagcaacagagtgaagacccagcagaagagcaacctggagctgctgcgcatcagcctgctgctgatccagagctggctggagcctgtgcagctgctgcggtctgtgtttgccaacagcctggtgtatggagccagtgacagcaatgtgtaccgccacctgaaggacctggaggagggcatccagaccctgatgtggaggctggaggatggcagccccaggacaggccagatcttcaaccagagctacagcaagtttgacaccaagagccacaatgatgatgccctgctgaagaactacggcctgctgtactgcttcaggaaggacatggacaaggtggagaccttcctgcgcatcgtgcagtgccgctctgtggagggcagctgtggcttctag

SEQ ID NO: 212591 - DNA, 609 bp, Artificial Sequence
  derived and/or modified sequence
atggccgccggcagccggaccagcctgctgctggccttcggcctgctctgtctatcatggctgcaggaaggaagcgcctttccaacgattcccctctcaagactatttgacaacgcaatgctccgggctcgtagactctatcagctggcctatgacacataccaggaattcaacccgcaaacatcactctgcttctccgagtctatccccaccccgtcaaatagagtcaagactcagcagaaatccaatcttgaactcctacgcatctctctgctgctgattcagtcatggctggagccggttcagcttctgcggagcgtgtttgccaactccctggtttatggcgcaagcgactctaacgtgtatagacacttaaaagatctggaagagggtatacagactctgatgtggaggctagaggatggctcgccccggacaggtcagatattcaatcagtcctattctaagttcgatactaaatcacacaatgacgatgcgctgctgaaaaattacgggctgctttactgcttcaggaaagacatggacaaggtggaaacatttctgagaatcgtgcagtgtagaagcgtagagggcagctgtggattctag

SEQ ID NO: 212592 - DNA, 753 bp, Artificial Sequence
  derived and/or modified sequence
ccgaaccactcagggtcctgtggacagctcacctagcggcaatggctgcaggctcccggacgtccctgctcctggcttttggcctgctctgcctgtcctggcttcaagagggcagtgccttcccaaccattcccttatccaggctttttgacaacgctatgctccgcgcccgtcgcctgtaccagctggcatatgacacctatcaggagtttaacccccagacctccctctgcttctcagagtctattccaacaccttccaacagggtgaaaacgcagcagaaatctaacctagagctgctccgcatctccctgctgctcatccagtcatggctggagcccgtgcagctcctcaggagcgtcttcgccaacagcctggtgtatggcgcctcggacagcaacgtctatcgccacctgaaggacctagaggaaggcatccaaacgctgatgtggaggctggaagatggcagcccccggactgggcagatcttcaatcagtcctacagcaagtttgacacaaaatcgcacaacgatgacgcactgctcaagaactacgggctgctctactgcttcaggaaggacatggacaaggtcgagacattcctgcgcatcgtgcagtgccgctctgtggagggcagctgtggcttctagctgcccgggtggcatccctgtgacccctccccagtgcctctcctggtcgtggaaggtgctactccagtgcccaccagccttgtcctaataaaattaagttgca

SEQ ID NO: 212593 - DNA, 609 bp, Artificial Sequence
  derived and/or modified sequence
atggctgccggatctcggacctctctgttgcttgctttcggcttgttatgcctatcttggctgcaagaaggcagcgccttcccaaccatccccttgagcaggttattcgataatgctatgctgcgggctagaaggctgtatcaactcgcctatgatacctatcaagagtttaatccccagacctccctgtgtttctctgagagtatccctacaccaagcaatcgcgttaagactcagcaaaaatcgaacttggagcttcttaggatctcgttactgctgatacagagctggctcgagcctgtgcaactgcttaggtcagtctttgctaattccctggtgtatggcgcatccgatagtaatgtgtataggcatcttaaggaccttgaagaaggtatccaaactctgatgtggaggttagaagacggctcaccgcgaactggtcagatttttaatcagagctactcaaaattcgatacgaaatctcacaacgacgacgccctgcttaagaactacggccttctgtactgtttccgaaaagatatggataaagtcgagacgtttctaaggatcgtgcagtgccgatctgtggaaggatcatgcgggttctag

SEQ ID NO: 212594 - DNA, 609 bp, Artificial Sequence
  derived and/or modified sequence
atggcagccggttcccgtacttccttactgttggccttcggacttctgtgtttgtcttggttgcaggaagggtcagcattccccaccatacctctttcccgcctcttcgacaatgctatgctgcgcgcccgcagattatatcagctggcgtacgacacgtaccaagaattcaatccccaaacaagcctatgtttctctgaaagcattccgacaccgagcaatcgggtaaagacccagcagaagtcaaacctggagctcttgagaatctccctcctgctgattcagtcctggcttgaacccgtgcaattgctcagaagcgtgttcgccaattcactcgtctatggtgcctcagacagcaatgtgtatcgtcatctgaaagacttggaggaaggcatccagacactaatgtggcgcttggaagatggatcaccccgcaccggtcagatcttcaatcagagttactcaaagtttgacacaaaaagtcataatgacgacgcgctgctgaagaactacggattgttgtactgtttcagaaaagatatggataaggtggaaactttcctgcgcatcgtgcaatgtcgttcagtggagggctcttgcggcttctag

SEQ ID NO: 212595 - DNA, 609 bp, Artificial Sequence
  derived and/or modified sequence
atggccgccggtagccgcacatcacttctcctcgcttttgggctcctttgcctctcatggctacaggagggaagtgcctttccaaccatcccactatctcgtctgttcgacaatgccatgcttagagcaagacggctgtaccaactggcctatgatacataccaggaatttaacccacaaacttctctttgttttagtgagtccattcccacaccatctaatcgcgtgaaaacacagcagaaatccaaccttgaactgctgcggatcagcctactacttattcagagttggctggagccagtacaattgcttaggtcagtgttcgcgaacagtttggtgtatggtgcttccgattctaacgtgtataggcatctgaaagacctggaggagggcatacagaccttaatgtggcggttagaagacggatccccccgaacgggtcagatctttaaccagtcctacagcaagtttgataccaaatcccataatgacgatgcgcttctgaaaaactacgggctgttatactgtttccgtaaagatatggacaaagttgagacatttcttaggattgtgcaatgcaggtctgtggagggatcatgcggcttctag

SEQ ID NO: 212596 - RNA, 609 nt, Artificial Sequence
  derived and/or modified sequence
auggcagccgguucccguacuuccuuacuguuggccuucggacuucuguguuugucuugguugcaggaagggucagcauuccccaccauaccucuuucccgccucuucgacaaugcuaugcugcgcgcccgcagauuauaucagcuggcguacgacacguaccaagaauucaauccccaaacaagccuauguuucucugaaagcauuccgacaccgagcaaucggguaaagacccagcagaagucaaaccuggagcucuugagaaucucccuccugcugauucaguccuggcuugaacccgugcaauugcucagaagcguguucgccaauucacucgucuauggugccucagacagcaauguguaucgucaucugaaagacuuggaggaaggcauccagacacuaauguggcgcuuggaagauggaucaccccgcaccggucagaucuucaaucagaguuacucaaaguuugacacaaaaagucauaaugacgacgcgcugcugaagaacuacggauuguuguacuguuucagaaaagauauggauaagguggaaacuuuccugcgcaucgugcaaugucguucaguggagggcucuugcggcuucuag

SEQ ID NO: 212597 - RNA, 609 nt, Artificial Sequence
  derived and/or modified sequence
auggccgccgguagccgcacaucacuucuccucgcuuuugggcuccuuugccucucauggcuacaggagggaagugccuuuccaaccaucccacuaucucgucuguucgacaaugccaugcuuagagcaagacggcuguaccaacuggccuaugauacauaccaggaauuuaacccacaaacuucucuuuguuuuagugaguccauucccacaccaucuaaucgcgugaaaacacagcagaaauccaaccuugaacugcugcggaucagccuacuacuuauucagaguuggcuggagccaguacaauugcuuaggucaguguucgcgaacaguuugguguauggugcuuccgauucuaacguguauaggcaucugaaagaccuggaggagggcauacagaccuuaauguggcgguuagaagacggauccccccgaacgggucagaucuuuaaccaguccuacagcaaguuugauaccaaaucccauaaugacgaugcgcuucugaaaaacuacgggcuguuauacuguuuccguaaagauauggacaaaguugagacauuucuuaggauugugcaaugcaggucuguggagggaucaugcggcuucuag

SEQ ID NO: 212598 - protein, 256 aa, Artificial Sequence
  derived and/or modified sequence
MAAGSRTSLLLAFGLLCLSWLQEGSAFPTIPLSRLFDNAMLRARRLYQLAYDTYQEFEEAYILKEQKYSFLQNPQTSLCFSESIPTPSNRVKTQQKSNLELLRISLLLIQSWLEPVQLLRSVFANSLVYGASDSNVYRHLKDLEEGIQTLMWVRVAPGIPNPGAPLASRDWGEKHCCPLFSSQALTQENSPYSSFPLVNPPGLSLQPGGEGGKWMNERGREQCPSAWPLLLFLHFAEAGRWQPPDWADLQSVLQQV

SEQ ID NO: 212599 - DNA, 771 bp, Artificial Sequence
  derived and/or modified sequence
atggccgccggcagcagaaccagcctgctgctggccttcggcctgctgtgcctgagctggctgcaggagggcagcgccttccccaccatccccctgagcagactgttcgacaacgccatgctgagagccagaagactgtaccagctggcctacgacacctaccaggagttcgaggaggcctacatcctgaaggagcagaagtacagcttcctgcagaacccccagaccagcctgtgcttcagcgagagcatccccacccccagcaacagagtgaagacccagcagaagagcaacctggagctgctgagaatcagcctgctgctgatccagagctggctggagcccgtgcagctgctgagaagcgtgttcgccaacagcctggtgtacggcgccagcgacagcaacgtgtacagacacctgaaggacctggaggagggcatccagaccctgatgtgggtgagagtggcccccggcatccccaaccccggcgcccccctggccagcagagactggggcgagaagcactgctgccccctgttcagcagccaggccctgacccaggagaacagcccctacagcagcttccccctggtgaacccccccggcctgagcctgcagcccggcggcgagggcggcaagtggatgaacgagagaggcagagagcagtgccccagcgcctggcccctgctgctgttcctgcacttcgccgaggccggcagatggcagccccccgactgggccgacctgcagagcgtgctgcagcaggtgtag

SEQ ID NO: 212600 - DNA, 771 bp, Artificial Sequence
  derived and/or modified sequence
atggctgccggctcaaggacatccttactgctcgcctttgggctgctgtgcctctcttggctccaggaaggctctgcttttccaacaatccccctttctagactgtttgataacgcaatgctgagagcacgccgcctctatcaactcgcctacgacacgtatcaggaattcgaggaagcgtacatcctgaaggagcagaaatacagttttctccaaaatccccagacctctctgtgtttttcggaatctataccgaccccctcaaaccgggtgaagacccagcagaagtcaaatctggagctcctgcgcatctctctattgctaatccagtcgtggctcgaacctgtacagctcctgcgatcggtgttcgccaattctctcgtgtacggcgcctcggactcaaatgtgtatcgtcacctgaaggatctggaagaaggcatacagacattgatgtgggtacgcgttgcccctggcatcccaaatcccggagcccccctggcatctagagactggggagagaaacattgttgtccactgttctcctcccaggcgttaacacaagagaattccccctattcttctttccccttggtgaatccaccaggattatctctgcaaccagggggcgaaggtggaaagtggatgaacgagcgcggacgcgaacaatgcccgtccgcttggcctttacttctgtttctgcacttcgcggaagctggccgttggcagccacccgactgggctgatcttcagtccgtgcttcagcaggtgtag

SEQ ID NO: 212601 - DNA, 771 bp, Artificial Sequence
  derived and/or modified sequence
atggctgctggcagcaggaccagcctgctgctggccttcggcctgctgtgcctgtcctggctgcaggagggcagcgccttccccaccatccccctgagccggctgtttgacaatgccatgctgcgggcccggcggctgtaccagctggcctatgacacctaccaggagtttgaggaggcctacatcctgaaggagcagaagtacagcttcctgcagaacccccagaccagcctgtgcttcagcgagagcatccccacccccagcaacagagtgaagacccagcagaagagcaacctggagctgctgcgcatcagcctgctgctgatccagagctggctggagcctgtgcagctgctgcggtctgtgtttgccaacagcctggtgtatggagccagtgacagcaatgtgtaccgccacctgaaggacctggaggagggcatccagaccctgatgtgggtgcgggtggcccctggcatccccaaccctggggcccccctggccagccgggactggggcgagaagcactgctgccccctcttcagcagccaggccctgacccaggagaacagcccctacagcagcttccccctggtgaaccccccaggcctgagcctgcagcctggaggagagggcggcaagtggatgaatgaaagaggccgggagcagtgccccagcgcctggcccctgctgctcttcctgcactttgctgaggccggccgctggcagcccccagactgggccgacctgcagagcgtgctgcagcaggtgtag

SEQ ID NO: 212602 - DNA, 771 bp, Artificial Sequence
  derived and/or modified sequence
atggccgccggcagccggaccagcctgctgctggccttcggcctgctctgcctctcctggctgcaggagggaagtgcgttccccacgatcccactgagtcgccttttcgataatgctatgctcagagccaggagactctaccagctcgcatatgatacctatcaggaattcgaagaagcttatatcctgaaggagcaaaagtactctttcctgcaaaaccctcagaccagcctatgtttctctgagagcatcccaacaccaagtaaccgcgtaaagacacagcaaaagagtaacctagaactcctgaggataagcctgctgctaatccagtcctggctggagcccgtgcaactgctgaggtccgtctttgcgaattcactcgtgtatggggcatctgattcaaatgtgtacagacacctgaaggatctggaggagggaattcagacgttaatgtgggttcgggtggcgccagggattcccaatccaggagccccgctcgcttcccgtgactggggcgagaaacactgctgtcctctgtttagctcacaggctctgactcaggaaaactctccttattcctctttccctttggtcaatccacctggcctctccctgcagcccggaggtgaaggcggcaaatggatgaatgaacgaggtcgggagcaatgcccaagcgcctggcccctgttgctatttctccactttgcggaagctggaaggtggcaaccccccgactgggcggatctccagagcgtccttcagcaagtttag

SEQ ID NO: 212603 - DNA, 1138 bp, Artificial Sequence
  derived and/or modified sequence
gagaaacaggtgaggagaagcagcgagagagaaggggccaggtataaaaagggcccacaagagaccagctcaaggatcccaaggcccaactccccgaaccactcagggtcctgtggacagctcacctagcggcaatggctgcaggctcccggacgtccctgctcctggcttttggcctgctctgcctgtcctggcttcaagagggcagtgccttcccaaccattcccttatccaggctttttgacaacgctatgctccgcgcccgtcgcctgtaccagctggcatatgacacctatcaggagtttgaagaagcctatatcctgaaggagcagaagtattcattcctgcagaacccccagacctccctctgcttctcagagtctattccaacaccttccaacagggtgaaaacgcagcagaaatctaacctagagctgctccgcatctccctgctgctcatccagtcatggctggagcccgtgcagctcctcaggagcgtcttcgccaacagcctggtgtatggcgcctcggacagcaacgtctatcgccacctgaaggacctagaggaaggcatccaaacgctgatgtgggtgagggtggcaccagggatccccaatcctggggccccactggcttccagggactggggagagaaacactgctgccctctttttagcagtcaggcgctgacccaagagaactcaccgtattcttcatttcccctcgtgaatcctccaggcctttctctacaacctggaggggagggaggaaaatggatgaatgagagagggagggaacagtgcccaagcgcttggcctctccttctcttccttcactttgcagaggctggaagatggcagcccccggactgggcagatcttcaatcagtcctacagcaagtttgacacaaaatcgcacaacgatgacgcactgctcaagaactacgggctgctctactgcttcaggaaggacatggacaaggtcgagacattcctgcgcatcgtgcagtgccgctctgtggagggcagctgtggcttctagctgcccgggtggcatccctgtgacccctccccagtgcctctcctggtcgtggaaggtgctactccagtgcccaccagccttgtcctaataaaattaa

SEQ ID NO: 212604 - DNA, 771 bp, Artificial Sequence
  derived and/or modified sequence
atggccgctggcagccgaacctccctactcctcgcctttggccttctctgcctttcatggctgcaagaaggttctgcattccccaccatcccgctgagtcgactttttgataatgccatgctaagggccagacggctctaccagctcgcttatgacacctatcaagagttcgaagaggcctatatcctgaaagagcagaagtatagctttctgcagaatccgcagaccagcctttgcttcagcgagtctattccaaccccatccaatagagtaaagactcagcagaagtccaacctagagctgctgaggatcagtctactgctgatccagtcttggctcgagcccgttcaattgctcaggtccgtgttcgctaattctctggtgtacggagcttccgactccaacgtgtatcgacacctgaaggatctggaagagggcattcagaccctgatgtgggtaagagtcgccccagggatccctaacccgggtgccccactggcaagcagagactggggagagaagcactgttgcccactgttcagttcgcaggcacttacacaggagaattccccatatagttcttttcctttggtgaaccctcctggtctcagcctgcagcctggtggagaggggggaaaatggatgaatgagcgagggcgagagcagtgccctagcgcctggccattgctgctgtttttacacttcgcggaggcaggccgatggcagccaccagattgggcagatctacaaagcgtgttgcaacaggtatag

SEQ ID NO: 212605 - DNA, 771 bp, Artificial Sequence
  derived and/or modified sequence
atggcagcaggcagccgtacctcacttttgctagcctttggcttattatgtctgagctggcttcaggaaggctcagcgtttcccaccatacctcttagccggctgtttgacaacgcaatgttgcgagctaggagactttaccaacttgcctatgacacttatcaggagtttgaggaagcctatatattgaaagagcaaaaatattcgttcctacagaacccccagacctctctgtgtttctccgagagcatccctacgcctagcaatcgcgtaaaaacacagcaaaagagtaatttggaactactgaggatatcattacttctgatccaatcgtggctggagccagtgcagctgttacggagtgtcttcgctaactctctggtttatggagcgtccgacagcaacgtgtaccgccatctcaaagatttggaggagggaattcagacactgatgtgggttagggttgccccaggcattcccaatcctggcgccccccttgcatctagggactggggcgagaaacactgttgtcctttattttcgagccaggccctcacccaggagaattccccttactccagctttcccctcgttaatccaccgggtctgagtttgcaaccaggcggagaggggggcaaatggatgaatgaacggggacgggaacaatgcccttctgcgtggcccctcttgttatttctgcactttgccgaagctgggcggtggcaaccccctgactgggccgatttgcagtctgtgctgcagcaggtgtag

SEQ ID NO: 212606 - DNA, 771 bp, Artificial Sequence
  derived and/or modified sequence
atggccgccggatcccgtaccagtctgttattggcattcggattgttatgtctgtcatggctgcaagaaggatccgcattcccaacaatccccctttccaggctgttcgataacgcgatgctccgcgcccgcaggctgtatcagcttgcatatgacacttatcaagagttcgaagaagcctacatcttgaaagaacagaaatactctttcctgcaaaacccccagacgagtctttgtttctctgaatctatcccgacacccagcaatagagttaaaacccagcagaaatctaaccttgaacttctccggatttcgttattgcttatccagtcctggcttgaaccagttcagcttcttaggagtgtgtttgccaacagcttggtttacggtgcatccgactccaacgtgtatcgacacctgaaagatttagaagagggaatccagactctcatgtgggttagggttgcccctggcatccccaaccctggcgctcctctggcatcgcgtgattggggagaaaaacactgttgcccgctgttttcctctcaggccctcactcaggagaattccccatattcatcttttccactggttaacccaccaggcttatccttacagcctggcggggaggggggaaaatggatgaacgaacgaggcagagagcagtgccccagcgcatggccattgttgctgttcttgcattttgcggaagctgggaggtggcagcctcctgactgggcagaccttcaatcagtgttacaacaggtgtag

SEQ ID NO: 212607 - RNA, 771 nt, Artificial Sequence
  derived and/or modified sequence
auggcagcaggcagccguaccucacuuuugcuagccuuuggcuuauuaugucugagcuggcuucaggaaggcucagcguuucccaccauaccucuuagccggcuguuugacaacgcaauguugcgagcuaggagacuuuaccaacuugccuaugacacuuaucaggaguuugaggaagccuauauauugaaagagcaaaaauauucguuccuacagaacccccagaccucucuguguuucuccgagagcaucccuacgccuagcaaucgcguaaaaacacagcaaaagaguaauuuggaacuacugaggauaucauuacuucugauccaaucguggcuggagccagugcagcuguuacggagugucuucgcuaacucucugguuuauggagcguccgacagcaacguguaccgccaucucaaagauuuggaggagggaauucagacacugauguggguuaggguugccccaggcauucccaauccuggcgccccccuugcaucuagggacuggggcgagaaacacuguuguccuuuauuuucgagccaggcccucacccaggagaauuccccuuacuccagcuuuccccucguuaauccaccgggucugaguuugcaaccaggcggagaggggggcaaauggaugaaugaacggggacgggaacaaugcccuucugcguggccccucuuguuauuucugcacuuugccgaagcugggcgguggcaacccccugacugggccgauuugcagucugugcugcagcagguguag

SEQ ID NO: 212608 - RNA, 771 nt, Artificial Sequence
  derived and/or modified sequence
auggccgccggaucccguaccagucuguuauuggcauucggauuguuaugucugucauggcugcaagaaggauccgcauucccaacaaucccccuuuccaggcuguucgauaacgcgaugcuccgcgcccgcaggcuguaucagcuugcauaugacacuuaucaagaguucgaagaagccuacaucuugaaagaacagaaauacucuuuccugcaaaacccccagacgagucuuuguuucucugaaucuaucccgacacccagcaauagaguuaaaacccagcagaaaucuaaccuugaacuucuccggauuucguuauugcuuauccaguccuggcuugaaccaguucagcuucuuaggaguguguuugccaacagcuugguuuacggugcauccgacuccaacguguaucgacaccugaaagauuuagaagagggaauccagacucucauguggguuaggguugccccuggcauccccaacccuggcgcuccucuggcaucgcgugauuggggagaaaaacacuguugcccgcuguuuuccucucaggcccucacucaggagaauuccccauauucaucuuuuccacugguuaacccaccaggcuuauccuuacagccuggcggggaggggggaaaauggaugaacgaacgaggcagagagcagugccccagcgcauggccauuguugcuguucuugcauuuugcggaagcugggagguggcagccuccugacugggcagaccuucaaucaguguuacaacagguguag

SEQ ID NO: 212609 - protein, 245 aa, Artificial Sequence
  derived and/or modified sequence
MAAGSRTSLLLAFGLLCLSWLQEGSAFPTIPLSRLFDNAMLRARRLYQLAYDTYQEFEEAYILKEQKYSFLQNPQTSLCFSESIPTPSNRVKTQQKSNLELLRISLLLIQSWLEPVQLLRSVFANSLVYGASDSNVYRHLKDLEEGIQTLIGWKMAAPGLGRSSISPTASLTQNRTTMTHCSRTTGCSTASGRTWTRSRHSCASCSAALWRAAVASSCPGGIPVTPPQCLSWSWKVLLQCPPALS

SEQ ID NO: 212610 - DNA, 738 bp, Artificial Sequence
  derived and/or modified sequence
atggccgccggcagcagaaccagcctgctgctggccttcggcctgctgtgcctgagctggctgcaggagggcagcgccttccccaccatccccctgagcagactgttcgacaacgccatgctgagagccagaagactgtaccagctggcctacgacacctaccaggagttcgaggaggcctacatcctgaaggagcagaagtacagcttcctgcagaacccccagaccagcctgtgcttcagcgagagcatccccacccccagcaacagagtgaagacccagcagaagagcaacctggagctgctgagaatcagcctgctgctgatccagagctggctggagcccgtgcagctgctgagaagcgtgttcgccaacagcctggtgtacggcgccagcgacagcaacgtgtacagacacctgaaggacctggaggagggcatccagaccctgatcggctggaagatggccgcccccggcctgggcagaagcagcatcagccccaccgccagcctgacccagaacagaaccaccatgacccactgcagcagaaccaccggctgcagcaccgccagcggcagaacctggaccagaagcagacacagctgcgccagctgcagcgccgccctgtggagagccgccgtggccagcagctgccccggcggcatccccgtgacccccccccagtgcctgagctggagctggaaggtgctgctgcagtgcccccccgccctgagctag

SEQ ID NO: 212611 - DNA, 738 bp, Artificial Sequence
  derived and/or modified sequence
atggccgccggctctcgaacatcacttctgctggcatttgggcttctgtgcctttcttggctacaagaaggaagtgccttccccaccattcccctttccagactgttcgataacgcgatgcttcgggcaaggagattataccagctggcctacgacacatatcaggagtttgaggaggcatacatcctgaaagaacaaaaatacagttttcttcagaatccgcaaacatccctttgcttctcagagtcaattcccactccctctaaccgcgtgaaaacccagcagaaatcaaatttagagctgctgaggatcagtctgctacttattcagagctggttggaacccgtgcaattgttaagatccgtcttcgccaacagtcttgtgtatggtgcgtctgacagcaacgtctaccgtcacctgaaagatctggaagagggcatccagacactgattggctggaagatggcagcccctgggctcggtcggtcctcgattagtcccactgcatccctgacccagaatagaaccaccatgactcattgctccaggaccaccggatgctcaaccgcttccggcaggacatggactcggtctcggcactcgtgtgcttcttgttcagccgcactatggagggctgccgtcgcttcctcttgtccaggtggcataccagtgaccccaccccagtgtctatcctggtcctggaaggtcctcctccaatgtccaccagcactgagctag

SEQ ID NO: 212612 - DNA, 738 bp, Artificial Sequence
  derived and/or modified sequence
atggctgctggcagcaggaccagcctgctgctggccttcggcctgctgtgcctgtcctggctgcaggagggcagcgccttccccaccatccccctgagccggctgtttgacaatgccatgctgcgggcccggcggctgtaccagctggcctatgacacctaccaggagtttgaggaggcctacatcctgaaggagcagaagtacagcttcctgcagaacccccagaccagcctgtgcttcagcgagagcatccccacccccagcaacagagtgaagacccagcagaagagcaacctggagctgctgcgcatcagcctgctgctgatccagagctggctggagcctgtgcagctgctgcggtctgtgtttgccaacagcctggtgtatggagccagtgacagcaatgtgtaccgccacctgaaggacctggaggagggcatccagaccctgattggctggaagatggccgcccctggcctgggccgcagcagcatcagccccacagccagcctgacccagaacagaaccaccatgacccactgcagcaggaccaccggctgcagcacagccagcggccgcacctggaccaggagccgccacagctgtgccagctgcagcgctgccctgtggagggctgctgtggccagcagctgccctgggggcatccctgtgaccccaccccagtgcctgtcctggagctggaaggtgctgctgcagtgccccccagccctgtcctag

SEQ ID NO: 212613 - DNA, 738 bp, Artificial Sequence
  derived and/or modified sequence
atggccgccggcagccggaccagcctgctgctggccttcggcctgttgtgcctgtcttggttgcaggagggatctgcctttccaaccatacctttgagccgattgttcgacaatgctatgcttcgcgcaaggcggttataccaactggcctacgatacctatcaggagtttgaagaggcgtacatcctgaaggagcagaagtactcctttttgcaaaaccctcagaccagtctttgtttttccgagagcattcccactcctagtaatagggttaaaacccagcagaagtctaaccttgaactcctacgaatatcactgcttttgatccagtcatggctggagccagtgcagcttttgagaagcgtcttcgccaatagtcttgtatatggggccagtgatagcaatgtgtaccggcacctgaaggacctcgaggagggaatccagacgttgattggatggaaaatggccgccccaggtctcggccggagctcgatatctccaactgcttctctgactcaaaacaggactacaatgacccattgtagccgcaccacagggtgttccactgcctcaggcagaacttggaccagaagcagacatagctgcgcctcgtgttctgcggccctttggcgcgcagctgtggccagcagttgtcccggcggcattcccgttacccctccgcagtgtctgtcctggagctggaaggtgttattacagtgccctcctgctctgtcctag

SEQ ID NO: 212614 - DNA, 794 bp, Artificial Sequence
  derived and/or modified sequence
ccgaaccactcagggtcctgtggacagctcacctagcggcaatggctgcaggctcccggacgtccctgctcctggcttttggcctgctctgcctgtcctggcttcaagagggcagtgccttcccaaccattcccttatccaggctttttgacaacgctatgctccgcgcccgtcgcctgtaccagctggcatatgacacctatcaggagtttgaagaagcctatatcctgaaggagcagaagtattcattcctgcagaacccccagacctccctctgcttctcagagtctattccaacaccttccaacagggtgaaaacgcagcagaaatctaacctagagctgctccgcatctccctgctgctcatccagtcatggctggagcccgtgcagctcctcaggagcgtcttcgccaacagcctggtgtatggcgcctcggacagcaacgtctatcgccacctgaaggacctagaggaaggcatccaaacgctgataggctggaagatggcagcccccggactgggcagatcttcaatcagtcctacagcaagtttgacacaaaatcgcacaacgatgacgcactgctcaagaactacgggctgctctactgcttcaggaaggacatggacaaggtcgagacattcctgcgcatcgtgcagtgccgctctgtggagggcagctgtggcttctagctgcccgggtggcatccctgtgacccctccccagtgcctctcctggtcgtggaaggtgctactccagtgcccaccagccttgtcctaataaaattaagttgca

SEQ ID NO: 212615 - DNA, 738 bp, Artificial Sequence
  derived and/or modified sequence
atggctgcgggttctagaacgtctctgctgctggctttcggcctcctgtgcctttcttggcttcaggaagggtccgcattccccacaattcccctcagccgcctgttcgacaatgcgatgttgagagcccgacgtctatatcagctggcgtacgatacataccaagaatttgaggaggcctacatcctgaaagagcagaagtattcatttctgcagaatccccagactagcctgtgtttcagtgaaagtatcccaactccttccaatcgggtgaagacccagcagaagtccaacctagagctgctcagaatcagcctcctgctgatccagagctggctagagcctgtgcagcttctgaggtccgtcttcgcaaatagcctggtttatggcgcttctgactccaacgtgtatagacatcttaaagacctggaggaaggcatacagactttgattggctggaagatggcggctcctggtttaggaagaagtagtatctcacccacggcttctctgactcaaaaccgcacgacaatgacccactgctcccgcacgaccggttgctccacggccagcggacgtacctggactcgaagtcgccactcgtgcgccagttgttcagctgcactttggcgcgctgctgtggcctctagctgcccaggtggtatcccagttacccctccccaatgcttatcctggtcttggaaggtgctcttgcaatgccctcccgctctttcatag

SEQ ID NO: 212616 - DNA, 738 bp, Artificial Sequence
  derived and/or modified sequence
atggcggctggctcccggactagcttattacttgctttcggactgttgtgcctcagctggctgcaggagggctccgccttccctacaatcccactttctcggttgtttgacaacgccatgctgagggcgagacgactttatcagctggcttatgatacataccaggagtttgaagaggcctatatccttaaagaacagaaatactcctttcttcaaaacccacagacatctctgtgtttttccgagtctatccccaccccttcaaatcgcgtgaaaacacaacaaaagagcaacctcgaactattaagaatcagtctcctcctcattcagtcatggctcgaaccagtgcaactgctgaggtccgtgtttgctaatagtttagtctatggggcttccgactcaaatgtgtatcgacacctaaaggacttggaggaaggcatccagacattaatcggctggaaaatggccgcacctgggctcggcagatcttcaatctcccctaccgcctctctgacccagaaccgaaccactatgacccattgttctcgaaccactggttgcagtactgcctccgggcgcacttggacaaggtcccgccacagttgtgcgagttgttctgccgcgttatggcgggcggcagtagccagcagctgcccaggcgggatccctgtcactcccccacaatgcctatcatggtcttggaaagtgctgcttcagtgtcctccagcactctcttag

SEQ ID NO: 212617 - DNA, 738 bp, Artificial Sequence
  derived and/or modified sequence
atggcggcaggctcccgtacatccctccttctcgcgtttggcctcctgtgcctctcgtggctgcaggaagggtcagcctttccgaccatcccgctgagccgactgttcgacaacgcaatgctgagggctagacggctgtatcaactggcgtacgacacctatcaagaatttgaagaagcctacattctaaaggaacaaaagtactcctttctacaaaacccccagacctctctgtgcttttccgaatctatacctacaccctcaaaccgagtgaagacccagcagaagagtaatctcgaactattaagaatcagtctcctcctcattcagtcatggctcgaaccagtgcaactgctgaggtccgtgtttgctaatagtttagtctatggggcttccgactcaaatgtgtatcgacacctaaaggacttggaggaaggcatccagacattaatcggctggaaaatggccgcacctgggctcggcagatcttcaatctcccctaccgcctctctgacccagaaccgaaccactatgacccattgttctcgaaccactggttgcagtactgcctccgggcgcacttggacaaggtcccgccactcttgcgccagctgttccgctgcactctggagagcagccgtcgcgtcatcctgtcctgggggtattcccgtgactcccccacagtgtttgtcctggtcttggaaggtccttctccaatgtccacccgccttgtcttag

SEQ ID NO: 212618 - RNA, 738 nt, Artificial Sequence
  derived and/or modified sequence
auggcggcuggcucccggacuagcuuauuacuugcuuucggacuguugugccucagcuggcugcaggagggcuccgccuucccuacaaucccacuuucucgguuguuugacaacgccaugcugagggcgagacgacuuuaucagcuggcuuaugauacauaccaggaguuugaagaggccuauauccuuaaagaacagaaauacuccuuucuucaaaacccacagacaucucuguguuuuuccgagucuauccccaccccuucaaaucgcgugaaaacacaacaaaagagcaaccucgaacuauuaagaaucagucuccuccucauucagucauggcucgaaccagugcaacugcugagguccguguuugcuaauaguuuagucuauggggcuuccgacucaaauguguaucgacaccuaaaggacuuggaggaaggcauccagacauuaaucggcuggaaaauggccgcaccugggcucggcagaucuucaaucuccccuaccgccucucugacccagaaccgaaccacuaugacccauuguucucgaaccacugguugcaguacugccuccgggcgcacuuggacaaggucccgccacaguugugcgaguuguucugccgcguuauggcgggcggcaguagccagcagcugcccaggcgggaucccugucacucccccacaaugccuaucauggucuuggaaagugcugcuucaguguccuccagcacucucuuag

SEQ ID NO: 212619 - RNA, 738 nt, Artificial Sequence
  derived and/or modified sequence
auggcggcaggcucccguacaucccuccuucucgcguuuggccuccugugccucucguggcugcaggaagggucagccuuuccgaccaucccgcugagccgacuguucgacaacgcaaugcugagggcuagacggcuguaucaacuggcguacgacaccuaucaagaauuugaagaagccuacauucuaaaggaacaaaaguacuccuuucuacaaaacccccagaccucucugugcuuuuccgaaucuauaccuacacccucaaaccgagugaagacccagcagaagaguaaucucgaacuauuaagaaucagucuccuccucauucagucauggcucgaaccagugcaacugcugagguccguguuugcuaauaguuuagucuauggggcuuccgacucaaauguguaucgacaccuaaaggacuuggaggaaggcauccagacauuaaucggcuggaaaauggccgcaccugggcucggcagaucuucaaucuccccuaccgccucucugacccagaaccgaaccacuaugacccauuguucucgaaccacugguugcaguacugccuccgggcgcacuuggacaaggucccgccacucuugcgccagcuguuccgcugcacucuggagagcagccgucgcgucauccuguccuggggguauucccgugacucccccacaguguuuguccuggucuuggaagguccuucuccaauguccacccgccuugucuuag

SEQ ID NO: 212620 - protein, 202 aa, Artificial Sequence
  derived and/or modified sequence
MATGSRTSLLLAFGLLCLPWLQEGSAFPTIPLSRLFDNAMLRAHRLHQLAFDTYQEFNPQTSLCFSESIPTPSNREETQQKSNLELLRISLLLIQSWLEPVQFLRSVFANSLVYGASDSNVYDLLKDLEEGIQTLMGRLEDGSPRTGQIFKQTYSKFDTNSHNDDALLKNYGLLYCFRKDMDKVETFLRIVQCRSVEGSCGF

SEQ ID NO: 212621 - DNA, 609 bp, Artificial Sequence
  derived and/or modified sequence
atggccaccggcagcagaaccagcctgctgctggccttcggcctgctgtgcctgccctggctgcaggagggcagcgccttccccaccatccccctgagcagactgttcgacaacgccatgctgagagcccacagactgcaccagctggccttcgacacctaccaggagttcaacccccagaccagcctgtgcttcagcgagagcatccccacccccagcaacagagaggagacccagcagaagagcaacctggagctgctgagaatcagcctgctgctgatccagagctggctggagcccgtgcagttcctgagaagcgtgttcgccaacagcctggtgtacggcgccagcgacagcaacgtgtacgacctgctgaaggacctggaggagggcatccagaccctgatgggcagactggaggacggcagccccagaaccggccagatcttcaagcagacctacagcaagttcgacaccaacagccacaacgacgacgccctgctgaagaactacggcctgctgtactgcttcagaaaggacatggacaaggtggagaccttcctgagaatcgtgcagtgcagaagcgtggagggcagctgcggcttctag

SEQ ID NO: 212622 - DNA, 609 bp, Artificial Sequence
  derived and/or modified sequence
atggcaacagggagtcgcacctctctgctgctggcctttggactgctttgcttaccctggctccaggagggttccgccttccccactattcctctgtctagattattcgataacgctatgctccgcgcccatagactgcatcagctggcttttgatacttaccaggagttcaacccacagaccagcctgtgttttagcgagagtattcctaccccaagtaacagggaggaaacacagcagaaatccaacttagaactgctgagaatttcccttctccttattcaatcttggctggaaccagtccagttcttgagaagtgttttcgctaactccctggtgtacggggccagcgatagcaatgtctacgatctactgaaagatctggaagagggtatacaaaccttaatgggtcgcctggaagacggatccccgcgcactggtcagattttcaaacagacatattctaagtttgacaccaacagtcataacgacgacgccctgctgaaaaattacgggctgctgtattgttttagaaaagacatggataaagtggaaacgttccttcgcatcgttcaatgtcgcagcgtagagggctcatgcggattttag

SEQ ID NO: 212623 - DNA, 609 bp, Artificial Sequence
  derived and/or modified sequence
atggccaccggcagcaggaccagcctgctgctggccttcggcctgctgtgcctgccctggctgcaggagggcagcgccttccccaccatccccctgagccggctgtttgacaatgccatgctgcgggcccaccggctgcaccagctggcctttgacacctaccaggagttcaacccccagaccagcctgtgcttcagcgagagcatccccacccccagcaaccgggaggagacccagcagaagagcaacctggagctgctgcgcatcagcctgctgctgatccagagctggctggagcctgtgcagttcctgcggtctgtgtttgccaacagcctggtgtatggagccagtgacagcaatgtgtatgacctgctgaaggacctggaggagggcatccagaccctgatgggccgcctggaggatggcagccccaggacaggccagatcttcaagcagacctacagcaagtttgacaccaacagccacaatgatgatgccctgctgaagaactacggcctgctgtactgcttcaggaaggacatggacaaggtggagaccttcctgcgcatcgtgcagtgccgctctgtggagggcagctgtggcttctag

SEQ ID NO: 212624 - DNA, 609 bp, Artificial Sequence
  derived and/or modified sequence
atggccaccggcagccggaccagcctgctgctggccttcggcctgctgtgcttgccatggctgcaggagggaagcgcattccccaccatcccgctcagtagactgtttgataatgccatgttgcgggcacatcggctacatcaactggctttcgatacctatcaggaattcaaccctcagacatctctatgtttctccgaaagcatcccaacaccatcaaatagggaggagacgcaacagaagagtaacctggaacttctccggatcagcctgctgctgattcagagctggctggaacccgtgcagttcctgcggtctgtttttgccaactcactcgtttatggcgctagtgatagtaacgtgtacgacctgctgaaggatttggaagaggggatccagactcttatggggagactggaagatggctcccccaggacaggccagatatttaagcagacttattctaagttcgacactaattcacacaatgacgacgccttattgaagaactacggcctcttgtactgctttagaaaagatatggacaaagtggaaacatttctacgtatagtacagtgcagatctgtggagggcagttgcggtttctag

SEQ ID NO: 212625 - DNA, 756 bp, Artificial Sequence
  derived and/or modified sequence
ccgaaccactcagggtcctgtggacagctcacctagctgcaatggctacaggctcccggacgtccctgctcctggcttttggcctgctctgcctgccctggcttcaagagggcagtgccttcccaaccattcccttatccaggctttttgacaacgctatgctccgcgcccatcgtctgcaccagctggcctttgacacctaccaggagtttaacccccagacctccctctgtttctcagagtctattccgacaccctccaacagggaggaaacacaacagaaatccaacctagagctgctccgcatctccctgctgctcatccagtcgtggctggagcccgtgcagttcctcaggagtgtcttcgccaacagcctggtgtacggcgcctctgacagcaacgtctatgacctcctaaaggacctagaggaaggcatccaaacgctgatggggaggctggaagatggcagcccccggactgggcagatcttcaagcagacctacagcaagttcgacacaaactcacacaacgatgacgcactactcaagaactacgggctgctctactgcttcaggaaggacatggacaaggtcgagacattcctgcgcatcgtgcagtgccgctctgtggagggcagctgtggcttctagctgcccgggtggcatccctgtgacccctccccagtgcctctcctggccctggaagttgccactccagtgcccaccagccttgtcctaataaaattaagttgcatca

SEQ ID NO: 212626 - DNA, 609 bp, Artificial Sequence
  derived and/or modified sequence
atggccaccgggtcacgaactagtctgcttctcgcatttggtctgttgtgtctcccatggttacaggaaggaagtgccttccccaccatacctctgtcaaggctctttgacaatgccatgctgagagctcacaggctgcaccagctggcctttgacacctaccaggagttcaacccacagacgtcgctatgctttagtgagtccattcctactcctagcaaccgagaggagactcagcagaagagcaacctggaattgctgcggatttcgctgttactgattcaatcctggctcgagccagtgcaattcctgagatctgtttttgctaacagcttggtttacggagccagtgactctaacgtttacgatctcctaaaggacctggaagaagggatccagacccttatggggagactagaagacggctcaccaaggaccggccaaatctttaagcagacctattctaagtttgatactaacagtcacaacgacgacgcgctgcttaagaattatggcttgctctactgttttcgcaaagatatggacaaggtcgagacttttttacgtatcgtgcagtgtcgatcagttgaggggtcctgtgggttttag

SEQ ID NO: 212627 - DNA, 609 bp, Artificial Sequence
  derived and/or modified sequence
atggctaccgggtccagaacctccttattgctcgccttcggactactgtgcctgccttggctgcaggaaggttctgctttcccaactataccactgtccagattgttcgataatgccatgctcagagcccatcgcctgcaccagcttgcttttgatacgtaccaagaattcaacccacaaacaagtctgtgcttttccgaatctataccaacacccagcaacagagaggagacgcagcaaaagtccaacctcgagcttctcaggatctccctgctgctcattcagtcttggctggagccagtccaattccttcgcagcgtatttgcgaacagccttgtctatggggccagcgattccaatgtgtacgatctcctgaaagatctagaggaaggcatccaaacattgatgggacgtctcgaagatggcagtccaaggacaggacagatcttcaaacagacctattccaaatttgacaccaactcccacaacgacgacgctctcctgaaaaactatggactcctctactgcttccggaaggacatggataaggttgagaccttcctcaggatcgtgcaatgcaggtccgttgaaggatcttgtggattttag

SEQ ID NO: 212628 - DNA, 609 bp, Artificial Sequence
  derived and/or modified sequence
atggctaccgggtccagaacctccttattgctcgccttcggactactgtgcctgccttggctgcaggaaggttctgctttcccaactataccactgtccagattgttcgataatgccatgctcagagcccatcgcctgcaccagcttgcttttgatacgtaccaagaattcaacccacaaacaagtctgtgcttttccgaatctataccaacacccagcaacagagaggagacgcagcaaaagtccaacctcgagcttctcaggatctccctgctgctcattcagtcttggctggagccagttcagtttcttcgctcagtatttgccaactctttagtgtatggcgctagtgatagcaacgtgtatgacttgctgaaagatttggaggaaggcattcagactctgatgggccggctggaagatggatccccacgaactggtcaaattttcaaacagacatacagcaaattcgatacaaactctcacaacgacgacgcactgctgaaaaattacgggttgctctactgttttagaaaagacatggataaggtcgaaacattcctgagaatcgttcagtgcaggtccgtggaaggctcctgcgggttttag

SEQ ID NO: 212629 - DNA, 399 bp, Artificial Sequence
  derived and/or modified sequence
atgctgagccccctgtggctgcagatcagcaagagacccagacccgaggtgagcgtgagcaacgcctgcttcagcagcgccctgcccaccagcaaccccaccagcctgaccctgaagcaccacaacatcttcgtgctgagagtggccctggagatcatccagtacagcgtgcacggcggcagaaacagaaagcccctggaggtgaccagcctggcctacagctgccccgagaactggtggcagaagcagatcggcgtgcagccccccgacgtgcacgccagcgccctgagccccaagccctgcgtgagctggagcagacccctgagcctgctgagcagcaccatcctgttctggaagacccacgacgagagagccgacttcagcaagctgcacagctag

SEQ ID NO: 212630 - DNA, 399 bp, Artificial Sequence
  derived and/or modified sequence
atgcttagtccactgtggttgcagattagcaagaggcctagaccagaggtaagcgtgtctaacgcttgcttctcttctgctctgcctacctctaatccaaccagcctcactctgaaacatcacaatatttttgtgcttcgggtcgcactggagataattcagtactcagtccacggaggcaggaacagaaaaccactcgaagtgacctctcttgcatacagttgccctgaaaattggtggcaaaaacagattggtgtgcagcctcccgacgtgcatgcgtctgcactgtcccctaagccatgtgtttcctggagcaggccactctctctgctgtctagcactattctgttctggaaaacacacgacgaaagggccgatttctcgaagctccatagttag

SEQ ID NO: 212631 - DNA, 399 bp, Artificial Sequence
  derived and/or modified sequence
atgcttagcccgttatggcttcagatcagcaaaagaccacggcctgaagtctctgtgagcaacgcatgcttcagcagtgcgctaccaacctctaaccctacatctctgaccctcaaacatcacaacatcttcgtgttgagggtggcgctggaaataatccaatacagtgtccatgggggtcggaaccgcaagccattagaggtgacgtccttggcctattcttgccctgagaactggtggcaaaaacagataggggtgcaaccgcctgatgtgcacgccagcgctctgagcccaaagccctgcgtgagctggtctaggcctctgtctcttctgtcctcaacgattctcttctggaaaactcacgacgaacgcgcagacttcagtaagcttcactcctag

SEQ ID NO: 212632 - RNA, 609 nt, Artificial Sequence
  derived and/or modified sequence
auggcuaccggguccagaaccuccuuauugcucgccuucggacuacugugccugccuuggcugcaggaagguucugcuuucccaacuauaccacuguccagauuguucgauaaugccaugcucagagcccaucgccugcaccagcuugcuuuugauacguaccaagaauucaacccacaaacaagucugugcuuuuccgaaucuauaccaacacccagcaacagagaggagacgcagcaaaaguccaaccucgagcuucucaggaucucccugcugcucauucagucuuggcuggagccaguccaauuccuucgcagcguauuugcgaacagccuugucuauggggccagcgauuccaauguguacgaucuccugaaagaucuagaggaaggcauccaaacauugaugggacgucucgaagauggcaguccaaggacaggacagaucuucaaacagaccuauuccaaauuugacaccaacucccacaacgacgacgcucuccugaaaaacuauggacuccucuacugcuuccggaaggacauggauaagguugagaccuuccucaggaucgugcaaugcagguccguugaaggaucuuguggauuuuag

SEQ ID NO: 212633 - RNA, 609 nt, Artificial Sequence
  derived and/or modified sequence
auggcuaccggguccagaaccuccuuauugcucgccuucggacuacugugccugccuuggcugcaggaagguucugcuuucccaacuauaccacuguccagauuguucgauaaugccaugcucagagcccaucgccugcaccagcuugcuuuugauacguaccaagaauucaacccacaaacaagucugugcuuuuccgaaucuauaccaacacccagcaacagagaggagacgcagcaaaaguccaaccucgagcuucucaggaucucccugcugcucauucagucuuggcuggagccaguucaguuucuucgcucaguauuugccaacucuuuaguguauggcgcuagugauagcaacguguaugacuugcugaaagauuuggaggaaggcauucagacucugaugggccggcuggaagauggauccccacgaacuggucaaauuuucaaacagacauacagcaaauucgauacaaacucucacaacgacgacgcacugcugaaaaauuacggguugcucuacuguuuuagaaaagacauggauaaggucgaaacauuccugagaaucguucagugcagguccguggaaggcuccugcggguuuuag

SEQ ID NO: 212634 - protein, 177 aa, Artificial Sequence
  derived and/or modified sequence
MATGSRTSLLLAFGLLCLPWLQEGSAFPTIPLSRLFDNAMLRAHRLHQLAFDTYQEFNLELLRISLLLIQSWLEPVQFLRSVFANSLVYGASDSNVYDLLKDLEEGIQTLMGRLEDGSPRTGQIFKQTYSKFDTNSHNDDALLKNYGLLYCFRKDMDKVETFLRIVQCRSVEGSCGF

SEQ ID NO: 212635 - DNA, 534 bp, Artificial Sequence
  derived and/or modified sequence
atggccaccggcagcagaaccagcctgctgctggccttcggcctgctgtgcctgccctggctgcaggagggcagcgccttccccaccatccccctgagcagactgttcgacaacgccatgctgagagcccacagactgcaccagctggccttcgacacctaccaggagttcaacctggagctgctgagaatcagcctgctgctgatccagagctggctggagcccgtgcagttcctgagaagcgtgttcgccaacagcctggtgtacggcgccagcgacagcaacgtgtacgacctgctgaaggacctggaggagggcatccagaccctgatgggcagactggaggacggcagccccagaaccggccagatcttcaagcagacctacagcaagttcgacaccaacagccacaacgacgacgccctgctgaagaactacggcctgctgtactgcttcagaaaggacatggacaaggtggagaccttcctgagaatcgtgcagtgcagaagcgtggagggcagctgcggcttctag

SEQ ID NO: 212636 - DNA, 534 bp, Artificial Sequence
  derived and/or modified sequence
atggcaacagggtctcgaacctcactccttctagctttcggtctactgtgcctgccttggttgcaggaaggcagtgcctttcccactatccccctgagtcgtcttttcgataacgcgatgctgagggcccatagattacatcaactggctttcgacacgtaccaggaattcaacttagagttgttgcggattagcctcttgctgatccagagttggttagaacctgttcagtttcttcgatcagtcttcgcgaatagcctggtatacggggcaagtgattcaaacgtgtatgatctgctcaaagaccttgaggaagggatccagacattgatgggtcggctggaggatggtagtcctaggaccgggcagatctttaagcaaacttacagcaaatttgatacaaattcacataacgacgatgccctcctgaagaattacggactcctctattgtttcaggaaagacatggacaaagtcgagaccttcctgagaattgtccagtgcaggtcagttgaaggaagctgtgggttttag

SEQ ID NO: 212637 - DNA, 534 bp, Artificial Sequence
  derived and/or modified sequence
atggccaccggcagcaggaccagcctgctgctggccttcggcctgctgtgcctgccctggctgcaggagggcagcgccttccccaccatccccctgagccggctgtttgacaatgccatgctgcgggcccaccggctgcaccagctggcctttgacacctaccaggagttcaacctggagctgctgcgcatcagcctgctgctgatccagagctggctggagcctgtgcagttcctgcggtctgtgtttgccaacagcctggtgtatggagccagtgacagcaatgtgtatgacctgctgaaggacctggaggagggcatccagaccctgatgggccgcctggaggatggcagccccaggacaggccagatcttcaagcagacctacagcaagtttgacaccaacagccacaatgatgatgccctgctgaagaactacggcctgctgtactgcttcaggaaggacatggacaaggtggagaccttcctgagaattgtgcagtgccgctctgtggagggcagctgtggcttctag

SEQ ID NO: 212638 - DNA, 534 bp, Artificial Sequence
  derived and/or modified sequence
atggccaccggcagccggaccagcctgctgctggccttcggcctgctgtgcctcccctggctccaggagggctccgcgtttcccacaattcctttaagcaggctttttgacaacgcgatgctacgggctcatcggttgcaccagctcgcattcgatacctaccaagagtttaacttggagctactgcgaatcagcctgcttctgatacaatcgtggctcgaaccagtacagttcttgcggtcagtgttcgccaactcactcgtgtacggtgccagcgactccaacgtatatgacctgctgaaagatctcgaggaagggatccagactcttatgggccggttggaggatgggtctcctagaaccgggcagattttcaaacaaacatactcgaagttcgacacaaattcacataatgatgacgctctcctcaaaaactatggactgctctactgcttccggaaagatatggacaaagtcgagacgttccttaggatcgtgcagtgtcggagtgtggaaggttcatgtgggttttag

SEQ ID NO: 212639 - DNA, 702 bp, Artificial Sequence
  derived and/or modified sequence
aggatcccaaggcccaactccccgaaccactcagggtcctgtggacagctcacctagctgcaatggctacaggctcccggacgtccctgctcctggcttttggcctgctctgcctgccctggcttcaagagggcagtgccttcccaaccattcccttatccaggctttttgacaacgctatgctccgcgcccatcgtctgcaccagctggcctttgacacctaccaggagtttaacctagagctgctccgcatctccctgctgctcatccagtcgtggctggagcccgtgcagttcctcaggagtgtcttcgccaacagcctggtgtacggcgcctctgacagcaacgtctatgacctcctaaaggacctagaggaaggcatccaaacgctgatggggaggctggaagatggcagcccccggactgggcagatcttcaagcagacctacagcaagttcgacacaaactcacacaacgatgacgcactactcaagaactacgggctgctctactgcttcaggaaggacatggacaaggtcgagacattcctgcgcatcgtgcagtgccgctctgtggagggcagctgtggcttctagctgcccgggtggcatccctgtgacccctccccagtgcctctcctggccctggaagttgccactccagtgcccaccagccttgtcctaataaaattaagttgcatca

SEQ ID NO: 212640 - DNA, 534 bp, Artificial Sequence
  derived and/or modified sequence
atggccactggctcaaggaccagcttactgcttgctttcgggttgctgtgcctgccatggctgcaggaagggagcgctttccccactattcctctgtctaggctgtttgacaatgctatgctgcgcgcacacaggctgcaccagctggccttcgatacataccaggagttcaatctggagctgctaaggatctccctcctcttaattcagtcatggctggaaccggtgcaatttttgaggtctgtcttcgccaatagtctcgtctatggcgctagcgactccaacgtgtacgacctgctcaaagatctggaagaaggcattcagactctgatgggtcggctcgaagatggctctccacgaacaggtcagatcttcaagcagacatactcaaagtttgacacaaactctcacaatgatgacgctctgctgaagaattatggcttactgtactgctttcgcaaagatatggacaaagttgagaccttcctgcgcatcgtccagtgccgcagcgtagaagggagttgtggcttctag

SEQ ID NO: 212641 - DNA, 534 bp, Artificial Sequence
  derived and/or modified sequence
atggccactgggtcccggaccagcctcctgcttgctttcggtctgttgtgcctcccttggttgcaggaggggtcggcttttcctactataccgctctctcgtttatttgacaatgctatgcttagagctcatagattacatcagcttgcatttgacacttatcaggaattcaaccttgagctcctccgaatctccctcctccttatccagtcatggctcgaaccggtacaatttttgcgcagcgtcttcgccaattctctcgtttatggggcgtctgattcaaatgtttatgatctcctgaaggatctcgaggagggtatccagacactcatgggcagattagaggacggttctcccagaactggccagatcttcaaacagacctactccaaattcgacaccaattcccacaatgatgatgcactgctgaagaattatggactgctgtactgctttagaaaggatatggacaaagtggagaccttcctgcgcattgtgcaatgccggagcgtcgaggggtcatgcggattttag

SEQ ID NO: 212642 - DNA, 534 bp, Artificial Sequence
  derived and/or modified sequence
atggccactgggtcccggaccagcctcctgcttgctttcggtctgttgtgcctcccttggttgcaggaggggtcggcttttcctactataccgctctctcgtttatttgacaatgctatgcttagagctcatagattacatcagcttgcatttgacacttatcaggaattcaaccttgagctcctccgaatctccctcctccttatccagtcatggctcgaaccggtacaatttttgcgcagcgtcttcgccaattctctcgtttatggggcgtctgattcaaatgtttatgatctcctgaaggacctcgaagaaggaatccagaccttgatgggtcggctcgaggatggcagccctagaacaggccaaatcttcaagcaaacatactccaaatttgatacaaactctcataatgacgatgctctacttaaaaattacggattgctctactgctttcggaaagacatggataaagtcgagacgtttcttagaatcgtgcagtgtagatctgtggagggctcctgtggcttttag

SEQ ID NO: 212643 - RNA, 534 nt, Artificial Sequence
  derived and/or modified sequence
auggccacugggucccggaccagccuccugcuugcuuucggucuguugugccucccuugguugcaggaggggucggcuuuuccuacuauaccgcucucucguuuauuugacaaugcuaugcuuagagcucauagauuacaucagcuugcauuugacacuuaucaggaauucaaccuugagcuccuccgaaucucccuccuccuuauccagucauggcucgaaccgguacaauuuuugcgcagcgucuucgccaauucucucguuuauggggcgucugauucaaauguuuaugaucuccugaaggaucucgaggaggguauccagacacucaugggcagauuagaggacgguucucccagaacuggccagaucuucaaacagaccuacuccaaauucgacaccaauucccacaaugaugaugcacugcugaagaauuauggacugcuguacugcuuuagaaaggauauggacaaaguggagaccuuccugcgcauugugcaaugccggagcgucgaggggucaugcggauuuuag

SEQ ID NO: 212644 - RNA, 534 nt, Artificial Sequence
  derived and/or modified sequence
auggccacugggucccggaccagccuccugcuugcuuucggucuguugugccucccuugguugcaggaggggucggcuuuuccuacuauaccgcucucucguuuauuugacaaugcuaugcuuagagcucauagauuacaucagcuugcauuugacacuuaucaggaauucaaccuugagcuccuccgaaucucccuccuccuuauccagucauggcucgaaccgguacaauuuuugcgcagcgucuucgccaauucucucguuuauggggcgucugauucaaauguuuaugaucuccugaaggaccucgaagaaggaauccagaccuugaugggucggcucgaggauggcagcccuagaacaggccaaaucuucaagcaaacauacuccaaauuugauacaaacucucauaaugacgaugcucuacuuaaaaauuacggauugcucuacugcuuucggaaagacauggauaaagucgagacguuucuuagaaucgugcaguguagaucuguggagggcuccuguggcuuuuag

SEQ ID NO: 212645 - protein, 362 aa, Artificial Sequence
  derived and/or modified sequence
MASGSAGKPTGEAASPAPASAIGGASSQPRKRLVSVCDHCKGKMQLVADLLLLSSEARPVLFEGPASSGAGAESFEQCRDTIIARTKGLSILTHDVQSQLNMGRFGEAGDSLVELGDLVVSLTECSAHAAYLAAVATPGAQPAQPGLVDRYRVTRCRHEVEQGCAVLRATPLADMTPQLLLEVSQGLSRNLKFLTDACALASDKSRDRFSREQFKLGVKCMSTSASALLACVREVKVAPSELARSRCALFSGPLVQAVSALVGFATEPQFLGRAAAVSAEGKAVQTAILGGAMSVVSACVLLTQCLRDLAQHPDGGAKMSDHRERLRNSACAVSEGCTLLSQALRERSSPRTLPPVNSNSVN

SEQ ID NO: 212646 - DNA, 1089 bp, Artificial Sequence
  derived and/or modified sequence
atggccagcggcagcgccggcaagcccaccggcgaggccgccagccccgcccccgccagcgccatcggcggcgccagcagccagcccagaaagagactggtgagcgtgtgcgaccactgcaagggcaagatgcagctggtggccgacctgctgctgctgagcagcgaggccagacccgtgctgttcgagggccccgccagcagcggcgccggcgccgagagcttcgagcagtgcagagacaccatcatcgccagaaccaagggcctgagcatcctgacccacgacgtgcagagccagctgaacatgggcagattcggcgaggccggcgacagcctggtggagctgggcgacctggtggtgagcctgaccgagtgcagcgcccacgccgcctacctggccgccgtggccacccccggcgcccagcccgcccagcccggcctggtggacagatacagagtgaccagatgcagacacgaggtggagcagggctgcgccgtgctgagagccacccccctggccgacatgaccccccagctgctgctggaggtgagccagggcctgagcagaaacctgaagttcctgaccgacgcctgcgccctggccagcgacaagagcagagacagattcagcagagagcagttcaagctgggcgtgaagtgcatgagcaccagcgccagcgccctgctggcctgcgtgagagaggtgaaggtggcccccagcgagctggccagaagcagatgcgccctgttcagcggccccctggtgcaggccgtgagcgccctggtgggcttcgccaccgagccccagttcctgggcagagccgccgccgtgagcgccgagggcaaggccgtgcagaccgccatcctgggcggcgccatgagcgtggtgagcgcctgcgtgctgctgacccagtgcctgagagacctggcccagcaccccgacggcggcgccaagatgagcgaccacagagagagactgagaaacagcgcctgcgccgtgagcgagggctgcaccctgctgagccaggccctgagagagagaagcagccccagaaccctgccccccgtgaacagcaacagcgtgaactag

SEQ ID NO: 212647 - DNA, 1089 bp, Artificial Sequence
  derived and/or modified sequence
atggcaagcggcagcgccggcaaacctaccggagaagccgctagtcctgctcctgcttccgctattggcggagcttcatcccagccaagaaagcgattagtgtcagtgtgcgatcattgtaaaggtaagatgcagctggtggccgacctgttactgttgagttctgaggccagacccgtgctttttgagggccccgccagcagtggagcaggggctgagtcttttgagcagtgccgggacacaatcatagcacggaccaaaggcctgagtatattaacccatgacgtgcagagccagcttaatatgggcaggttcggggaagcgggagacagcctggtggaactgggggacctcgtggtgagcttaaccgagtgctccgcacacgccgcttatctggctgcggtagcaacacccggagcccagcctgcacagcccgggctcgttgatagatatagggtgacccggtgcaggcatgaagttgaacaaggttgtgccgtgctgagggcgactccgttggctgacatgactccacagttgctcctcgaggtgtcacaggggctctctagaaacctgaaattcctcaccgatgcctgtgctctggccagtgacaaaagccgcgatagattcagccgcgaacagttcaagctgggtgtgaaatgcatgtcaacttccgcatcagcgttactcgcttgcgtgagagaggtgaaggtcgccccgtcagagctagcacgtagcagatgcgcactatttagcggccctctagtccaggcagtgagtgcgctggtcggctttgctacagaacctcagtttctcggacgcgcagcagccgtcagcgccgagggcaaagctgttcagaccgcaatcttgggtggggctatgtccgtggtgtcagcctgcgtacttctcacccagtgtcttcgggacctggctcagcatccggacggtggcgctaaaatgtcagaccacagggaacgcctgcgcaactcagcttgtgctgtgtcggagggttgtaccctcctttcccaggccctacgggaaagatctagccccagaacactgccaccagtgaactctaattctgttaattag

SEQ ID NO: 212648 - DNA, 1089 bp, Artificial Sequence
  derived and/or modified sequence
atggccagcggcagcgctgggaagcccaccggggaggccgccagccctgccccagccagcgccatcggcggggccagcagccagcccaggaagaggctggtgtctgtgtgtgaccactgcaagggcaagatgcagctggtggccgacctgctgctgctgagcagcgaggcccggcctgtgctgtttgagggccctgccagcagcggggccggggctgagagctttgagcagtgccgggacaccatcatcgcccggaccaagggcctgagcatcctgacccatgatgtgcagagccagctgaacatgggccgctttggagaggccggggacagcctggtggagctgggggacctggtggtgtccctgacagagtgcagcgcccatgctgcctacctggccgctgtggccacccctggggcccagcctgcccagcccggcctggtggaccgctacagagtgacccgctgcagacatgaggtggagcagggctgtgctgtgctgcgggccacccccctggccgacatgaccccccagctgctgctggaggtgtcccagggcctgagcaggaacctgaagttcctgacagatgcctgtgccctggccagtgacaagagccgggaccgcttcagccgggagcagttcaagctgggcgtgaagtgcatgagcaccagcgccagcgccctgctggcctgtgtgcgggaggtgaaggtggcccccagcgagctggcccggagccgctgtgccctcttcagcggccccctggtgcaggccgtgtctgccctggtgggctttgccacagagccccagttcctgggccgggctgctgctgtgtctgctgagggcaaggctgtgcagacagccatcctgggcggggccatgtctgtggtgtctgcctgtgtgctgctgacccagtgcctgcgggacctggcccagcacccagatggaggagccaagatgtctgaccaccgggagcggctgagaaattctgcctgtgctgtgtctgagggctgcaccctgctgagccaggccctgcgggagaggagcagccccaggaccctgccccctgtgaacagcaacagcgtgaactag

SEQ ID NO: 212649 - DNA, 1089 bp, Artificial Sequence
  derived and/or modified sequence
atggccagcggcagcgccggcaagcccaccggcgaggccgccagcccggcccctgcatcagcaatcggcggggctagcagtcagccccgaaaaaggctcgtgtctgtctgtgaccactgcaaagggaagatgcaactggtcgctgatctgctacttttgtcaagcgaggcgcgaccagtattgtttgagggaccagcttcctccggggcaggagctgaaagtttcgaacagtgtagggatacaattatcgccaggactaaggggctgtccatcttaacacacgacgtgcaaagccagcttaatatgggccgattcggtgaagccggcgactctctggtcgagttaggggatttggttgtgagcctgactgaatgttcagctcacgcggcttatctggcggccgtcgctactccaggggcacaacctgcccagcccgggctggtagaccgctacagggtgacacgatgtaggcacgaagtcgagcaggggtgcgcagtcctccgagccacgccgctggcggacatgactccccagcttctcctcgaggtctctcagggcttatctagaaatctcaaatttctgactgatgcctgcgccctagcatctgacaaatctcgggaccgtttttctcgggagcagttcaaactgggggttaaatgtatgagcaccagcgcctcagcactgctggcatgtgtgagggaagtgaaagtggctcccagtgagctcgccaggagccgctgtgctcttttttctgggccactcgtgcaggctgtgtcagcattggtgggttttgccaccgagccccagttcctcggccgggccgcggctgtgtccgcagagggtaaagctgttcagaccgcgatattgggcggtgcaatgtcggttgtcagcgcttgcgtgcttctgacccagtgcctgcgggacctggcccaacaccccgacggcggagcaaagatgagcgaccacagagaaagactcaggaatagtgcttgtgcggtgtcagagggctgcactttactgagccaggccctccgagaaagaagttctccacgtacgttacctcctgttaatagcaactcagttaactag

SEQ ID NO: 212650 - DNA, 3048 bp, Artificial Sequence
  derived and/or modified sequence
ggccgaggcggcggcggcggcgagcccgggggcgaggcgcggacgggaacaggaaaagcctccggcagcccctgcgggcggcggcgcagccacggccgcgctccgaggtgaagccgcgcgcggagaggaagcgggtgttttcccctctgcctttcggcccccgcccttcctttcagtttctgcccgctcgctcggaagttggcggttgacaaaaatggcaggagccggggcccgggccggttgccgcagcgccgcggggaccttctgagttggcccggtggcagggagactcgtgcaggggcgtccgatgcgcggggcccggggcctcgggagagctcagctgctgcgggccccagacgaggcgacagggatggacttgcgtagacagccagcgccgggccgccgggcgcgcggtctgggagggcgtgccgccgcggcgccgggccgcgctctgtgaaccggcgaggcgggaaggggccgccgtggtgctcggcacgcccgggcgtgtggcgggcgggcgagagcttgagcgcgatccgggcggccgctgtgcgcaatcagtgcaggctcccgcccgactctgactcggcgcggccgcgacagtgccggccacaccctctgccccgctgccgccggcgccgcttcccaagagctggaggcaggagatgcgcccggggcggccgcgcgtcccagagagccagccccggccgccgtcgcggggaagtgccgcctggtggggtcacggcgcctgaagcccacgtgcgccgccgagcccgaggtggcctcgagcgcggcggctgacagcacagcccgcctgagctgcctcccgcgctcctccccgaggaaaggattttgatttcaaagaaaggaaggaaggaaggacaactcccagcttccccgtcccgccctccccgctccgagggccgcgccaggccatgcccaagaaggcggcggcggcggcgaaccagcagaagggactttcctggcagcccggcgacgaggagcgcggacagtgagtttgctctgccccggttcatggttcctgcaagccctctaggaggccgaaagctgcagcccctccccttgccccgaagagccttccgcgttctctcgccctcgggcccaccccgcgccgcccgggctcccgccgccgcagcccagtgccctctgcccgcggcggtggatggcatgatggtgcggggaaggcaccgcggccttggccagctgagtcgcgacggccgccggggcggcggcagtggccgcggcagcggcggtggtagcgggctccccagcggcatgccagtgccccccgggcgcgatggctagcggcagcgccgggaagcccactggcgaggcggcttctccggctcctgcgagcgccatcggcggggccagctcgcagccgcggaagaggctggtatccgtctgcgaccactgcaagggcaagatgcagctggtggctgacctgctgctgctgtcgagcgaggcgcggcccgtgctcttcgagggccccgcctcctctggtgccggcgccgagtccttcgagcagtgccgggacaccatcatcgcgcgcaccaaggggctctccatcctcacccacgacgtgcagagccagctcaacatgggccgcttcggggaggcgggggacagcctggtggagctgggcgacctggtggtgtcgctgaccgagtgctcggcccacgcggcctatctggccgctgtggccacgccgggcgcccagcccgcgcagccgggcctggtggaccgctaccgcgtgacgcgatgccgccacgaggtggagcagggttgcgccgtgctgcgcgccacgccgctggccgacatgacgccgcagctgctgctggaggtgtcgcagggcctgtcgcgcaacctcaagttcctgacggacgcgtgcgccctggccagtgacaagtcacgggaccgcttttcgcgggagcagttcaagctgggcgtcaagtgcatgagcaccagcgcgtcggcgctgctggcctgcgtgcgcgaggtgaaggtggcgcccagtgagctggcgcgcagccgctgtgcgctcttcagcgggcccctggtgcaggcagtgagcgccctggtaggcttcgccaccgagccgcagttcctgggtcgcgcggcagctgtgagcgccgagggcaaggcggtgcagaccgccatcctgggcggcgccatgagcgtggtgtcggcctgcgtgctcctgacccagtgcctcagggatctggcgcagcaccccgacgggggcgccaagatgtcggaccacagggagaggctgaggaactcggcctgcgccgtgtctgaaggctgcaccctgctatctcaggctttaagggagaggtcttcgcccaggactttaccgccagtgaattccaattctgtgaattagcaccccacccccataccccttcttccacccccagactaaaggaagatacttactctctgcccctctccatttataccaaagaaatcataggtgaaaccccctaccctccccaacgttaaatgctcgagaggaatcttccacaaggcagggccatgcacgcaacctgcacacgcacttggagggcccaggtgtctctccaccagcccccatgcagtagggactggaagatatgtcatctgctggttgtgttatcactcccaccccctaccccagcccgtcttccggaatttctcaactaaatttcattattgggcaggaaggaggtcatgggttcatttcatttttgttttttgtgtttttaattaaaagaaaggttacctcagttttcactccttagacatggatgtagctacctttttttgtatgtcttttttttttttaagcaatcgtgttgaattaggagtatacttggtgtggaaagagtatgaatttgccatgtgatttgcaaatggggggaagctactgtgagcgtgtgtttttttaatttacactatagagtgatttttttttcccccaacgtcaagtttttaccttgcatgtactggagtatttatttcatctattaaaatgttatgtttctc

SEQ ID NO: 212651 - DNA, 1089 bp, Artificial Sequence
  derived and/or modified sequence
atggccagcggctcagctggaaagcccacgggggaagctgctagtcctgcccctgcgtccgcgatcggaggcgcaagtagccagccgagaaagagactagtctctgtctgcgaccattgcaagggcaaaatgcaattggttgccgacctcttgctgcttagcagcgaggcccgaccagtgttatttgaaggtccagcctcctccggggcaggcgcagagagttttgagcagtgcagggacacgattatcgctcgcacaaaaggtcttagcattctgacgcacgatgtacagagccagttgaacatgggtaggttcggcgaagctggggacagcctagtcgagttgggtgatctggtggtgagcctcactgagtgctcagctcatgccgcttacttggcagccgtggctacccctggcgctcagccagctcagcccggacttgtagatcggtaccgcgtcacccgttgtcgacatgaggtggagcaaggttgtgccgtcttaagagcaacccccctagccgatatgacacctcagttgctcctagaggtttcacaaggcttaagcaggaatctgaagtttctaacagatgcgtgtgcgctggcatccgacaaaagcagagatcgcttctctcgcgaacagtttaaactgggtgtgaagtgtatgagcacctctgcatccgctctcctggcctgcgtgcgggaggtaaaggtggcaccttccgagttggcccgatcacgctgcgcactgttcagcgggcctcttgtccaggccgtgagcgccttggtgggttttgctactgaacctcagttcctgggcagggctgccgctgtgtccgcagagggcaaggctgtgcagaccgcaattcttggcggagctatgtctgttgtgtcagcgtgcgtcttactcacccagtgtctgagagatctcgcacagcatcctgatggaggagccaaaatgagtgatcaccgggaacggttaagaaatagtgcctgcgctgtctcagagggatgtacgctcctgtctcaggcactccgggagcgctcatcgccacgtactcttcctcccgtcaactcaaattcggtgaactag

SEQ ID NO: 212652 - protein, 481 aa, Artificial Sequence
  derived and/or modified sequence
MKGRGMLVLLLHAVVLGLPSAWAVGACARACPAACACSTVERGCSVRCDRAGLLRVPAELPCEAVSIDLDRNGLRFLGERAFGTLPSLRRLSLRHNNLSFITPGAFKGLPRLAELRLAHNGDLRYLHARTFAALSRLRRLDLAACRLFSVPERLLAELPALRELAAFDNLFRRVPGALRGLANLTHAHLERGRIEAVASSSLQGLRRLRSLSLQANRVRAVHAGAFGDCGVLEHLLLNDNLLAELPADAFRGLRRLRTLNLGGNALDRVARAWFADLAELELLYLDRNSIAFVEEGAFQNLSGLLALHLNGNRLTVLAWVAFQPGFFLGRLFLFRNPWCCDCRLEWLRDWMEGSGRVTDVPCASPGSVAGLDLSQVTFGRSSDGLCVDPEELNLTTSSPGPSPEPAATTVSRFSSLLSKLLAPRVPVEEAANTTGGLANASLSDSLSSRGVGGAGRQPWFLLASCLLPSVAQHVVFGLQMD

SEQ ID NO: 212653 - DNA, 1446 bp, Artificial Sequence
  derived and/or modified sequence
atgaaaggtcgggggatgttggtcttactgctccacgcagtggtgctggggctaccatcagcttgggcagtgggcgcctgcgccagggcttgtccagcagcttgcgcatgttccacagtggagagggggtgcagtgtcagatgcgacagagctgggctcctccgcgttccagccgaactcccatgcgaggctgtaagtatcgatctggataggaacggcttgcgattcttaggagagcgcgcctttgggactctgccgtccctacggagactgagcctgaggcataataaccttagttttattactccaggagcttttaaaggcctgccgaggcttgccgagctgcggctagcccacaatggcgacttgagatacctccacgcccgaacatttgcagctttaagtcgcctgcgccgactcgacctggctgcctgtaggctcttcagcgtgcccgaaaggcttctggccgagctcccagcccttcgcgaacttgctgcattcgacaatttgtttaggcgggtccctggagcacttcggggcctcgctaacttgactcacgcgcatctggaaagggggcggatcgaagctgtcgcctcgagctcattacaggggttgcggagactgcgctccttatcattgcaggcaaaccgggtcagggcagtgcacgcgggcgcatttggggactgtggtgtgctcgaacaccttcttttaaacgacaacttgctggccgagttgccggccgacgcattccgtgggctgaggcggctgaggactctgaacctgggcgggaacgcactcgaccgagtggcacgcgcatggtttgccgacctcgcagagctggagctcttatatttggaccgaaactcaattgctttcgtcgaagagggcgcgttccagaatttgtctggcctgctggctctccacctcaatggcaaccgtttgactgtgctggcttgggtggctttccagcccgggttcttcctcgggaggctgttcctctttaggaacccctggtgctgtgactgtagactagagtggctgcgggattggatggagggctcggggcgggtgaccgatgtgccttgcgcctctccagggagcgtagctgggttggatctatctcaggttactttcggtaggagctccgacggtctctgcgtagacccagaagaactgaacctcactacgtcatctccagggccaagccccgagcccgccgcaacaaccgtgagccgcttctcctcactgctgtcaaagctccttgccccaagggtgccagtggaggaggccgctaatacaacaggcgggttggctaacgcttccctgtccgattctctgagttcccgaggggtcggtggagctggtcggcagccatggttcctgctcgcgtcgtgtcttctcccttctgttgcccagcacgtagtctttgggctgcagatggattag

SEQ ID NO: 212654 - DNA, 1446 bp, Artificial Sequence
  derived and/or modified sequence
atgaaagggcgaggaatgcttgtgcttctcctccacgcggtggtcctgggcctaccatccgcatgggctgtgggggcgtgtgcccgtgcctgccccgccgcttgtgcctgttccacagtcgagcgagggtgcagtgtaaggtgcgaccgcgccgggctcctgagagttcccgcagagttaccgtgcgaggcggtttctattgatctcgatcggaacggcctgcgatttctgggtgaaagagccttcggaaccctaccctcactgcgccggctgtctctgaggcacaataacctctccttcatcactcctggcgctttcaagggactcccccgcctggccgagctgaggctggctcacaatggggatcttcgctatttgcatgctcggacctttgcagcactgagtcgcttacgtcggctggacctggccgcttgccgccttttctccgtccccgagcgactcctggctgaactgcctgctctgcgggagctcgccgcttttgacaacctgttcagacgcgtacccggtgccctaagagggctggccaacctgacccacgcacacctcgaaagaggacgcattgaagcggtggcgtcctccagcctacagggactgcggagattgcgtagcctgtccctgcaagccaacagggtacgagccgtccacgctggagcctttggagattgtggtgtcctggaacacctgctgttaaacgataacctgctcgcagagctgccagccgatgccttcagagggttacggcgcctgcgcactctaaatcttggtggtaacgccctggacagagtggcaagggcctggttcgctgacctcgcagaattagaattgctgtacctggatcgaaacagtatagcttttgttgaagaaggcgcttttcagaacctaagtggcttgcttgccctccacctgaacgggaatcgtctgaccgtgctggcctgggtggctttccagcctggtttcttcctcggacgcctatttctctttaggaatccctggtgctgtgactgtcgtctcgagtggctccgcgattggatggaggggtcaggaagggtcactgatgtcccctgcgcatctccgggttccgtggcaggtcttgatctgtcccaagttacatttggcaggtcctctgatggcctttgcgtggatccggaggagctgaacttgaccacctcatcccccggtccaagcccagaaccagctgctacaacagtgtcaagattttcttctttgctgtctaagctcctcgcccctcgtgtacctgtcgaagaggcggccaacacaacggggggactggcaaatgcttcactgtccgactctctgtccagtcgaggcgttggcggagcaggcaggcaaccgtggttcctgctagcatcatgcctcctgccgtcagttgcccagcatgttgtcttcggccttcagatggattag

SEQ ID NO: 212655 - DNA, 1446 bp, Artificial Sequence
  derived and/or modified sequence
atgaagggccggggcatgctggtgctgctgctgcatgctgtggtgctgggcctgcccagcgcctgggccgtgggcgcctgtgcccgggcctgcccagctgcctgtgcctgcagcacagtggagcggggctgcagcgtgcgctgtgacagagctggcctgctgcgggtgcctgctgagctgccctgtgaggccgtgtccattgacctggacagaaatggcctgcgcttcctgggggagcgggccttcggcaccctgcccagcctgcggcggctgagcctgcggcacaacaacctgtccttcatcacccctggggccttcaagggcctgccccggctggccgagctgcggctggcccacaacggggacctgcgctacctgcacgcccggacctttgctgccctgagccggctgcggcggctggacctggccgcctgccgcctcttctctgtgcctgagcggctgctggccgagctgcctgccctgcgggagctggccgcctttgacaacctcttccggcgggtgcctggggccctgcggggcctggccaacctgacccacgcccacctggagcggggccgcatcgaggccgtggccagcagcagcctgcagggcctgcggcggctgcggagcctgagcctgcaggccaacagagtgcgggctgtgcatgctggggccttcggggactgtggggtgctggagcacctgctgctgaatgacaacctgctggccgagctgcctgcagatgccttccggggcctgcggcggctgcggaccctgaacctgggcggcaatgccctggacagagtggcccgggcctggtttgctgacctggccgagctggagctgctgtacctggacagaaattccatcgcctttgtggaggagggcgccttccagaacctgagcggcctgctggccctgcacctgaatggaaaccggctgactgtgctggcctgggtggccttccagcccggcttcttcctgggccgcctcttcctgttcaggaacccctggtgctgtgactgccgcctggagtggctgcgggactggatggagggcagcggccgggtgacagatgtgccctgtgccagccctggctctgtggccggcctggacctgagccaggtgaccttcggccgcagcagtgatggcctgtgtgtggaccctgaggagctgaacctgaccaccagcagccctggccccagccctgagcctgctgccaccaccgtgagccgcttcagcagcctgctgagcaagctgctggccccccgggtgcctgtggaggaggccgccaacaccaccggcggcctggccaatgccagcctgagtgacagcctgagcagccggggcgtgggcggggccggccggcagccctggttcctgctggccagctgcctgctgcccagcgtggcccagcacgtggtgtttggcctgcagatggactag

SEQ ID NO: 212656 - DNA, 1446 bp, Artificial Sequence
  derived and/or modified sequence
atgaagggccggggcatgctggtgctgctgctgcacgccgtggtgctgggactcccttctgcatgggctgttggcgcatgtgcacgggcgtgtccggctgcttgtgcctgtagcacggttgagcgaggatgctctgtgcgatgcgatcgagccggccttttgagggtcccagccgagctgccctgtgaggcggttagcatcgacctagaccggaatggactccgcttcctcggcgaaagagcatttggaactctcccctccctcagaaggttgagcctccgacataacaacttgtccttcatcacgcccggcgcattcaaaggccttcccaggttggccgagctcaggttagcacataacggcgacctgcggtacctccacgcccggacttttgccgccctctccagattgcggagattggacctcgcagcttgtagactcttttcagtgcctgagcgtctgttggccgaactgccggcactcagggaactcgccgcttttgacaacttatttagacgggtccctggcgcacttaggggcctagccaacctcactcatgcccatctcgaacgaggtcgcatcgaggcggtcgcctcctctagcctccaggggttgcggcgcctgcggagcttatcccttcaggcaaaccgggttagggcggtgcacgcaggcgctttcggggattgcggtgtgctcgagcatctgttgcttaatgataatttgctcgctgaacttccagcagatgcattcaggggtcttcggaggcttcggacattgaatttagggggtaacgcattggatcgggttgctagggcgtggttcgccgatcttgctgaactcgaactgctttacttggaccgcaactcgatcgcattcgtggaagagggagcattccagaacctgagcggtctgttggcccttcatttaaatggtaataggctcaccgtcctggcttgggtagcctttcagccgggttttttcctgggcagattgtttctgtttaggaatccatggtgttgcgactgtcgactcgaatggctcagagattggatggaggggtctggccgagtcactgacgtaccatgtgcatcccctgggagtgtcgcaggcttagacctgagtcaggtcaccttcgggagatcaagtgacgggttgtgcgtcgaccccgaagagcttaacctcactacctcttccccgggaccttctcccgagcccgctgcgaccaccgtgagccggttctccagtctcctatctaagctattagcgccccgagtgcctgtcgaagaggctgccaacaccaccggcggcttagcgaatgcctccctgtccgattctctgtcctcccgtggtgtgggcggtgccggacgccaaccttggttcctcctggcttcctgtcttcttccatctgtggctcagcacgtcgtgtttgggcttcaaatggattag

SEQ ID NO: 212657 - DNA, 1446 bp, Artificial Sequence
  derived and/or modified sequence
atgaagggccggggcatgctggtgctgctgctgcacgccgtggtgctggggttaccttcagcttgggccgtgggagcctgcgccagggcgtgtccagccgcatgcgcgtgctctaccgtggaaaggggctgctcagtcagatgcgatcgcgccggcctgttgagagtgccggccgagctgccatgtgaagctgtttccattgatctcgatagaaacggtcttagattcctgggggaaagggcttttgggacgcttccctccttgagaagattaagtctcagacacaataacctgtctttcatcaccccgggcgcctttaaagggctcccacgactggccgaacttagactagcgcacaatggcgatttgcgatacctgcatgctagaacattcgcagccctctccaggctccgacgactcgaccttgccgcttgcagactgtttagcgttccggaacgactgcttgccgagctacccgctctgcgggagctcgcggcctttgacaacctcttccgacgagtacctggagccctgagggggttagcgaacctgactcacgcccacttagagcgcggccgcatcgaagcagtggcctcgagcagcttacaggggctcagacgcctcagatccctcagcctccaagcaaatcgagtgagggccgtgcatgcgggagcctttggcgattgcggggtgcttgaacatttgctgctgaatgataatctgctggctgaactgccagccgatgcgtttagaggactgcgtcgactacggacactgaatctgggggggaacgctctggatcgggtagctcgcgcgtggttcgcagatctagccgagctcgagctattgtacctcgatcgaaatagcatagcctttgtggaggagggtgctttccagaacctgtccggcttattggccttacaccttaacggcaacaggttgactgtgctcgcctgggtcgcctttcagcccggatttttcttgggccggctgtttcttttcaggaatccgtggtgctgtgactgccgattagaatggttacgggactggatggagggatccggacgcgtgaccgacgtgccttgtgcgagtcctggcagcgtggcaggccttgacctttcccaggtgacgtttggcagaagctcagacggcctctgtgtggacccagaggagctcaatctgactaccagcagccccggaccatctcccgaaccagcagcaacaacagtgtcaagattctctagcctgctgagtaagctactggcccctcgggtgccagtggaagaagcagctaacactacaggcggacttgccaatgctagcctgtccgactctctgtcctctcggggggtaggcggggccggtcggcagccctggttccttctggcatcgtgcttgctgccaagcgtggctcaacacgtggtgttcgggcttcagatggactag

SEQ ID NO: 212658 - DNA, 2713 bp, Artificial Sequence
  derived and/or modified sequence
tggctgcctgacttgggagatggatgggctgagggagtggagggggacctcagaggagcaggaccagggagactcccaggacggtaagcaacatttgaggaccattcactaacgcttctctgcaggggtttcctctccatccatttccttgctgggttgtcagtgatgccatctgagttgctgtcagggctgtagcctgacaaagggtttcctaatagatccaaactgtccatttgtggggagcttctgattttctgttgttactggtttcccttagcccaacaccagggtcattaagaaggaaggaatgtgaggaagaaagaaaggcagggcattcaggaagaagtgtggaggcatgggagggttctcatggggccctcctgggcactgggtgacctgtcctttctcccctcaggtaggggtcccacggctgggtggtcctaagccactgggtggatgaaaggccgagggatgttggtcctgcttctgcatgcggtggtcctcggcctgcccagcgcctgggccgtgggggcctgcgcccgcgcttgtcccgccgcctgcgcctgcagcaccgtggagcgcggctgctcggtgcgctgcgaccgcgcgggcctcctgcgggtgccggccgagctcccgtgcgaggcggtctccatcgacctggaccggaacggcctgcgcttcctgggcgagcgagccttcggcacgctgccgtccttgcgccgcctgtcgctgcgccacaacaacctgtccttcatcacgcccggcgccttcaagggcctgccgcgcctggctgagctgcgcctggcgcacaacggcgacctgcgctacctgcacgcgcgcaccttcgcggcgctcagccgcctgcgccgcctagacctagcagcctgccgcctcttcagcgtgcccgagcgcctcctggccgaactgccggccctgcgcgaactcgccgccttcgacaacctgttccgccgcgtgccgggcgcgctgcgcggcctggccaacctgacgcacgcgcacctggagcgcggccgcatcgaggcggtggcctccagctcgctgcagggcctgcgccgcctgcgctcgctcagcctgcaggccaaccgcgtccgtgccgtgcacgctggcgccttcggggactgtggcgtcctggagcatctgctgctcaacgacaacctgctggccgagctcccggccgacgccttccgcggcctgcggcgcctgcgcacgctcaacctgggtggcaacgcgctggaccgcgtggcgcgcgcctggttcgctgacctggccgagctcgagctgctctacctggaccgcaacagcatcgccttcgtggaggagggcgccttccagaacctctcgggtctcctcgcgctgcacctcaacggcaaccgcctcaccgtgctcgcctgggtcgccttccagcccggcttcttcctgggccgcctcttcctcttccgcaacccgtggtgctgcgactgccgtctggagtggctgagggactggatggagggctccggacgtgtcaccgacgtgccgtgcgcctccccgggctccgtggccggcctggacctcagccaggtgaccttcgggcgctcctccgatggcctctgtgtggaccccgaggagctgaacctcaccacgtccagtccaggcccgtccccagaaccagcggccaccaccgtgagcaggttcagcagcctcctctccaagctgctggccccgagggtcccggtggaggaggcggccaacaccactggggggctggccaacgcctccctgtccgacagcctctcctcccgtggggtgggaggcgcgggccggcagccctggtttctcctcgcctcttgtctcctgcccagcgtggcccagcacgtggtgtttggcctgcagatggactgacctggccagaggggggaaagtttgcttaactgggcttgagtgtgtttgtggtaaggggagaggagccggaatggagggcagaggtgaaaatcccagtggagggtggaaggaaccgtttgcctccagagatggccccagggagaacacagggacgtgccactcgagggggaggatggtatggatttctgcttttgtcacacgggcatccattggaaaagagaagcaagaatgaacgtgggccctcgggtgggaagactaggaatcggaagcttctagggcttcacatcccttcccctcccctccccttcccctcatcttccaggcaacagtgcctgcaaggcctgaattagagagacttccattggctaagtagttaagagccgtcccatttctcctggcggggtaacccattacaccgaagtcctttgttttctaccacaatcctcctcctcctctccaggggcctggaaacactaggattcaggaaggtaggcaggacgtgagagaagggagatgggagagagatttaagacaaagggtggcggtggttcctggggtctgagatgtgttaggaggcgtttaaaacaaagatccagttcatttactccacagttattcccagggctggccctagccacaaaggaactttagggcagggtagggaaaaaaggggcagcagggggtgtgtttgtggacaaataaatttgtaaagtccgaggattaaaaaaaaaaaaaggttaaaccggtttctctactgctggacttttcagagtctttcatatgctaacattcattgtgaatctcccaagag

SEQ ID NO: 212659 - DNA, 2297 bp, Artificial Sequence
  derived and/or modified sequence
ggctgagggagtggagggggacctcagaggagcaggaccagggagactcccaggacggtaggggtcccacggctgggtggtcctaagccactgggtggatgaaaggccgagggatgttggtcctgcttctgcatgcggtggtcctcggcctgcccagcgcctgggccgtgggggcctgcgcccgcgcttgtcccgccgcctgcgcctgcagcaccgtggagcgcggctgctcggtgcgctgcgaccgcgcgggcctcctgcgggtgccggccgagctcccgtgcgaggcggtctccatcgacctggaccggaacggcctgcgcttcctgggcgagcgagccttcggcacgctgccgtccttgcgccgcctgtcgctgcgccacaacaacctgtccttcatcacgcccggcgccttcaagggcctgccgcgcctggctgagctgcgcctggcgcacaacggcgacctgcgctacctgcacgcgcgcaccttcgcggcgctcagccgcctgcgccgcctagacctagcagcctgccgcctcttcagcgtgcccgagcgcctcctggccgaactgccggccctgcgcgaactcgccgccttcgacaacctgttccgccgcgtgccgggcgcgctgcgcggcctggccaacctgacgcacgcgcacctggagcgcggccgcatcgaggcggtggcctccagctcgctgcagggcctgcgccgcctgcgctcgctcagcctgcaggccaaccgcgtccgtgccgtgcacgctggcgccttcggggactgtggcgtcctggagcatctgctgctcaacgacaacctgctggccgagctcccggccgacgccttccgcggcctgcggcgcctgcgcacgctcaacctgggtggcaacgcgctggaccgcgtggcgcgcgcctggttcgctgacctggccgagctcgagctgctctacctggaccgcaacagcatcgccttcgtggaggagggcgccttccagaacctctcgggtctcctcgcgctgcacctcaacggcaaccgcctcaccgtgctcgcctgggtcgccttccagcccggcttcttcctgggccgcctcttcctcttccgcaacccgtggtgctgcgactgccgtctggagtggctgagggactggatggagggctccggacgtgtcaccgacgtgccgtgcgcctccccgggctccgtggccggcctggacctcagccaggtgaccttcgggcgctcctccgatggcctctgtgtggaccccgaggagctgaacctcaccacgtccagtccaggcccgtccccagaaccagcggccaccaccgtgagcaggttcagcagcctcctctccaagctgctggccccgagggtcccggtggaggaggcggccaacaccactggggggctggccaacgcctccctgtccgacagcctctcctcccgtggggtgggaggcgcgggccggcagccctggtttctcctcgcctcttgtctcctgcccagcgtggcccagcacgtggtgtttggcctgcagatggactgacctggccagaggggggaaagtttgcttaactgggcttgagtgtgtttgtggtaaggggagaggagccggaatggagggcagaggtgaaaatcccagtggagggtggaaggaaccgtttgcctccagagatggccccagggagaacacagggacgtgccactcgagggggaggatggtatggatttctgcttttgtcacacgggcatccattggaaaagagaagcaagaatgaacgtgggccctcgggtgggaagactaggaatcggaagcttctagggcttcacatcccttcccctcccctccccttcccctcatcttccaggcaacagtgcctgcaaggcctgaattagagagacttccattggctaagtagttaagagccgtcccatttctcctggcggggtaacccattacaccgaagtcctttgttttctaccacaatcctcctcctcctctccaggggcctggaaacactaggattcaggaaggtaggcaggacgtgagagaagggagatgggagagagatttaagacaaagggtggcggtggttcctggggtctgagatgtgttaggaggcgtttaaaacaaagatccagttcatttactccacagttattcccagggctggccctagccacaaaggaactttagggcagggtagggaaaaaaggggcagcagggggtgtgtttgtggacaaataaatttgtaaagtccgaggattaaaaaaaaaaaaaggttaaaccggtttctct

SEQ ID NO: 212660 - DNA, 1446 bp, Artificial Sequence
  derived and/or modified sequence
atgaaggggcgaggtatgcttgtcctgctgttacacgcagtggtcttaggacttccgagcgcttgggcagtcggagcatgcgcacgagcttgccctgccgcttgcgcttgtagcacagtcgaaagaggctgtagcgtccgctgcgatagagcaggcctgctaagagtgccagcggaacttccttgcgaggcggtcagtatcgacctggacaggaatggcctccgctttctcggcgaaagggcattcggcacgcttccctccctgagacggctgtcactcagacacaataacctgtcgtttataactcccggagccttcaaggggctacctcgcctcgccgaattgcggttagcccataacggcgatctcaggtatctgcatgcacggacctttgctgctctatcacgcctgcgtaggttggacctcgcagcctgtcggctcttttcagtgcccgaacggttactggccgaattgccagccctcagggaacttgctgccttcgacaatttgtttcgtcgcgtgcccggagctctgagaggtctcgctaacctgacacacgctcatttagagaggggaaggattgaggcagtcgcttcttccagcctccagggtttgcgcagactccgtagtctgagcctgcaggcgaatcgagtgcgcgctgtccacgctggcgctttcggtgattgtggagttctcgagcaccttctgctaaacgacaatttgctcgctgaacttcccgcagacgcctttcgtggcctgcggcgtctgcggaccctcaatctagggggaaacgccttagatagagtggcaagagcttggtttgcagacttggcagaactggaactgctctacctggacagaaactctatcgcatttgtagaggagggagcatttcagaacctgtctgggctcctagccctgcacctcaacggaaatcggctgactgtgcttgcttgggtagcgttccagcccggattcttcctgggtagactgtttctgtttcgcaatccctggtgttgcgattgtcgccttgagtggcttagagactggatggaaggctcagggagggtaactgatgtgccttgcgccagccctgggtcagtagctgggctggacctgtctcaagtgacctttggcaggtccagtgatggcctctgcgttgaccccgaggagttgaatctgaccacatcttcacccggaccgagcccagaacctgcagccaccacagtgagcagatttagctcactactcagcaaattgctggctcccagagtgcccgtggaggaggctgctaacaccactgggggactggccaacgccagtctgtctgatagtctgagcagccgcggagtgggaggcgcagggagacagccttggtttcttctggcgagttgtctccttcctagtgtggcgcagcacgtggtgttcgggctccagatggattag

SEQ ID NO: 212661 - DNA, 1446 bp, Artificial Sequence
  derived and/or modified sequence
atgaaagggcgtggtatgctagtcttattgcttcacgctgttgttctcgggctgccctctgcatgggcggtgggcgcttgtgctagagcttgcccagccgcttgcgcttgttcaactgtagagagggggtgctccgtgcgatgtgaccgggcaggcctcctgagggtccccgctgagctcccctgtgaggccgttagcatcgatctggatagaaatggactgcgatttttaggtgaacgcgcatttggaacgctccccagtcttaggagattgagtctaagacacaataatctgtccttcataacccccggtgcatttaagggtttgcctcggctggcggaactgcgactcgctcacaacggtgatctgagatacctccacgcgcgtacctttgctgcgctgtcgaggttgcgcagactcgatctggccgcatgccgcctcttctccgtaccagagaggctgcttgctgagcttcccgcactacgggaactggctgctttcgataacttgtttcggagagtgccgggagcactgcgaggcctagccaacctgacgcacgcgcacctcgaacggggaaggatcgaggcggtggcaagctcctccctgcagggactgcgcagactccgctcactttccctccaggctaaccgcgttcgcgcagtacatgcaggcgcattcggtgattgcggcgtcctggagcacttgttgttgaacgacaatctgttagcagagctgcccgctgacgccttcagaggtttgcgaagactcaggactctcaacctggggggtaatgccttggaccgcgtcgctcgcgcttggtttgcagaccttgctgagctggaactgttgtatctggaccggaacagcatcgcttttgtggaggagggagcatttcagaatctcagcggactgctggccctgcatcttaatggtaatcgcctgactgttcttgcgtgggtcgccttccagccagggttctttcttggtagactctttctcttccgaaatccttggtgttgtgactgccgcttggagtggcttagagactggatggagggcagcggccgtgttactgatgtcccttgcgcgtcgccaggttcagtcgccggtctggatctctcacaggtcacattcggcagatcttctgacggtctttgtgtagacccagaggagcttaatttaaccaccagtagcccgggaccgagtccagaaccagctgcgaccacggtgtctaggttttcttctctgctgtccaaactgttagcgccaagagtcccagtggaagaagccgctaacacaacaggcggtctcgccaatgcaagtctcagtgacagtctctcatcccgaggggtgggtggagcaggaagacaaccctggttcctactggctagctgtctgctcccatcagtggcccagcacgtggtttttgggttacagatggactag

SEQ ID NO: 212662 - DNA, 1446 bp, Artificial Sequence
  derived and/or modified sequence
atgaagggcagaggcatgctggtgctgctgctgcacgccgtggtgctgggcctgcccagcgcctgggccgtgggcgcctgcgccagagcctgccccgccgcctgcgcctgcagcaccgtggagagaggctgcagcgtgagatgcgacagagccggcctgctgagagtgcccgccgagctgccctgcgaggccgtgagcatcgacctggacagaaacggcctgagattcctgggcgagagagccttcggcaccctgcccagcctgagaagactgagcctgagacacaacaacctgagcttcatcacccccggcgccttcaagggcctgcccagactggccgagctgagactggcccacaacggcgacctgagatacctgcacgccagaaccttcgccgccctgagcagactgagaagactggacctggccgcctgcagactgttcagcgtgcccgagagactgctggccgagctgcccgccctgagagagctggccgccttcgacaacctgttcagaagagtgcccggcgccctgagaggcctggccaacctgacccacgcccacctggagagaggcagaatcgaggccgtggccagcagcagcctgcagggcctgagaagactgagaagcctgagcctgcaggccaacagagtgagagccgtgcacgccggcgccttcggcgactgcggcgtgctggagcacctgctgctgaacgacaacctgctggccgagctgcccgccgacgccttcagaggcctgagaagactgagaaccctgaacctgggcggcaacgccctggacagagtggccagagcctggttcgccgacctggccgagctggagctgctgtacctggacagaaacagcatcgccttcgtggaggagggcgccttccagaacctgagcggcctgctggccctgcacctgaacggcaacagactgaccgtgctggcctgggtggccttccagcccggcttcttcctgggcagactgttcctgttcagaaacccctggtgctgcgactgcagactggagtggctgagagactggatggagggcagcggcagagtgaccgacgtgccctgcgccagccccggcagcgtggccggcctggacctgagccaggtgaccttcggcagaagcagcgacggcctgtgcgtggaccccgaggagctgaacctgaccaccagcagccccggccccagccccgagcccgccgccaccaccgtgagcagattcagcagcctgctgagcaagctgctggcccccagagtgcccgtggaggaggccgccaacaccaccggcggcctggccaacgccagcctgagcgacagcctgagcagcagaggcgtgggcggcgccggcagacagccctggttcctgctggccagctgcctgctgcccagcgtggcccagcacgtggtgttcggcctgcagatggactag

SEQ ID NO: 212663 - protein, 872 aa, Artificial Sequence
  derived and/or modified sequence
MNLIVKLRRSFRTLIVLLATFCLVSIVISAYFLYSGYKQEMTLIETTAEAECTDIKILPYRSMELKTVKPIDTSKTDPTVLLFVESQYSQLGQDIIAILESSRFQYHMVIAPGKGDIPPLTDNGKGKYTLVIYENILKYVSMDSWNRELLEKYCVEYSVSIIGFHKANENSLPSTQLKGFPLNLFNNLALKDCFVNPQSPLLHITKAPKVEKGPLPGEDWTIFQYNHSTYQPVLLTELQTEKSLSSLSSKTLFATVIQDLGLHDGIQRVLFGNNLNFWLHKLIFIDAISFLSGKRLTLSLDRYILVDIDDIFVGKEGTRMNVKDVKALLETQNLLRTQVANFTFNLGFSGKFYHTGTEEEDEGDDLLLRSVDEFWWFPHMWSHMQPHLFHNESSLVEQMILNKEFALEHGIPINMGYAVAPHHSGVYPVHIQLYAAWKKVWGIQVTSTEEYPHLKPARYRKGFIHNSIMVLPRQTCGLFTHTIFYKEYPGGPQELDKSIRGGELFLTILLNPISIFMTHLSNYGNDRLGLYTFVNLVNFVQSWTNLKLQTLPPVQLAHQYFELFPEQKDPLWQNPCDDKRHKDIWSREKTCDHLPKFLVIGPQKTGTTALYLFLLMHPSIISNLPSPKTFEEVQFFNGNNYHKGIDWYMDFFPTPSNTTSDFLFEKSANYFHSEEAPRRAASLVPKAKIITILIDPSDRAYSWYQHQRSHEDPAALRFNFYEVISTGHWAPSDLKTLQRRCLVPGWYAVHIERWLTYFATSQLLIIDGQQLRSDPATVMDEVQKFLGVTPRYNYSEALTFDPQKGFWCQLLEGGKTKCLGKSKGRKYPPMDPESRTFLSNYYRDHNVELSKLLHRLGQPLPSWLRQELQKVR

SEQ ID NO: 212664 - DNA, 2619 bp, Artificial Sequence
  derived and/or modified sequence
atgaacctgatcgtgaagctgagaagaagcttcagaaccctgatcgtgctgctggccaccttctgcctggtgagcatcgtgatcagcgcctacttcctgtacagcggctacaagcaggagatgaccctgatcgagaccaccgccgaggccgagtgcaccgacatcaagatcctgccctacagaagcatggagctgaagaccgtgaagcccatcgacaccagcaagaccgaccccaccgtgctgctgttcgtggagagccagtacagccagctgggccaggacatcatcgccatcctggagagcagcagattccagtaccacatggtgatcgcccccggcaagggcgacatcccccccctgaccgacaacggcaagggcaagtacaccctggtgatctacgagaacatcctgaagtacgtgagcatggacagctggaacagagagctgctggagaagtactgcgtggagtacagcgtgagcatcatcggcttccacaaggccaacgagaacagcctgcccagcacccagctgaagggcttccccctgaacctgttcaacaacctggccctgaaggactgcttcgtgaacccccagagccccctgctgcacatcaccaaggcccccaaggtggagaagggccccctgcccggcgaggactggaccatcttccagtacaaccacagcacctaccagcccgtgctgctgaccgagctgcagaccgagaagagcctgagcagcctgagcagcaagaccctgttcgccaccgtgatccaggacctgggcctgcacgacggcatccagagagtgctgttcggcaacaacctgaacttctggctgcacaagctgatcttcatcgacgccatcagcttcctgagcggcaagagactgaccctgagcctggacagatacatcctggtggacatcgacgacatcttcgtgggcaaggagggcaccagaatgaacgtgaaggacgtgaaggccctgctggagacccagaacctgctgagaacccaggtggccaacttcaccttcaacctgggcttcagcggcaagttctaccacaccggcaccgaggaggaggacgagggcgacgacctgctgctgagaagcgtggacgagttctggtggttcccccacatgtggagccacatgcagccccacctgttccacaacgagagcagcctggtggagcagatgatcctgaacaaggagttcgccctggagcacggcatccccatcaacatgggctacgccgtggccccccaccacagcggcgtgtaccccgtgcacatccagctgtacgccgcctggaagaaggtgtggggcatccaggtgaccagcaccgaggagtacccccacctgaagcccgccagatacagaaagggcttcatccacaacagcatcatggtgctgcccagacagacctgcggcctgttcacccacaccatcttctacaaggagtaccccggcggcccccaggagctggacaagagcatcagaggcggcgagctgttcctgaccatcctgctgaaccccatcagcatcttcatgacccacctgagcaactacggcaacgacagactgggcctgtacaccttcgtgaacctggtgaacttcgtgcagagctggaccaacctgaagctgcagaccctgccccccgtgcagctggcccaccagtacttcgagctgttccccgagcagaaggaccccctgtggcagaacccctgcgacgacaagagacacaaggacatctggagcagagagaagacctgcgaccacctgcccaagttcctggtgatcggcccccagaagaccggcaccaccgccctgtacctgttcctgctgatgcaccccagcatcatcagcaacctgcccagccccaagaccttcgaggaggtgcagttcttcaacggcaacaactaccacaagggcatcgactggtacatggacttcttccccacccccagcaacaccaccagcgacttcctgttcgagaagagcgccaactacttccacagcgaggaggcccccagaagagccgccagcctggtgcccaaggccaagatcatcaccatcctgatcgaccccagcgacagagcctacagctggtaccagcaccagagaagccacgaggaccccgccgccctgagattcaacttctacgaggtgatcagcaccggccactgggcccccagcgacctgaagaccctgcagagaagatgcctggtgcccggctggtacgccgtgcacatcgagagatggctgacctacttcgccaccagccagctgctgatcatcgacggccagcagctgagaagcgaccccgccaccgtgatggacgaggtgcagaagttcctgggcgtgacccccagatacaactacagcgaggccctgaccttcgacccccagaagggcttctggtgccagctgctggagggcggcaagaccaagtgcctgggcaagagcaagggcagaaagtacccccccatggaccccgagagcagaaccttcctgagcaactactacagagaccacaacgtggagctgagcaagctgctgcacagactgggccagcccctgcccagctggctgagacaggagctgcagaaggtgagatag

SEQ ID NO: 212665 - DNA, 2619 bp, Artificial Sequence
  derived and/or modified sequence
atgaaccttattgtcaagctgaggcgatcgttccggacactgatcgttttactggccactttttgcctcgtctctatcgtcatttcagcctatttcctctactctggctataaacaggaaatgacgctgattgagacaacagccgaggcggagtgtaccgatatcaaaatcttgccataccggagcatggagttgaaaaccgtgaaacccattgatacctctaagactgaccccactgttctgctcttcgtggagagtcaatacagtcagctcggccaagacatcatcgcaattcttgagagtagcagattccagtaccacatggtgattgccccaggcaagggcgacatcccgcccctgactgacaacggcaagggtaagtatactctggttatttacgagaacatccttaagtacgtgtccatggactcttggaatcgtgagttactcgagaagtactgtgttgagtactcagttagcataattggcttccataaagccaacgaaaattcactgccctcaacacagctgaagggcttccctctcaatctgtttaataacctggccctgaaggactgcttcgtgaatccacaatcacctctcctgcacatcactaaggccccaaaggtggagaagggccccctgccaggagaggattggactattttccagtataaccactctacctaccagcctgtcctcttaaccgaactccagacagagaaatctctttccagtctctccagtaagacacttttcgcaacagtgatccaggacttaggactgcatgatggtatccagagggtcctgtttggaaacaacctgaacttttggttgcacaaactgatcttcatcgacgccattagttttctctccggcaagaggctgactctgagcctcgacagatacatccttgtggatattgatgatatctttgttggcaaggagggtactaggatgaatgtcaaggacgtcaaagccctgcttgaaacccagaatctcctccgtactcaggtcgctaatttcacttttaacttgggattttctggcaaattttatcataccggaaccgaagaggaggatgaaggcgacgatctgttgttacggtccgtggatgaattttggtggttcccccatatgtggagtcacatgcagccccatctctttcacaatgaatcttcactcgtcgaacagatgattctgaacaaagaattcgccctggagcacggaataccaatcaatatgggatacgcggtggctcctcaccactccggagtatatcctgtgcacattcaactctatgcggcttggaagaaggtgtggggcatccaggtgacaagcaccgaagaatatccccacctgaaacctgctcgatatcgaaaaggcttcatccataactcaattatggtgttgccccgtcagacttgtggtttattcacgcatacgatcttttataaagaataccctggcggcccacaggaactagacaagtctattagaggcggcgagctcttcctgactattcttctgaatccaatcagtatctttatgacacatctgagcaactatggcaacgacaggctggggctgtatacattcgttaatttggttaactttgttcaaagttggactaatttaaaactccagacgctgcctcccgtgcagctggcacatcagtacttcgagctgtttccggagcagaaagatccactttggcagaacccatgtgacgacaaacgccataaggacatttggtcacgggagaagacctgtgatcatctccccaagtttctcgtgatcgggcctcagaagactggcacaaccgcactttacctgttcctactgatgcaccccagtattatttctaacctcccttcacctaagacattcgaggaggtgcagtttttcaacggaaacaattaccacaagggcatagattggtatatggacttttttcccaccccctcaaatacgacctccgacttcctgtttgagaagtcagcaaactactttcatagtgaagaagccccacgcagggcagcatccctggttcctaaggctaaaattattacaatccttatcgatcccagtgatagagcttactcatggtatcagcaccagcggtcccacgaagacccagccgccttaagattcaatttttatgaggtgatatcaactggccattgggcgcctagtgacctgaagactctgcagcggcgatgcctggtgccggggtggtacgccgtccatatcgagcgctggctaacctacttcgcgacgagccagctgctcataattgacggccagcagctgaggtctgacccagccacagtgatggacgaggtgcagaagttcctaggcgtgacacctcgctacaattattccgaggctttaacttttgacccccagaaaggattctggtgccaactcctggaaggaggcaagactaaatgtctcggcaagtccaaaggacgaaagtatccccccatggaccctgaaagtaggacgttcctcagcaattactatcgcgatcataacgttgagttgtctaaacttcttcaccggctaggccagcccctgccctcttggctgagacaggagttacagaaggtaagatag

SEQ ID NO: 212666 - DNA, 2619 bp, Artificial Sequence
  derived and/or modified sequence
atgaacctgattgtgaagctgcggcgctccttccgcaccctgattgtgctgctggccaccttctgcctggtgtccatcgtcatcagcgcctacttcctgtacagcggctacaagcaggagatgaccctcatcgagaccacagctgaggctgaatgtacagacatcaagatcctgccctaccgctccatggagctgaagacagtgaagcccatcgacaccagcaagacagaccccaccgtgctgctgtttgtggagagccagtacagccagctgggccaggacatcatcgccatcctggagagcagccgcttccagtaccacatggtgattgcccctgggaagggggacatcccccccctgacagacaatggcaagggcaagtacaccctggtgatctatgagaacatcctgaagtatgtgtccatggacagctggaaccgggagctgctggagaagtactgtgtggagtacagcgtgtccatcatcggcttccacaaggccaatgaaaacagcctgcccagcacccagctgaagggcttccccctgaacctcttcaacaacctggccctgaaggactgctttgtgaacccccagagccccctgctgcacatcaccaaggcccccaaggtggagaagggccccctgcccggggaggactggaccatcttccagtacaaccacagcacctaccagcctgtgctgctgacagagctgcagacagagaagagcctgagcagcctgagcagcaagaccctgtttgccaccgtcatccaggacctgggcctgcatgatggcatccagagggtgctgtttggaaacaacctgaacttctggctgcacaagctgatcttcattgatgccatctccttcctgagcggcaagaggctgaccctgagcctggaccgctacatcctggtggacattgatgacatctttgtgggcaaggagggcaccaggatgaatgtgaaggatgtgaaggccctgctggagacccagaacctgctgcggacccaggtggccaacttcaccttcaacctgggcttcagcggcaagttctaccacactggaacagaggaggaggatgaaggagatgacctgctgctgcggtctgtggatgagttctggtggttcccccacatgtggagccacatgcagccccacctgttccacaatgaaagcagcctggtggagcagatgatcctgaacaaggagtttgccctggagcacggcatccccatcaacatgggctatgctgtggccccccaccacagcggcgtgtaccctgtgcacatccagctgtatgctgcctggaagaaggtgtggggcatccaggtgaccagcacagaggagtacccccacctgaagccagcccgctacaggaagggcttcatccacaacagcatcatggtgctgccccggcagacctgtggcctcttcacccacaccatcttctacaaggagtacccaggcggcccccaggagctggacaagagcatccggggcggggagctgttcctgaccatcctgctgaaccccatcagcatcttcatgacccacctgagcaactatggaaatgaccggctgggcctgtacacctttgtgaacctggtgaactttgtgcagagctggaccaacctgaagctgcagaccctgccccctgtgcagctggcccaccagtactttgagctgtttcctgagcagaaggaccccctgtggcagaacccctgtgatgacaagaggcacaaggacatctggagccgggagaagacctgtgaccacctgcccaagttcctggtgattggcccccagaagacaggcaccacagccctgtacctgttcctgctgatgcaccccagcatcatcagcaacctgcccagccccaagacctttgaggaggtgcagttcttcaatggaaacaactaccacaagggcatcgactggtacatggacttcttccccacccccagcaacaccaccagtgacttcctgtttgagaagagcgccaactacttccacagcgaggaggccccccggcgggccgccagcctggtgcccaaggccaagatcatcaccatcctgattgaccccagcgaccgggcctacagctggtaccagcaccagaggagccatgaagatcctgctgccctgcgcttcaacttctatgaagtcatcagcacaggccactgggcccccagcgacctgaagaccctgcagaggcgctgcctggtgcccggctggtatgctgtgcacatcgagcgctggctgacctactttgccaccagccagctgctgatcattgatggccagcagctgcggagtgaccctgccaccgtgatggatgaggtgcagaagttcctgggcgtgaccccccgctacaactacagcgaggccctgacctttgacccccagaagggcttctggtgccagctgctggagggcggcaagaccaagtgcctgggcaagagcaaaggaaggaagtacccacccatggaccctgagagcaggaccttcctgagcaactactacagagaccacaacgtggagctgagcaagctgctgcaccggctgggccagcccctgcccagctggctgcggcaggagctgcagaaggtgaggtag

SEQ ID NO: 212667 - DNA, 3351 bp, Artificial Sequence
  derived and/or modified sequence
aaagaccgactacagctaaacaagaggcacagcagcactagcaacagcagagcaggagcagctggtattccggtgattaaatagttctcatagcctttttgctgtactcggtctgctccctggtgtaattctcgtgtccaagaaggaagctgcattttaacggtgtgctgaacagaggtttgaatcattccagctggctgcttgttttgaaaaggacaatgtgtgtataaataaaaggactctgctggaagagttcagacactaagactggagctagagagtgctcttggaatattgttgaggcagattgcatgaactgaaagctccttctaattaacctggagccaagtgaacctgaatactggatatctcatgttctaacacgggataaattcaagttagaaaaagacaaaatattgaaatgcttctctagattatgcttagaggattctgcagcaattctcagtattggacatattcaaaatctcctcaacgtatatccttcccatctattgccttccagctttaactcagttgtgctcccttcaaacattttacatgatttgcgatggttacatgaactctggggaagtgatatttgcaacatctcatactttattcactatggcactttaggaaacgaaattgggaaaaagcttccaaaacattattctaaaaaatgaatcttattgtgaaacttcggagaagttttcgaacattgattgttctcttagctaccttttgcttggtgagcattgtcatttctgcctattttctctactctggctacaaacaggaaatgacacttattgaaaccactgcagaagcagaatgcactgacatcaaaattctaccatataggtcaatggagctgaaaacagttaaacctattgacacatccaaaacggaccctactgtccttctcttcgtggagagccaatactctcaactcggtcaagatatcatagctattttggagtccagccgatttcagtaccacatggttattgcccctggaaagggagatatacctcctcttacagataatggcaaagggaaatatactttagttatttatgaaaatattctgaagtatgtcagcatggactcatggaatcgagagcttttagaaaaatactgtgtggaatacagtgttagtataatcggttttcataaagccaatgagaacagcttaccaagtacacaattaaaaggctttccgttaaaccttttcaataatctagctctaaaggactgttttgttaaccctcaatctcctttgctgcatattaccaaagcccccaaggttgagaaaggccctcttcctggggaagactggactattttccaatataatcattcaacctaccagcctgtacttttaactgagttacagacagaaaaatccctgtcatccttgtctagcaaaacactctttgcaacggtgattcaggatctggggcttcatgatggaattcagagagtactttttggcaacaacttgaacttttggctgcacaagctcatcttcatagatgccatctccttcttgtcagggaagaggctgacattgtccttggacaggtacatccttgtggacattgatgatatatttgttgggaaagagggaacaaggatgaatgtcaaagatgtgaaggcattactagagactcaaaatttactgcgcactcaggttgcaaattttaccttcaaccttggattttcagggaagttttaccacacagggactgaagaggaagatgaaggagatgaccttttacttcggtctgtggatgagttctggtggtttcctcacatgtggagccacatgcagccccacctcttccacaacgagtcatctttagtagagcagatgattctcaacaaggaatttgcactggaacatggaataccaatcaacatgggctatgctgtggccccacatcactcaggggtctacccggttcacattcagctgtatgcagcttggaagaaggtctggggtattcaagtcaccagcactgaagaatatccacatctgaaacctgcccggtacagaaagggcttcattcacaatagcatcatggtcctccctcgacagacttgtgggttgttcactcacactattttctacaaagaatatccaggaggaccccaagaactggataaaagtatcagaggaggtgaactttttctcacaatccttctaaacccaatcagcattttcatgacccatttatcaaactatggaaatgaccgcctagggttatatacctttgtgaacttggtcaactttgtgcagagctggaccaacctgaaattgcaaactctgcctccagtgcaactggcccaccagtattttgagctcttccctgagcagaaagaccctctatggcagaatccatgtgatgataaacgacacaaagacatctggtccagagagaaaacttgtgaccacttaccaaaatttctagtaattggtccacaaaaaacaggaacaactgcactttatttatttcttcttatgcatccttcaatcatcagcaatctccctagtccaaagacatttgaggaagttcagttctttaatggcaacaactatcacaaaggaatagactggtatatggactttttccctacaccatccaatactacaagtgactttctgtttgaaaagagtgctaattacttccattcggaagaagctccaagacgagccgcatctcttgtccccaaagccaagatcatcaccatcctcattgacccctcagacagggcatactcttggtaccagcaccaacgatcacatgaagatccagctgctctgaggttcaatttctatgaagttatttcaacaggacattgggctccatctgacttaaaaactttgcagagaagatgcctagtacctggatggtatgcagtccacatagaaagatggctaacttactttgctacttctcagttgctaattattgatggacagcagctgagatctgacccagctactgtgatggatgaagtccagaagtttctgggagttacacctcgttataattactctgaagcactaacgtttgatccccaaaagggtttttggtgtcaattactggaaggaggaaagacaaaatgccttggaaaaagcaaaggccgaaaatatccacctatggatccagagtctagaacgttcctctctaattactaccgagatcataatgtggaactatccaaactgctacacagactgggacagcctctgccatcgtggctgagacaggaactgcagaaagtgagatagcactggagacaagaactaagcctctcaagatacttttagtgttaaaaaaaaaa

SEQ ID NO: 212668 - DNA, 2619 bp, Artificial Sequence
  derived and/or modified sequence
atgaacctgatcgtgaagctgcggcggagcttccggaccctgatcgtgctcctggctacgttttgtctggtttctattgtgatcagtgcttacttcttatactccgggtacaagcaggagatgacgctgatcgagaccacagcagaagcagagtgcactgacattaagattctcccttaccggagcatggaactaaaaacagtcaaacctattgacacgtctaagacagatccgacagttctgctgttcgtagagagccagtatagccaactggggcaggacattatagctattctagaatctagtcgtttccagtatcatatggtgattgcccctgggaaaggagacatcccccctctaactgataatggcaagggaaaatacaccctagtgatctacgagaacatcctcaagtacgtgagcatggacagctggaaccgggaattgttggagaaatactgcgtcgaatattccgtgtcgatcattggcttccacaaggctaacgaaaactcccttccaagcacgcaattgaaaggcttccctctgaacctgtttaataatctggccctcaaagactgtttcgtgaacccccagtcgcccctattgcatattacaaaagctcccaaggtggagaagggcccactgccaggagaggactggacaatttttcaatacaatcacagtacctatcaacctgtgctgctcacggaactgcagacggagaagtcattgagttctctttcctctaaaactctgtttgccactgtgattcaagacctaggcttacatgacgggatccaacgtgtgctgtttgggaataatctcaacttctggctgcacaagctaatcttcatcgacgcaattagttttctaagcggcaaacgcttaacactgtccttagacagatatatcctggtggatattgatgatatttttgtcggcaaggaaggaacacggatgaacgtgaaagacgtgaaggctctactcgagacgcagaatttactccgtacacaggttgccaactttacctttaatctcggttttagcggcaagttctaccacacaggcacagaggaagaggacgaaggggatgatttgctcttgaggagtgtcgacgaattctggtggttccctcatatgtggtcccatatgcaacctcatctattccacaacgaatcttctctcgtggagcagatgatcttgaacaaagaattcgctttagagcacggaatacctatcaacatgggatatgccgtggcaccccaccatagcggcgtttacccagtccacattcagctgtatgccgcctggaagaaggtgtggggaattcaggtcaccagtactgaggagtacccccatctgaaaccggccaggtatcgaaaaggttttatccacaatagcataatggtgctgccacgccaaacatgcggcttattcacccatacaatattctacaaagaatatccaggtgggccccaggagctcgacaaatctataagaggtggcgaactctttctgaccatccttctcaatccaatcagtattttcatgactcacctaagtaactacggcaacgatcgccttggcctgtatacttttgtgaatttggtaaacttcgtacagtcgtggactaatctgaagctccagaccctgcccccggtccagttagcgcatcagtactttgagctttttccagaacaaaaagaccctctctggcagaatccttgtgatgataagaggcataaggacatctggtcaagggaaaagacttgcgatcacctccccaagtttctggtaatagggccacaaaagacgggtaccactgcactctacctgttcctgctgatgcatcccagcatcataagcaatctaccaagtcccaaaaccttcgaggaggtccaattcttcaatggaaataattatcataaagggattgattggtatatggatttcttccccacgccctcaaacaccacgtccgatttcctcttcgagaaaagtgccaattatttccattccgaggaagctcctagacgagccgccagcttggtgccgaaggcgaagatcatcactattctaattgatccatcagaccgtgcctattcctggtaccagcatcagagatcccacgaagacccagcggctttgagatttaatttctacgaagtcatctcgaccgggcattgggccccatccgatctcaagaccctgcaacgacgctgcctggtccctggttggtacgccgtccacatcgaacgatggttgacttacttcgcgacctcccagttactaattatagacggccagcagctgagaagtgatccagccactgtgatggatgaggtgcagaagttcctgggagtgaccccaaggtataattattcagaggccctgacctttgaccctcagaaaggcttttggtgtcagttactggagggcggtaagaccaagtgcctgggcaagtcaaaaggtagaaaatatccaccaatggaccctgaatctcggaccttcctgtcaaactattacagagaccacaacgtagagttatcaaaacttctgcacaggctgggtcagccattgccatcctggcttcgtcaagaactacagaaggtccggtag

SEQ ID NO: 212669 - DNA, 2619 bp, Artificial Sequence
  derived and/or modified sequence
atgaacttgattgtaaagctgcgaagatccttccgaacgctgattgtgttactcgccacattttgcctggtttctatcgtgatcagtgcttatttcctctatagcggatataaacaggaaatgacattaattgaaacaacagccgaggccgaatgcactgatatcaaaatcctcccctaccggagcatggagctcaaaaccgtgaagccaattgacacgtcaaagacggacccgactgttctgctttttgtggaatcccagtatagccaactgggccaggatataattgctatccttgaatcttcaaggtttcagtaccacatggtgatagcccctggcaagggagacattcctccgctgaccgacaacggaaagggcaagtacaccctcgtcatttacgagaatatcctgaaatatgtgtctatggattcttggaaccgtgaactactggaaaagtactgtgtggaatacagtgtctcaatcatcggcttccataaggccaacgaaaactccttgccaagcactcaactgaaaggattcccgctgaacctgttcaataatctggcactcaaggattgttttgtgaacccacagagccccctgctccatataacaaaggccccaaaggtcgaaaaagggcctctgcccggtgaggattggaccatatttcagtacaatcactctacatatcaaccagtactcttaacagagttacagacggagaagtcactgagctcactgtcttctaaaactttattcgcgactgtgattcaggacttaggtctgcatgacggaattcagcgcgtgctattcggcaataatctcaacttctggctgcacaaactgatttttatagacgccatctcctttttgagcgggaagcgactaacgctcagcctggaccgatacattctcgtggatattgacgatatctttgtgggtaaagagggcacaaggatgaatgtgaaggacgtcaaggctctcttggagacacagaatctgctgaggacccaggtggctaatttcacgttcaacttggggttttccgggaagttttaccacactggcacagaggaagaagacgaaggtgatgatctgcttctgcgaagcgtggatgaattctggtggttccctcatatgtggagccacatgcagccacacctcttccacaatgaaagctcgctggttgagcaaatgatccttaacaaggaattcgctctggaacacggcatacccattaacatgggctatgcagttgcgccacatcacagtggagtgtatccggtgcacatccagctttacgccgcatggaagaaagtctggggaattcaagtgacctcgactgaggagtacccacatctgaaacctgccaggtatcgcaaaggcttcatccacaacagcataatggtgctgccaaggcagacgtgtggcctgtttacacacaccattttttacaaagaataccccggtggccctcaagagctcgacaagtccataagaggtggagagctatttctgacgattctgctaaatccaatcagtatttttatgacccacttgtctaactacggcaacgacaggctgggactatataccttcgtcaacctagtgaactttgtgcagagctggacaaacctgaaattgcagaccctccccccagtgcaactcgcacaccagtattttgaattatttccggagcaaaaggatcccctttggcaaaacccttgtgatgataagcgccataaagatatttggtcgcgtgaaaaaacatgcgaccacttgcccaaatttctagtgatcggaccccagaaaaccgggaccacagccttatacctctttctcctcatgcacccaagtatcatctccaacctgcctagcccgaagacgttcgaggaggtgcaattcttcaacggcaacaattaccacaagggaattgactggtacatggacttcttcccaactccgtctaacaccacatctgactttctgttcgaaaaaagcgctaattattttcacagtgaagaggcccctcgccgagcagcttctttagtccccaaggccaagatcatcaccattttgatcgacccaagtgaccgcgcatattcctggtatcagcatcagagaagtcatgaggacccggctgccctgcggttcaacttctatgaggtcatctcaacgggacactgggcgccaagcgatcttaaaacgctgcaaagaagatgtctggtgcccggttggtacgcagtgcacatagagcggtggctcacctattttgcaacctcccaactgctgattattgatggacagcagctgagatcggaccctgcaacggtcatggacgaggtgcaaaagtttctaggcgtcacccccagatacaactactccgaagccctcacttttgacccacagaagggcttttggtgtcagttgctggagggcggtaagaccaaatgcctgggtaagtctaaagggaggaaataccccccaatggatcctgaatcgcggactttcctttcaaattattatagagaccacaacgtggagctcagcaaacttctgcaccggcttggacaacctctcccatcctggctgcgccaggagctccagaaagtacgatag

SEQ ID NO: 212670 - protein, 201 aa, Artificial Sequence
  derived and/or modified sequence
MEYHPDLENLDEDGYTQLHFDSQSNTRIAVVSEKGSCAASPPWRLIAVILGILCLVILVIAVVLGTMGVLSSPCPPNWIIYEKSCYLFSMSLNSWDGSKRQCWQLGSNLLKIDSSNELGFIVKQVSSQPDNSFWIGLSRPQTEVPWLWEDGSTFSSNLFQIRTTATQENPSPNCVWIHVSVIYDQLCSVPSYSICEKKFSM

SEQ ID NO: 212671 - DNA, 606 bp, Artificial Sequence
  derived and/or modified sequence
atggaataccatccagatctcgagaacctggacgaggacggctatacacagctgcacttcgattcccagagcaataccaggattgccgtcgtctccgaaaaaggtagttgcgcagcctcccctccgtggcgcctgatagcggttatactcgggattctttgtctagtgattttggtaattgccgtagtcctcggtactatgggcgtactctcttctccttgtccccctaactggatcatctacgaaaagagttgctatctcttctcaatgagcctgaacagttgggacggaagcaaacgacaatgctggcagttgggatctaacctccttaaaatcgattcatctaacgaactcggcttcatcgtgaaacaggtgtcatcccagccagacaattcattttggatcggcttgtcccgacctcagaccgaagtgccgtggctatgggaagatggctccacgttttctagtaatctgtttcagatcagaaccaccgctacacaagagaacccttcaccgaattgcgtatggatccacgtgtccgtgatatatgaccagctctgtagtgttccttcatattcaatctgtgaaaaaaaattttccatgtag

SEQ ID NO: 212672 - DNA, 606 bp, Artificial Sequence
  derived and/or modified sequence
atggagtaccacccagacctggagaacctggatgaagatggctacacccagctgcactttgacagccagagcaacaccagaattgctgtggtgtctgagaagggcagctgtgccgccagccccccctggaggctgattgctgtgatcctgggcatcctgtgcctggtgatcctggtgattgctgtggtgctgggcaccatgggcgtgctgagcagcccctgcccccccaactggatcatctatgagaagagctgctacctgttctccatgagcctgaacagctgggatggcagcaagaggcagtgctggcagctgggcagcaacctgctgaagattgacagcagcaatgagctgggcttcatcgtgaagcaggtgagcagccagcctgacaacagcttctggattggcctgagccggccccagacagaggtgccctggctgtgggaggatggcagcaccttcagcagcaacctcttccagatccgcaccacagccacccaggagaaccccagccccaactgtgtgtggatccacgtgtctgtcatctatgaccagctgtgcagcgtgcccagctacagcatctgtgagaagaagttctccatgtag

SEQ ID NO: 212673 - DNA, 606 bp, Artificial Sequence
  derived and/or modified sequence
atggagtaccaccccgacctggagaacctggacgaggacggctacactcagttgcatttcgacagccagtctaacaccaggatagcagtagtgtcggagaaaggcagctgtgcggcatcccccccatggagactgattgctgtgatcttgggcattctgtgcctcgtgattctggttattgccgtcgtcctcggtaccatgggcgtcttaagttcaccgtgccctccaaattggatcatctacgagaaaagttgttatctattctctatgagtctcaacagctgggatgggtccaaacgccagtgttggcagctcggctccaacctgctcaagatagactcatcaaacgagctgggcttcatcgtcaagcaggtgtcgagtcagccagacaattccttttggattggactatctcggccccagacagaggtcccgtggctatgggaggacggcagtacattttcttccaacctattccagattcgcaccacggccacgcaggaaaatccatcacccaactgtgtatggattcacgtatccgtcatctacgatcagctctgttcagtgccatcctatagcatctgtgagaaaaagttctccatgtag

SEQ ID NO: 212674 - DNA, 606 bp, Artificial Sequence
  derived and/or modified sequence
atggagtaccatcctgatttggaaaatctcgacgaggacgggtatacacaactacatttcgacagccagagcaacacccggattgcagttgtgtccgagaagggatcatgcgctgcttcgccaccttggagactgatagcagtcattctgggcatcttgtgtttagttattctggtaatcgctgtggtactgggcaccatgggggtattgtcgtccccttgcccacctaattggatcatatatgagaaatcttgctatctcttcagcatgtctctcaacagctgggacggtagcaagagacagtgctggcagctgggcagcaatttgctgaagatcgactcttcgaatgaactggggtttattgtcaaacaggtatcctcccagccggataacagcttctggatcggcttaagccggccacagacagaagtgccctggttgtgggaggacgggtccaccttctcgagtaatctcttccagattcgtactacggctacccaggaaaatccttccccgaactgcgtttggattcacgtatctgtgatctacgaccagctatgttccgttccaagctactccatttgcgagaagaaattctcaatgtag

SEQ ID NO: 212675 - DNA, 2446 bp, Artificial Sequence
  derived and/or modified sequence
atctggttgaactacttaagcttaatttgttaaactccggtaagtacctagcccacatgatttgactcagagattctcttttgtccacagacagtcatctcaggagcagaaagaaaagagctcccaaatgctatatctattcaggggctctcaagaacaatggaatatcatcctgatttagaaaatttggatgaagatggatatactcaattacacttcgactctcaaagcaataccaggatagctgttgtttcagagaaaggatcgtgtgctgcatctcctccttggcgcctcattgctgtaattttgggaatcctatgcttggtaatactggtgatagctgtggtcctgggtaccatgggggttctttccagcccttgtcctcctaattggattatatatgagaagagctgttatctattcagcatgtcactaaattcctgggatggaagtaaaagacaatgctggcaactgggctctaatctcctaaagatagacagctcaaatgaattgggatttatagtaaaacaagtgtcttcccaacctgataattcattttggataggcctttctcggccccagactgaggtaccatggctctgggaggatggatcaacattctcttctaacttatttcagatcagaaccacagctacccaagaaaacccatctccaaattgtgtatggattcacgtgtcagtcatttatgaccaactgtgtagtgtgccctcatatagtatttgtgagaagaagttttcaatgtaagaggaagggtggagaaggagagagaaatatgtgaggtagtaaggaggacagaaaacagaacagaaaagagtaacagctgaggtcaagataaatgcagaaaatgtttagagagcttggccaactgtaatcttaaccaagaaattgaagggagaggctgtgatttctgtatttgtcgacctacaggtaggctagtattatttttctagttagtagatccctagacatggaatcagggcagccaagcttgagtttttattttttatttatttatttttttgagatagggtctcactttgttacccaggctggagtgcagtggcacaatctcgactcactgcagctatctctcgcctcagcccctcaagtagctgggactacaggtgcatgccaccatgccaggctaatttttggtgttttttgtagagactgggttttgccatgttgaccaagctggtctctaactcctgggcttaagtgatctgcccgccttggcctcccaaagtgctgggattacagatgtgagccaccacacctggccccaagcttgaattttcattctgccattgacttggcatttaccttgggtaagccataagcgaatcttaatttctggctctatcagagttgtttcatgctcaacaatgccattgaagtgcacggtgtgttgccacgatttgaccctcaacttctagcagtatatcagttatgaactgagggtgaaatatatttctgaatagctaaatgaagaaatgggaaaaaatcttcaccacagtcagagcaattttattattttcatcagtatgatcataattatgattatcatcttagtaaaaagcaggaactcctactttttctttatcaattaaatagctcagagagtacatctgccatatctctaatagaatctttttttttttttttttttttgagacagagtttcgctcttgttgcccaggctggagtgcaacggcacgatctcggctcaccgcaacctccgccccctgggttcaagcaattctcctgcctcagcctcccaagtagctgggattacagtcaggcaccaccacacccggctaattttgtatttttttagtagagacagggtttctccatgtcggtcagggtagtcccgaactcctgacctcaagtgatctgcctgcctcggcctcccaagtgctgggattacaggcgtgagccactgcacccagcctagaatcttgtataatatgtaattgtagggaaactgctctcataggaaagttttctgctttttaaatacaaaaatacataaaaatacataaaatctgatgatgaatataaaaaagtaaccaacctcattggaacaagtattaacattttggaatatgttttattagttttgtgatgtactgttttacaatttttaccatttttttcagtaattactgtaaaatggtattattggaatgaaactatatttcctcatgtgctgatttgtcttatttttttcatactttcccactggtgctatttttatttccaatggatatttctgtattactagggaggcatttacagtcctctaatgttgattaatatgtgaaaagaaattgtaccaattttactaaattatgcagtttaaaatggatgattttatgttatgtggatttcatttcaataaaaaaaaactcttatcaaaaaa

SEQ ID NO: 212676 - DNA, 606 bp, Artificial Sequence
  derived and/or modified sequence
atggagtaccaccccgacctggagaacctggacgaggacggctacacccagctgcacttcgacagccagagcaacaccagaatcgccgtggtgagcgagaagggcagctgcgccgccagccccccctggagactgatcgccgtgatcctgggcatcctgtgcctggtgatcctggtgatcgccgtggtgctgggcaccatgggcgtgctgagcagcccctgcccccccaactggatcatctacgagaagagctgctacctgttcagcatgagcctgaacagctgggacggcagcaagagacagtgctggcagctgggcagcaacctgctgaagatcgacagcagcaacgagctgggcttcatcgtgaagcaggtgagcagccagcccgacaacagcttctggatcggcctgagcagaccccagaccgaggtgccctggctgtgggaggacggcagcaccttcagcagcaacctgttccagatcagaaccaccgccacccaggagaaccccagccccaactgcgtgtggatccacgtgagcgtgatctacgaccagctgtgcagcgtgcccagctacagcatctgcgagaagaagttcagcatgtag

SEQ ID NO: 212677 - protein, 494 aa, Artificial Sequence
  derived and/or modified sequence
MEEPQPPRPPASMALLGSQHSGAPSAAGPPGGTSSAATAAVLSFSTVATAALGNLSDASGGGTAAAPGGGGLGGSGAAREAGAAVRRPLGPEAAPLLSHGAAVAAQALVLLLIFLLSSLGNCAVMGVIVKHRQLRTVTNAFILSLSLSDLLTALLCLPAAFLDLFTPPGGSAPAAAAGPWRGFCAASRFFSSCFGIVSTLSVALISLDRYCAIVRPPREKIGRRRALQLLAGAWLTALGFSLPWELLGAPRELAAAQSFHGCLYRTSPDPAQLGAAFSVGLVVACYLLPFLLMCFCHYHICKTVRLSDVRVRPVNTYARVLRFFSEVRTATTVLIMIVFVICCWGPYCFLVLLAAARQAQTMQAPSLLSVVAVWLTWANGAINPVIYAIRNPNISMLLGRNREEGYRTRNVDAFLPSQGPGLQARSRSRLRNRYANRLGACNRMSSSNPASGVAGDVAMWARKNPVVLFCREGPPEPVTAVTKQPKSEAGDTSL

SEQ ID NO: 212678 - protein, 322 aa, Artificial Sequence
  derived and/or modified sequence
MALLGSQHSGAPSAAGPPGGTSSAATAAVLSFSTVATAALGNLSDASGGGTAAAPGGGGLGGSGAAREAGAAVRRPLGPEAAPLLSHGAAVAAQALVLLLIFLLSSLGNCAVMGVIVKHRQLRTVTNAFILSLSLSDLLTALLCLPAAFLDLFTPPGGSAPAAAAGPWRGFCAASRFFSSCFGIVHAQRGAHLVGPLLRYRRPPREKIGRRRALQLLAGAWLTALGFSLPWELLGAPRELAAAQSFHGCLYRTSPDPAQLGAAFSVGLVVACYLLPFLLMCFCHYHICKTVRLSDVRVRPVNTYARVLRSSARCARPPPSSS

SEQ ID NO: 212679 - DNA, 1485 bp, Artificial Sequence
  derived and/or modified sequence
atggaggagccccagccccccagaccccccgccagcatggccctgctgggcagccagcacagcggcgcccccagcgccgccggcccccccggcggcaccagcagcgccgccaccgccgccgtgctgagcttcagcaccgtggccaccgccgccctgggcaacctgagcgacgccagcggcggcggcaccgccgccgcccccggcggcggcggcctgggcggcagcggcgccgccagagaggccggcgccgccgtgagaagacccctgggccccgaggccgcccccctgctgagccacggcgccgccgtggccgcccaggccctggtgctgctgctgatcttcctgctgagcagcctgggcaactgcgccgtgatgggcgtgatcgtgaagcacagacagctgagaaccgtgaccaacgccttcatcctgagcctgagcctgagcgacctgctgaccgccctgctgtgcctgcccgccgccttcctggacctgttcaccccccccggcggcagcgcccccgccgccgccgccggcccctggagaggcttctgcgccgccagcagattcttcagcagctgcttcggcatcgtgagcaccctgagcgtggccctgatcagcctggacagatactgcgccatcgtgagaccccccagagagaagatcggcagaagaagagccctgcagctgctggccggcgcctggctgaccgccctgggcttcagcctgccctgggagctgctgggcgcccccagagagctggccgccgcccagagcttccacggctgcctgtacagaaccagccccgaccccgcccagctgggcgccgccttcagcgtgggcctggtggtggcctgctacctgctgcccttcctgctgatgtgcttctgccactaccacatctgcaagaccgtgagactgagcgacgtgagagtgagacccgtgaacacctacgccagagtgctgagattcttcagcgaggtgagaaccgccaccaccgtgctgatcatgatcgtgttcgtgatctgctgctggggcccctactgcttcctggtgctgctggccgccgccagacaggcccagaccatgcaggcccccagcctgctgagcgtggtggccgtgtggctgacctgggccaacggcgccatcaaccccgtgatctacgccatcagaaaccccaacatcagcatgctgctgggcagaaacagagaggagggctacagaaccagaaacgtggacgccttcctgcccagccagggccccggcctgcaggccagaagcagaagcagactgagaaacagatacgccaacagactgggcgcctgcaacagaatgagcagcagcaaccccgccagcggcgtggccggcgacgtggccatgtgggccagaaagaaccccgtggtgctgttctgcagagagggcccccccgagcccgtgaccgccgtgaccaagcagcccaagagcgaggccggcgacaccagcctgtag

SEQ ID NO: 212680 - DNA, 969 bp, Artificial Sequence
  derived and/or modified sequence
atggccctgctgggcagccagcacagcggcgcccccagcgccgccggcccccccggcggcaccagcagcgccgccaccgccgccgtgctgagcttcagcaccgtggccaccgccgccctgggcaacctgagcgacgccagcggcggcggcaccgccgccgcccccggcggcggcggcctgggcggcagcggcgccgccagagaggccggcgccgccgtgagaagacccctgggccccgaggccgcccccctgctgagccacggcgccgccgtggccgcccaggccctggtgctgctgctgatcttcctgctgagcagcctgggcaactgcgccgtgatgggcgtgatcgtgaagcacagacagctgagaaccgtgaccaacgccttcatcctgagcctgagcctgagcgacctgctgaccgccctgctgtgcctgcccgccgccttcctggacctgttcaccccccccggcggcagcgcccccgccgccgccgccggcccctggagaggcttctgcgccgccagcagattcttcagcagctgcttcggcatcgtgcacgcccagagaggcgcccacctggtgggccccctgctgagatacagaagaccccccagagagaagatcggcagaagaagagccctgcagctgctggccggcgcctggctgaccgccctgggcttcagcctgccctgggagctgctgggcgcccccagagagctggccgccgcccagagcttccacggctgcctgtacagaaccagccccgaccccgcccagctgggcgccgccttcagcgtgggcctggtggtggcctgctacctgctgcccttcctgctgatgtgcttctgccactaccacatctgcaagaccgtgagactgagcgacgtgagagtgagacccgtgaacacctacgccagagtgctgagaagcagcgccagatgcgccagacccccccccagcagcagctag

SEQ ID NO: 212681 - DNA, 4578 bp, Artificial Sequence
  derived and/or modified sequence
ggccgagcccagctccccgcggcggccgctagcccccggccccgagccaccactccgacctagcggccgccgcccccggtgcgggatgaggagatccgcggccgccactgggccccatggaggagccgcagccgccccgcccaccagcgagcatggccttactgggcagccagcactccggcgccccctccgcggccggcccacctggcgggacttcctccgcggccacggcggccgtgctctccttcagcaccgtggcgaccgcggcgctggggaacctgagcgacgcaagcggaggcggcacagctgccgctcccggtggcggcggccttggcgggtccggggcagcgcgggaggcgggggcggcggtgaggcggccgctaggcccggaggcggcgccgctgctgtcgcacggagctgcagtggcggcccaggcgctcgtcctcctgctcatcttcctgctgtctagccttggcaactgcgcggtgatgggggtgattgtgaagcaccggcagctccgcaccgtcaccaacgccttcatcctgtcgctgtccctatcggatctgctcacggcgctgctctgcctgcccgccgccttcctggacctcttcactccgcccgggggttcggcgcctgccgccgccgcggggccctggcgcggcttctgcgccgccagccgcttcttcagctcgtgcttcggcatcgtgtccacgctcagcgtggcgctcatctcgttggaccgttactgcgctatcgtgcggccgccgcgggagaagatcggccgccgccgcgcgctgcagctgctggcgggcgcctggctgacggccctgggcttctccttgccctgggagctgctcggggcgccccgggaactcgcggcggcgcagagcttccacggctgcctctaccggacctccccggaccccgcgcagctgggcgcggccttcagcgtggggctggtggtggcctgctacctgctgcccttcctgctcatgtgcttctgccactaccacatctgcaagacggtgcgcctgtcggacgtgcgcgtgcggccggtgaacacctacgcgcgcgtgctgcgcttcttcagcgaggtgcgcacggccaccaccgtcctcatcatgatcgtcttcgtcatctgctgctgggggccctactgcttcctggtgctgctggccgccgcccggcaggcccagaccatgcaggccccctcgctcctcagcgtggtggccgtctggctgacctgggccaatggggccatcaaccctgtcatctacgccatccgcaatcccaacatttcgatgctcctagggcgcaaccgcgaggagggctaccggactaggaatgtggacgctttcctgcccagccagggcccgggtctgcaagccagaagccgcagtcgccttcgaaaccgctatgccaaccggctgggggcctgcaacaggatgtcctcttccaacccggccagcggagtggcaggggacgtggccatgtgggcccgcaaaaatccagttgtacttttctgccgagagggaccaccagagccggtgacggcagtgaccaaacagcctaaatccgaagctggggataccagcctctaagacggttggaatggccagcttatgaaggcaaatttccactcgcattatttaatgatggaagattctgggggagagttgtggatttcataaagccaaacatttaaagctagagacgggggaggcttaccactttccccaaacaacataaaagacaatgtcccttcttcaaaagtgccaaaaggaatgtaaaatgcaaaaattaaaacaatcttaaaccacataaccaagcattgtgaactgtaagtgccaaaaatgacaaaaataacattcactataactgaaaagctcatattataggaccacactgtgaaacaaacaaaacattgaatgcaaccagtattgttcaactacacagaatttcaggaatgaatggagaccttcagagctgcttgaaagcccctctaaatcgctaccatccaacaaaactttagcttctagagcttgcacctctgacatgctttgggtgcttagattgcaagtggaaaagtcttatccttacacacattggtgcacctcctcaccccaccccctaataacctttgtggaaaatttttaattcataacccatttaaaatcattttaggattttgaaaagctggttattattagataaaattcaaccatctgaaggacaaatagaagtatgaacataaagaaatgtgtcttttaaatgttttccaagattatatgtaaaaattaacattccttccacccgcgtcatacctccaaaatgatcttccttggaaaactttgaagttttatccttactctaacctgttacttttatttctgataaattttggaatgctgctctcagaatgctttcacatttaaaaaaatattttcattgtagaaaatttttgtcttttgaggtaaatttgatttttggatatagccaaaaatgtaatttgaagtcaagttgattgaataaggtgagtgatgccactttatttaaatttttattattttttaaaatgagacctctataaaacaacaaggttgggtttcctacgtggcttttagctaactgaaaacgattccaaagagaaattctaaaactattttgagaagcagcctcttggaattagcgtagacttttccaaatagatcataccctcctacatttagaaatttggtatattttgtattttttaaaatagctgatggttgctttatagctatgacttgtcgaagataatgtatttattaaagggagaataggtgtgggactatatgtaacggtattaaaacacaggcataaagttggagaagaacttcaagcaaactgaaaatatctttagaaatatgcaaatcaaagatgctttttaaatttctatcttagcagaaaagatggttttacaataattcaaaagcgtatgtgaactttctaatgttaaatacgactatacacagaatcatttactcagaatttttttaaatattatttttccctttcttttcctccatcctgccccttttcttcagtatttcatagccttaattgaacaagttatttacagtagatatgaaaagacattagctgtcgtatgaagatttcaatgtgaaatagccagcattttcttcctgtaaagtatttaaatatgtttttaagtatttctttgtttgacaggtgggtacatgtcattattttgtaatcaaaggtggaaatatatgagtcatgtcagagctaaagatgttttaattttttctgcttctcagggtatcatcacaaatcagaagtttgtaaattgtatatattttgctacactcaatgtagtacaaagtagatgagataatccctcccctctagcccttattttataaagcatatacagacttcatgcagctggactaacaaaaacaggtgtctgcggtatttgcctgttaaaggcaaaaaattgtgtattttttggcaccgagtcacttttgggatttagagagaaatgataaagtcttcaattataaaagacatcatagaatagaagtacagttgtgaataaagggcagagggttagagatcttagagtaaggaggtgagcgtgttgcaaaatagtgtgttgcctgagaagaagaattgaaggaaggcattgaaaaataaatgtgatatagaataaacctacctggtgagtgaagggaaaatctgagagattggaagtgacaaggtgatggcatgaaggactttaaggaagaaaaggaattccagccctaccttttcggtggcaggaagttttaggaaaggcatggcttgtgaaagaggccattctgttagtggctccgagagtcatggtaggcaagaattggaggggaaaaagagaaaattgttcataaattactgaacaatttacaatgctctaaattgtttgtttttaatccaaggctatccaactatttagtggtagaactaggatttgaactgcagtctgtttggcctcagaactccatgtttgtttctctctatccccacagaagtctacaggtaaggaaatcaatcatgatcaattatggtactgtcatcattatcatcatcgtgatcatcatctaccatttttgtttcctactttatataagggcaacttcctgggagctaaggctactaaaaggtagaagccacagtactcatctgcagagggcttacagcctcagcaaggaccttgtggctttgtaacaacaatcagccataacaagtttacttgtggaaaagaaaaggtgtagcactttcagaagaggctatcaaagaaaagagatgaacttggaagcaagagatacgcaggtataagtcagccacccatttgacccagtgtaaatacttagacaatcaatacctcaaaaggtgaagaaagaatgattctcaaaataatctaagacttcgacctttcgttgtgcttactatgagtatgcaattatagtgacttcatgggaaaacgagaaagaaaagctatgaaatattggaatggattaaatattgagtactatgtaa

SEQ ID NO: 212682 - DNA, 2540 bp, Artificial Sequence
  derived and/or modified sequence
gccgagcccagctccccgcggcggccgctagcccccggccccgagccaccactccgacctagcggccgccgcccccggtgcgggatgaggagatccgcggccgccactgggccccatggaggagccgcagccgccccgcccaccagcgagcatggccttactgggcagccagcactccggcgccccctccgcggccggcccacctggcgggacttcctccgcggccacggcggccgtgctctccttcagcaccgtggcgaccgcggcgctggggaacctgagcgacgcaagcggaggcggcacagctgccgctcccggtggcggcggccttggcgggtccggggcagcgcgggaggcgggggcggcggtgaggcggccgctaggcccggaggcggcgccgctgctgtcgcacggagctgcagtggcggcccaggcgctcgtcctcctgctcatcttcctgctgtctagccttggcaactgcgcggtgatgggggtgattgtgaagcaccggcagctccgcaccgtcaccaacgccttcatcctgtcgctgtccctatcggatctgctcacggcgctgctctgcctgcccgccgccttcctggacctcttcactccgcccgggggttcggcgcctgccgccgccgcggggccctggcgcggcttctgcgccgccagccgcttcttcagctcgtgcttcggcatcgtgtccacgctcagcgtggcgctcatctcgttggaccgttactgcgctatcgtgcggccgccgcgggagaagatcggccgccgccgcgcgctgcagctgctggcgggcgcctggctgacggccctgggcttctccttgccctgggagctgctcggggcgccccgggaactcgcggcggcgcagagcttccacggctgcctctaccggacctccccggaccccgcgcagctgggcgcggccttcagcgtggggctggtggtggcctgctacctgctgcccttcctgctcatgtgcttctgccactaccacatctgcaagacggtgcgcctgtcggacgtgcgcgtgcggccggtgaacacctacgcgcgcgtgctgcgcttcttcagcgaggtgcgcacggccaccaccgtcctcatcatgatcgtcttcgtcatctgctgctgggggccctactgcttcctggtgctgctggccgccgcccggcaggcccagaccatgcaggccccctcgctcctcagcgtggtggccgtctggctgacctgggccaatggggccatcaaccctgtcatctacgccatccgcaatcccaacatttcgatgctcctagggcgcaaccgcgaggagggctaccggactaggaatgtggacgctttcctgcccagccagggcccgggtctgcaagccagaagccgcagtcgccttcgaaaccgctatgccaaccggctgggggcctgcaacaggatgtcctcttccaacccggccagcggagtggcaggggacgtggccatgtgggcccgcaaaaatccagttgtacttttctgccgagagggaccaccagagccggtgacggcagtgaccaaacagcctaaatccgaagctggggataccagcctctaagacggttggaatggccagcttatgaaggcaaatttccactcgcattatttaatgatggaagattctgggggagagttgtggatttcataaagccaaacatttaaagctagagacgggggaggcttaccactttccccaaacaacataaaagacaatgtcccttcttcaaaagtgccaaaaggaatgtaaaatgcaaaaattaaaacaatcttaaaccacataaccaagcattgtgaactgctatccaactatttagtggtagaactaggatttgaactgcagtctgtttggcctcagaactccatgtttgtttctctctatccccacagaagtctacagggcaacttcctgggagctaaggctactaaaaggtagaagccacagtactcatctgcagagggcttacagcctcagcaaggaccttgtggctttgtaacaacaatcagccataacaagtttacttgtggaaaagaaaaggtgtagcactttcagaagaggctatcaaagaaaagagatgaacttggaagcaagagatacgcagctcagcatgacagagactccattccaggtggaaaaagcacatggctctttcttctccgagatcccaggactatcttattttcctcagaggggcaggttacaagaacttcacatctctcaggctacatgttgcaaaggttaaattccaggttgtacgatttttcacttccaccatcaagttatgagtgtgattgtttccctgcagttttgccaatagagtgattttagactatttacatcgtgggttacaaccaatgtcagttattctggggaaacccaactgccatgttgtgaggacactcaagcagccctatggaggagcccacatggtgagtgaataactacaagctgactctaattttaaaaaataaaaattttatctctcaccaattttaaaatg

SEQ ID NO: 212683 - DNA, 1483 bp, Artificial Sequence
  derived and/or modified sequence
ggccgccgcccccggtgcgggatgaggagatccgcggccgccactgggccccatggaggagccgcagccgccccgcccaccagcgagcatggccttactgggcagccagcactccggcgccccctccgcggccggcccacctggcgggacttcctccgcggccacggcggccgtgctctccttcagcaccgtggcgaccgcggcgctggggaacctgagcgacgcaagcggaggcggcacagctgccgctcccggtggcggcggccttggcgggtccggggcagcgcgggaggcgggggcggcggtgaggcggccgctaggcccggaggcggcgccgctgctgtcgcacggagctgcagtggcggcccaggcgctcgtcctcctgctcatcttcctgctgtctagccttggcaactgcgcggtgatgggggtgattgtgaagcaccggcagctccgcaccgtcaccaacgccttcatcctgtcgctgtccctatcggatctgctcacggcgctgctctgcctgcccgccgccttcctggacctcttcactccgcccgggggttcggcgcctgccgccgccgcggggccctggcgcggcttctgcgccgccagccgcttcttcagctcgtgcttcggcatcgtgcacgctcagcgtggcgctcatctcgttggaccgttactgcgctatcgtcggccgccgcgggagaagatcggccgccgccgcgcgctgcagctgctggcgggcgcctggctgacggccctgggcttctccttgccctgggagctgctcggggcgccccgggaactcgcggcggcgcagagcttccacggctgcctctaccggacctccccggaccccgcgcagctgggcgcggccttcagcgtggggctggtggtggcctgctacctgctgcccttcctgctcatgtgcttctgccactaccacatctgcaagacggtgcgcctgtcggacgtgcgcgtgcggccggtgaacacctacgcgcgcgtgctgcgctcttcagcgaggtgcgcacggccaccaccgtcctcatcatgatcgtcttcgtcatctgctgctgggggccctactgcttcctggtgctgctggccgccgcccggcaggcccagaccatgcaggccccctcgctcctcagcgtggtggccgtctggctgacctgggccaatggggccatcaaccctgtcatctacgccatccgcaatcccaacatttcgatgctcctagggcgcaaccgcgaggagggctaccggactaggaatgtggacgctttcctgcccagccagggcccgggtctgcaagccagaagccgcagtcgccttcgaaaccgctatgccaaccggctgggggcctgcaacaggatgtcctcttccaacccggccagcggagtggcaggggacgtggccatgtgggcccgcaaaaatccagttgtacttttctgccgagagggaccaccagagccggtga

SEQ ID NO: 212684 - DNA, 1485 bp, Artificial Sequence
  derived and/or modified sequence
atggaagagccacaacccccaaggccacccgccagcatggctctcctcggctctcagcactccggagcccccagcgctgctggcccaccaggcgggacatcctccgctgcaaccgccgccgttctctccttttctaccgtagctacagcagctcttggaaaccttagcgatgccagcgggggcggcacagccgcggctcccggaggcgggggactcggcggttccggggctgcccgcgaagccggagcggcagtacggcgtccactcggacctgaggctgcccccctgctttcacacggagctgccgttgcggcccaggcacttgtattgctgttgatatttctgctctctagtttagggaattgcgcggtgatgggagtcatcgttaaacaccgacagctcagaacagtgaccaatgcgtttattctgagcctcagcctaagtgacctcctcaccgcactgctttgcctgccggctgcgtttctcgacctgttcacacctccaggcggatcagcgcccgcagctgccgcgggaccatggagaggcttttgtgctgcttcaagatttttttcatcctgcttcggcatcgttagcacactgtccgtggccctgatctctcttgataggtactgcgccattgtgcgacctccccgggagaagataggccggcggagagccttgcagttgctggctggtgcatggctcaccgccctggggttctcgctgccgtgggaattgctgggagccccaagagagctggccgctgcccaatcctttcatggctgcctatatcgtacatcaccggatcccgctcagttgggcgccgcattttcagttggtcttgtggttgcctgttatctcctcccttttctcttaatgtgcttttgtcactaccatatctgcaagacagtgagattatctgacgtcagggtgcggccagttaatacatacgctagggtgctgcgctttttttcagaggtaagaaccgcgactacagtgctgatcatgatcgtcttcgtgatttgctgttgggggccctactgctttcttgttctcttggcagctgcgcgccaggcgcagacaatgcaagcaccttctctcttgagtgtggtggccgtatggctgacctgggcaaacggggccattaaccctgtgatttatgctattcgaaacccaaatatctctatgctgctgggccgtaatcgggaggaaggctatagaacacgcaacgtggatgctttcctaccatcgcaagggcccggactgcaggccaggagtaggtcccggctccgcaatcgctatgccaaccggctcggagcctgtaatagaatgagttcatccaaccccgcaagtggcgtggcaggcgacgtggcaatgtgggcccggaagaacccagtggtcctgttttgcagggaggggccaccggaaccagtgactgccgtaactaagcagccaaaatctgaggctggcgatactagcctctag

SEQ ID NO: 212685 - DNA, 1485 bp, Artificial Sequence
  derived and/or modified sequence
atggaggaacctcagccccctagaccccccgccagcatggccttactaggatctcagcatagcggtgcaccatcagccgcaggaccaccagggggaactagctctgccgctacagccgcggtgttgagttttagtaccgttgcaaccgcagccctgggtaatttgtctgacgctagcggcgggggcactgccgccgcccctggcggtggcggcttgggtggctccggtgccgcaagggaggcaggcgccgccgtccgccgccctcttggccctgaggctgcgcccctcctgtctcatggagcagctgtggctgcccaggccttggtgctattgctgatcttcctgctctcatcgctgggcaattgcgccgtaatgggcgtgattgttaagcacagacagctgcgcacggttacgaacgcattcattttgtccctctctttgagcgatctcctgaccgctctcctctgtctgccagcggctttcctggacttgtttactcctccaggcgggtccgcgcctgcagccgctgcaggtccatggcgcgggttctgcgccgcttctaggttcttctccagctgcttcggtatcgtgagtaccttgtcagtggcattgatcagcttggatcggtactgcgccatcgtgagaccccctcgagaaaaaattggaagaagacgtgctctgcagttattagctggggcgtggctgactgctctggggttcagtcttccatgggaactgttaggggctccgcgcgagctagccgccgctcagtctttccacggatgcctttataggacgtcccctgatcctgcacaactgggggctgcattcagcgtggggctcgtggtcgcatgctatctacttccctttctgctgatgtgtttttgtcactaccacatctgtaagacagtgcggctgtccgatgtgcgtgtaagacctgttaatacctacgccagagttcttagatttttctcagaggttcggacagcgacaactgtcctgattatgattgtcttcgtcatatgctgctggggcccctactgttttctggtgctactggcagccgcccgccaagcccagaccatgcaggctccctccctcctgagcgttgtagccgtgtggctgacttgggcaaatggcgctatcaaccccgtcatctacgctatccgaaacccaaacatttcaatgctcttaggacgtaaccgtgaggaaggctaccgcacaagaaacgtggatgcttttcttcccagtcagggcccagggctccaggccagatctcggtcccgattgcgcaaccgttatgcgaaccgtctgggagcctgtaaccgaatgagcagctctaacccagccagtggcgttgcaggggacgtggcaatgtgggccagaaaaaacccagtcgtactgttttgtcgggaaggccccccagagcctgtgaccgctgttactaaacagccaaagtccgaggctggagacacctccctgtag

SEQ ID NO: 212686 - DNA, 969 bp, Artificial Sequence
  derived and/or modified sequence
atggccctcctgggcagccagcatagcggcgcaccgagtgccgcgggtccccccgggggaacttccagtgccgccaccgcggcagtgttgtcctttagcaccgtcgcgactgctgctctggggaacctgtccgacgctagtggaggtgggacggccgccgcgcctgggggaggggggctgggaggctccggtgcggccagggaggccggcgccgcagtgagaaggcccctaggccctgaagccgcccctctactgagtcatggtgccgctgttgcagcccaagctctagtcctgctgctaattttcctgctcagcagtctgggtaattgtgcagtgatgggggtgattgtaaagcaccgtcagttgcgcaccgtaacaaatgccttcattctgtcactgagcctgagcgacttgctcactgctttactgtgcctccctgctgcctttctggacctgttcacacccccaggggggtccgctcctgcagcggccgccggcccctggcgggggttctgcgctgcttctcggttcttcagttcatgcttcggaatcgtgcacgctcagcggggggcccatcttgtgggacccttgctgagatacaggcgcccccctagagaaaagatcggccgcaggagggcactccaactcctggcaggcgcttggctaaccgccctcggcttttccctgccatgggaactgctgggcgccccccgagagctggctgccgcccagagttttcacggctgcctatacagaacatcacctgaccctgctcagcttggggcagctttttctgtaggcctagtagtcgcctgttacctgctgcctttcttactgatgtgcttttgtcattaccacatttgtaaaacggtccggctgtcagatgtgagagtccggcccgtgaacacttacgcaagagtactgcgaagctccgcacgctgtgctcgaccccctccttccagctcatag

SEQ ID NO: 212687 - DNA, 1485 bp, Artificial Sequence
  derived and/or modified sequence
atggaggagccccagcccccccggcccccagcctccatggccctgctgggcagccagcacagcggggcccccagcgctgctggccccccaggcggcaccagcagcgctgccacagctgctgtgctgtccttcagcacagtggccacagctgccctgggcaacctgagtgatgccagcggcggcggcacagctgctgcccctgggggcggcggcctgggcggcagcggggccgcccgggaggccggggctgctgtgcggcggcccctgggccctgaggccgcccccctgctgagccatggagctgctgtggccgcccaggccctggtgctgctgctgatcttcctgctgagcagcctgggcaactgtgctgtgatgggcgtcatcgtgaagcaccggcagctgaggacagtgaccaatgccttcatcctgagcctgagcctgagtgacctgctgacagccctgctgtgcctgcctgctgccttcctggacctcttcaccccacctgggggcagcgccccagctgctgctgctggcccctggaggggcttctgtgccgccagccgcttcttcagcagctgcttcggcatcgtgtccaccctgtctgtggccctgatcagcctggaccgctactgtgccatcgtgcggcccccccgggagaagattggaagaagaagagccctgcagctgctggccggggcctggctgacagccctgggcttcagcctgccctgggagctgctgggcgccccccgggagctggccgccgcccagagcttccacggctgcctgtaccgcaccagcccagaccctgcccagctgggcgccgccttctctgtgggcctggtggtggcctgctacctgctgcccttcctgctgatgtgcttctgccactaccacatctgcaagacagtgcggctgagtgatgtgcgggtgcggcctgtgaacacctacgcccgggtgctgcgcttcttcagcgaggtgaggacagccaccaccgtgctgatcatgattgtgtttgtgatctgctgctggggcccctactgcttcctggtgctgctggccgccgcccggcaggcccagaccatgcaggcccccagcctgctgtctgtggtggccgtgtggctgacctgggccaatggagccatcaaccctgtgatctatgccatccggaaccccaacatctccatgctgctgggcaggaaccgggaggagggctaccgcaccagaaatgtggatgccttcctgcccagccagggccctggcctgcaggcccggagccgcagccggctgaggaacagatatgccaaccggctgggcgcctgcaacaggatgagcagcagcaacccagccagcggcgtggccggagatgtggccatgtgggccaggaagaaccctgtggtgctcttctgccgggagggccccccagagcctgtgacagctgtgaccaagcagcccaagtctgaggccggggacaccagcctgtag

SEQ ID NO: 212688 - DNA, 969 bp, Artificial Sequence
  derived and/or modified sequence
atggccctgctgggcagccagcacagcggggcccccagcgctgctggccccccaggcggcaccagcagcgctgccacagctgctgtgctgtccttcagcacagtggccacagctgccctgggcaacctgagtgatgccagcggcggcggcacagctgctgcccctgggggcggcggcctgggcggcagcggggccgcccgggaggccggggctgctgtgcggcggcccctgggccctgaggccgcccccctgctgagccatggagctgctgtggccgcccaggccctggtgctgctgctgatcttcctgctgagcagcctgggcaactgtgctgtgatgggcgtcatcgtgaagcaccggcagctgaggacagtgaccaatgccttcatcctgagcctgagcctgagtgacctgctgacagccctgctgtgcctgcctgctgccttcctggacctcttcaccccacctgggggcagcgccccagctgctgctgctggcccctggaggggcttctgtgccgccagccgcttcttcagcagctgcttcggcatcgtgcacgcccagagaggagcccacctggtgggccccctgctgcgctacagaagaccaccccgggagaagattggaagaagaagagccctgcagctgctggccggggcctggctgacagccctgggcttcagcctgccctgggagctgctgggcgccccccgggagctggccgccgcccagagcttccacggctgcctgtaccgcaccagcccagaccctgcccagctgggcgccgccttctctgtgggcctggtggtggcctgctacctgctgcccttcctgctgatgtgcttctgccactaccacatctgcaagacagtgcggctgagtgatgtgcgggtgcggcctgtgaacacctacgcccgggtgctgcggagcagcgcccgctgtgcccggcccccacccagcagcagctag

SEQ ID NO: 212689 - DNA, 1485 bp, Artificial Sequence
  derived and/or modified sequence
atggaggagccccagcccccccggccccccgccagcatggccctgctgggcagtcagcacagtggcgctccctccgccgcgggtccgccgggtggcacttcctccgcggccacagcagccgtcttgtcattctcgacggtagcaaccgccgccctgggtaacctgtccgacgcatccggtggaggcaccgcggctgcgcctggcggcgggggattgggcggaagcggggctgcccgggaagctggggctgctgtgagaaggcctctgggtccagaagctgcacctcttttgagtcatggtgcggctgtggcagctcaggcactggtgctgctcctgattttccttttgtcttctctggggaactgcgctgtgatgggcgtcatagtgaaacataggcagctgaggacggtgaccaatgcctttatcctctctctcagtctgtccgatctcctgaccgctctgctgtgtctacccgctgcttttctggacctatttacaccacctggtgggtctgctcctgccgccgccgccggcccatggagaggattctgcgccgcttcccgtttcttttcctcttgtttcggtattgtgagtaccctcagcgttgccctcatttctcttgacagatactgcgctattgtgcgcccccccagagagaagattgggcggaggcgggccctgcaattgctggccggggcttggctgaccgccctaggcttctccctcccgtgggagctattaggcgcccctcgggagctagcagctgcccagagtttccacggctgtctctatagaacgtctcctgatcctgcccagctcggggcagcattctctgtggggctggtagtcgcatgctacttgctgccattcttactcatgtgcttttgtcattatcatatttgcaagacagtccgcctaagtgacgttcgtgttcgccccgtcaacacctatgccagagtgctccgtttctttagcgaggtccgaaccgctaccacagtcctaatcatgatcgtttttgtgatttgctgctgggggccgtactgttttctcgtgttgctggccgccgcccgccaagcccagacaatgcaagccccaagtcttctgagtgtcgtcgccgtctggctgacttgggctaatggtgcgattaatccagtgatttatgcaatccgtaaccccaatatcagcatgctcctgggtaggaacagagaggaggggtaccgcaccagaaacgttgatgcattcctgccctctcaagggccggggctgcaggccaggagtaggagccgtctgcggaatcggtatgctaaccgcctgggggcctgcaatcgcatgagttcttctaatcctgcttccggtgtcgcaggggacgtggctatgtgggccaggaaaaatcccgtggtcctgttttgtcgtgaaggacctccagagcctgtaacggctgtgacaaaacaaccgaagtccgaagcgggagatacaagcttgtag

SEQ ID NO: 212690 - DNA, 1485 bp, Artificial Sequence
  derived and/or modified sequence
atggaggagccccagcccccccggccccccgccagcatggccctgttgggaagccagcattcaggtgcaccatctgctgccggacctccagggggcacttcctcagctgccacggctgcggtcctgtcattttcaacggtggcaacagctgctcttggtaatctatcagatgctagtggaggcggaacagcagcagctccagggggaggaggtcttgggggctccggcgccgcgcgcgaagccggtgctgccgtaagaagacccctcggtccggaggcggcaccactcctgagccacggtgccgcagtcgcagcccaggcgttggttctactccttatcttcctgctgagctctctcggcaactgtgcagtgatgggcgtcattgtgaaacaccgtcaactacgcaccgtgactaatgcctttatactcagcttgtctctctccgacctcctcacagcactactgtgtctgccagcggccttcttggatctgtttacccccccagggggaagtgcccctgctgccgctgccggcccctggagaggcttttgcgccgcatcccgttttttctcaagttgttttggcatcgtgtcaacactgagcgttgccctgatatctctagatcgctattgtgctatcgtccggcctccccgagagaagatcggcagaagacgggccctgcaactcctcgccggagcctggctgaccgctctgggcttctcactgccttgggaacttctgggcgcaccaagagaattggcggcagctcaaagctttcacgggtgtttgtatcggacatccccagatcccgcccaattaggggctgcgttctccgtggggctggtggtcgcttgttacctgttgccattcctgctgatgtgcttttgtcattaccacatctgcaagacagtgcgtctcagcgacgtgagggtgcggcccgtgaatacatacgcccgcgtgctcagatttttttctgaggtacgtaccgcaaccactgtgctgattatgattgtgttcgtcatctgttgttgggggccctattgcttcctggttttgctagctgccgccaggcaagcccagactatgcaagctccgtctctgctgtccgttgttgccgtctggctgacctgggcgaatggtgctatcaacccagtgatctacgccatccggaatcctaatataagcatgctcctggggcggaaccgagaggagggctaccgcacaaggaatgtggatgcgtttcttcccagtcagggccctggtctccaggcacggtctcgaagcaggctgaggaaccgctatgctaatcggctaggtgcttgtaacaggatgagcagttctaatcccgcatcaggcgttgcaggagacgtggccatgtgggccagaaaaaatccagtggtgctcttttgccgcgaaggcccccccgagccagtcactgccgtcaccaagcagcccaagtcagaggcaggcgacacgtccctgtag

SEQ ID NO: 212691 - DNA, 969 bp, Artificial Sequence
  derived and/or modified sequence
atggccctgctgggcagccagcacagcggcgcccccagcgccgccggaccaccaggcgggactagctctgctgccaccgccgctgtgttatcgttttcgacagtcgctaccgctgcactaggcaatctgtctgacgcatccggggggggaacagccgctgctcccggaggcgggggtctgggaggctccggcgctgctcgggaggcaggagccgctgtccgccgacccctaggccccgaggctgcccccctgctgagccacggtgcagccgtcgcagctcaggccctggttctgctactgatttttttactcagttccctgggtaactgtgcagttatgggggtgattgtcaaacaccgccagcttcggaccgtgacaaacgcattcatcttatcactgtccctcagcgatcttcttaccgccctactgtgcctgccagccgcgttcctcgacctcttcactccccctggcggcagcgcccctgctgccgccgctggcccttggaggggtttctgtgcagcaagcaggttcttttcctcttgctttgggattgtgcatgctcagagaggcgcccacttggtcggacccttactgagatatcgtcggccgccacgagagaaaattggccgacgccgcgcactgcaattgctggccggcgcctggttgaccgccttgggattctcactgccctgggagctgttaggagctccacgcgagcttgccgcggcccaatctttccatggctgtctctaccgaacatctcctgaccctgctcagctgggggcagctttcagcgttggacttgttgttgcctgttacttgttgcctttcctcctaatgtgcttctgccactatcacatttgcaagactgttcggctcagtgacgttagagtgcggccggtgaatacctacgcacgcgtactgcgatctagcgccaggtgtgcacgcccacctccttctagctcctag

SEQ ID NO: 212692 - DNA, 1485 bp, Artificial Sequence
  derived and/or modified sequence
atggaggagccccagcctcctcgcccacctgcatcaatggcactgttagggagccagcacagcggagccccaagcgctgcaggtcctccaggaggtactagttctgccgctactgccgctgttctgtccttttctacagttgccaccgcagcactaggaaatttaagtgacgcctcaggtggaggaaccgcagccgcacccggtggagggggattgggcggaagtggtgccgcaagggaggcgggagcagccgtacggcgtcccctgggccctgaggctgcacctcttctgtcccacggcgcagccgttgccgcacaggccctggtgctgctcctaattttcttattatcctctctgggtaactgtgcggtgatgggagtcattgttaagcatcggcagttgcgtacagttaccaatgctttcattctttccctgagcctgagcgatctgctcacagctctcctctgcctccccgctgcctttcttgacctctttacccccccaggcggttcagcccctgccgcagcagctggcccatggagagggttctgtgcagccagcagattttttagttcttgctttggcatcgtgagcactctgagcgtggccctgatttcacttgaccggtactgcgccatcgtccgtcccccaagggagaagatcgggcgacgtagagcactgcagcttctggctggtgcatggctgaccgcactgggcttcagtttaccctgggagctgctgggagctccgcgtgagttagccgctgcccagagcttccacggttgcttataccggacctctcctgaccccgctcaacttggtgccgcattcagtgtggggcttgtcgtggcctgctatctattgccgttccttctgatgtgcttttgccactatcacatctgtaaaacggtgcgtctcagcgatgtccgcgtacgaccagtgaatacctacgctagagtccttaggttcttcagcgaggttcggacagcaactaccgtgctgataatgatagtgtttgtaatatgttgctggggcccttactgctttttagtcttattagccgctgctcgtcaggcccagactatgcaggcaccatctctgctgagtgtggtcgccgtttggttgacttgggctaacggagctatcaatcctgtgatttatgctattcggaatcctaacatctctatgctgctggggagaaaccgcgaggaaggatacagaacacggaacgtggacgcctttctgcccagtcaagggccagggctgcaggccagaagcagatcacggctgcgaaaccgatacgcaaacagactcggcgcttgtaatcgcatgagttcctctaacccagccagcggggtggctggcgacgtggccatgtgggccaggaagaatcctgtcgtcttgttttgcagagagggaccccctgaacctgtgacggcagtcaccaaacagccaaaaagtgaggccggagataccagtctctag

SEQ ID NO: 212693 - DNA, 1485 bp, Artificial Sequence
  derived and/or modified sequence
atggaagaacctcagccgccaagaccccctgcgtcaatggctctcctgggctctcagcattccggtgccccttccgccgcagggccacctggcggtacgagctctgccgcaacagccgctgttctgtcattctcaaccgttgcaacggccgcactgggcaatctgagcgatgctagcgggggaggaactgctgccgctcccggtggtggcggactgggtgggagcggagccgcaagggaagccggtgcggcagtgaggcggcctttggggccagaggcagcacccctgttgtcgcacggggctgccgtcgctgcccaagcgctggtactcctgcttatattcctgctttccagtctgggtaattgtgctgtcatgggtgtgattgtgaaacataggcagctgagaaccgtgaccaatgcctttatactgtcactgagtctttccgatctgctgactgccttactgtgcctgccggcagccttcctagacctgttcacgcctcccggaggcagtgccccagctgccgctgccggtccatggcgtggattttgtgcagccagtaggtttttctcctcctgttttgggatcgtgtctaccctgtcagtcgccctgattagtctggataggtattgtgctattgtgcggcctccacgcgaaaaaatcggcagacgtcgagcactccagctcttggctggcgcttggctgaccgctctgggattcagcctcccatgggagcttctcggtgccccacgagaacttgcagcagctcagagctttcacggatgtctgtacagaacatcccccgaccctgcccagctgggagctgcattttctgtgggactggtggtggcttgttacctgctcccgttcctcttgatgtgcttctgccattaccacatttgcaaaacagttcgcctttccgatgttagagtacggcctgttaatacatacgcaagagtgttgcgttttttcagtgaggtgaggacagccactacggtactgattatgatcgtgtttgtgatctgttgctgggggccatactgtttcctggtcctgctggcagctgcgagacaggcacagactatgcaagctcccagccttctgtctgtggtggcagtctggttgacgtgggcaaatggcgctatcaatcccgtgatctatgccatccggaacccaaacatttccatgctgcttggcagaaaccgtgaagaaggttaccgcacaagaaatgttgacgcgtttctcccttcacagggtcctgggttgcaagccaggtcaaggtccaggctcagaaatcgctatgctaaccggctgggggcatgtaacaggatgtccagtagcaacccagcctccggtgtcgcgggagatgtggccatgtgggcaagaaaaaaccctgtggtactgttttgccgtgaaggaccgccagagcccgtgaccgccgttaccaagcagccaaagtctgaagcaggagatacctcactgtag

SEQ ID NO: 212694 - DNA, 969 bp, Artificial Sequence
  derived and/or modified sequence
atggcactcctgggttcccaacacagcggcgctcctagtgctgccggacctcctgggggaacatcatccgccgctaccgcagctgtccttagcttctccacagtcgctaccgccgctctgggtaacctgagcgatgcaagcgggggtggcaccgctgccgctcccggaggcggagggttgggagggagtggcgcagctcgagaagcaggggctgccgtgcgacggcctctgggaccggaggccgctccactcctgtctcatggtgcagcagttgcagcccaggcactggtgctcctgctaatatttctgttgtcctctctgggaaactgcgccgtgatgggggtgatcgtgaaacatcgccagctccgcacagttacaaacgcctttatcttaagcctatctctcagcgacttgctgaccgccttactgtgtctgcccgctgcctttcttgatctgttcacgcctcccggaggcagtgcaccagcagcggctgctggaccctggagaggattttgcgcagcatccagattttttagctcctgctttgggatcgtgcatgcccagcgtggagcccacctcgtgggtcctctcctgcggtatcgaagacctcccagggaaaaaatagggcgtcggagagcactccagcttcttgccggagcatggctgaccgcactgggtttttctttgccttgggaactgctgggcgcacccagagagctggccgcagcccagtcttttcatggctgcctctaccgcacatcacccgaccccgcacagctgggagccgctttctctgtgggcttggtggtggcttgttacctgctgccatttctcttaatgtgtttttgtcattatcacatctgtaaaactgtgcgtctcagcgacgtgcgagtcagacctgttaatacatacgccagggtactccgcagctccgcaagatgcgcgagacccccaccgagttcctcatag

SEQ ID NO: 212695 - protein, 361 aa, Artificial Sequence
  derived and/or modified sequence
MAWQGWPAAWQWVAGCWLLLVLVLVLLVSPRGCRARRGLRGLLMAHSQRLLFRIGYSLYTRTWLGYLFYRQQLRRARNRYPKGHSKTQPRLFNGVKVLPIPVLSDNYSYLIIDTQAQLAVAVDPSDPRAVQASIEKEGVTLVAILCTHKHWDHSGGNRDLSRRHRDCRVYGSPQDGIPYLTHPLCHQDVVSVGRLQIRALATPGHTQGHLVYLLDGEPYKGPSCLFSGDLLFLSGCGRTFEGNAETMLSSLDTVLGLGDDTLLWPGHEYAEENLGFAGVVEPENLARERKMQWVQRQRLERKGTCPSTLGEERSYNPFLRTHCLALQEALGPGPGPTGDDDYSRAQLLEELRRLKDMHKSK

SEQ ID NO: 212696 - DNA, 1086 bp, Artificial Sequence
  derived and/or modified sequence
atggcctggcaggggtggcctgccgcttggcagtgggtagccggatgttggcttctccttgtacttgtcctggtcctcctggtaagccccaggggctgccgcgctcgaaggggcctgcgaggactgctaatggcgcattcccagaggctcctttttaggatcggatactccctttatacaaggacttggcttggctacctgttctataggcagcagcttaggcgtgctaggaataggtatccaaagggccatagtaaaacacagccgcggctgttcaacggggttaaagtgctccctataccagtgttgtctgacaactactcatatctgatcatcgacacgcaagcccagctagccgtagctgtcgaccctagtgacccacgtgccgtacaagcatccatagagaaggagggcgtaacactggtcgctatactgtgcacacataagcactgggatcatagcggaggaaaccgggacctgtctcgcaggcatagagactgccgggtgtatgggtccccacaagacggaattccttacctgacccacccgctctgtcaccaggatgtcgtgagtgtggggagattacaaatccgcgctctggctactccggggcacactcagggccatttggtctacctgctggatggagagccctataaggggccatcttgtcttttttcaggagatttgctatttctctcagggtgtggaagaacctttgagggtaatgcagagacaatgctttcttcacttgacaccgttctcggactcggtgatgatactctattgtggcccggtcacgaatacgcggaagagaatctgggctttgcaggggtggtggaacctgagaacctggccagagaaaggaagatgcagtgggtgcagagacaacggctggagcgcaaaggcacatgtccatcaaccctcggcgaagagaggagctacaatccctttttacgtacacactgtcttgcgctgcaagaagcacttggacccggaccgggtcctacaggtgatgatgactattctcgggcccagctcttggaggaactcagacggctgaaagatatgcataagagcaagtag

SEQ ID NO: 212697 - DNA, 1086 bp, Artificial Sequence
  derived and/or modified sequence
atggcctggcagggctggccagctgcctggcagtgggtggccggctgctggctgctgctggtgctggtgctggtgctgctggtgagcccccggggctgccgggcccggcggggcctgcggggcctgctgatggcccacagccagaggctgctcttccgcatcggctacagcctgtacaccaggacctggctgggctacctgttctaccggcagcagctgcggcgggccaggaaccgctaccccaagggccacagcaagacccagcccaggctcttcaatggagtgaaggtgctgcccatccctgtgctgagtgacaactacagctacctgatcatcgacacccaggcccagctggccgtggccgtggaccccagcgaccccagggctgtgcaggccagcattgagaaggagggcgtgaccctggtggccatcctgtgcacccacaagcactgggaccacagcggcggcaacagagacctgagccgccgccaccgggactgccgggtgtatggcagcccccaggacggcatcccctacctgacccaccccctgtgccaccaggatgtggtgtctgtgggccgcctgcagatccgggccctggccaccccaggccacacccagggccacctggtgtacctgctggatggagagccctacaagggccccagctgcctcttcagcggggacctgctcttcctgagcggctgcggccgcacctttgagggcaatgctgagaccatgctgagcagcctggacacagtgctgggcctgggagatgacaccctgctgtggccaggccatgaatatgcagaggagaacctgggctttgctggggtggtggagcctgagaacctggcccgggagaggaagatgcagtgggtgcagaggcagaggctggagaggaagggcacctgccccagcaccctgggggaggagaggagctacaaccccttcctgcggacccactgcctggccctgcaggaggccctgggccctggccctggccccactggagatgatgactacagccgggcccagctgctggaggagctgcggcggctgaaggacatgcacaagagcaagtag

SEQ ID NO: 212698 - DNA, 1086 bp, Artificial Sequence
  derived and/or modified sequence
atggcctggcagggctggcccgccgcctggcagtgggtggccggctgttggctgctgttagtgctcgtgctggtcctgctggtcagtccccgaggctgcagggcaaggcgaggactcagagggctcctgatggcacacagccaacgcctgctgttccgtatcggatattctctgtacacacgaacatggcttggctatctattttacagacaacagcttagacgggctcgcaacagatacccaaaggggcacagcaagacccagcccaggctgttcaatggcgtgaaagtgctgccgataccagtgctgagtgataattactcttacctgattatcgacacgcaggcccagctggctgttgccgtggacccatctgacccgcgggctgtgcaggcctcaattgagaaggaaggggtgactctcgtagcaatcctctgtacccataagcactgggaccattctgggggcaatcgggacctgagtaggagacatcgagactgccgggtgtatggttctcctcaggatggcattccatatctcacgcatccactctgtcaccaggacgttgtgtctgttggtcgacttcaaatacgggccttggctactcccgggcatacccagggacatctggtctatcttttggacggcgagccctacaaggggccaagttgtctattctctggcgaccttctcttcctgtctggctgcgggaggacattcgaaggaaatgcagaaacaatgctttctagcctggataccgtgttgggacttggggacgatacactcctctggccgggacatgagtatgcagaggaaaatctggggttcgcgggagtggtggagccggagaacttagcccgagagcgaaaaatgcaatgggtccagagacagcggctggaacgaaagggaacctgtcccagcaccctcggtgaagagcgttcatacaatccgttcttacgaacccattgccttgctcttcaggaagctctaggccccggccccggccccactggtgacgacgattactctagagcacagctgctggaggaactgcggcggttgaaggatatgcacaaatctaagtag

SEQ ID NO: 212699 - DNA, 2991 bp, Artificial Sequence
  derived and/or modified sequence
cagagccggcaggcaggttccccgcggggggccggggccgggccgttgcctagcaacgccgagccccgcccggccggcgcgtgcctgcccccagcatggcttggcagggctggcccgcggcgtggcagtgggtcgccggctgctggctcctcctcgtccttgtcctcgtcctacttgtgagcccccgcggctgccgagcgcggcggggcctccgcggtctgctcatggcgcacagccagcggctgctcttccgaatcgggtacagcctgtacacccgcacctggctcgggtacctcttctaccgacagcagctgcgcagggctcggaatcgctaccctaaaggccactcgaaaacccagccccgcctcttcaatggagtgaaggtgcttcccatccctgtcctctcggacaactacagctacctcatcatcgacacccaggcccagctggctgtggctgtggacccttcagaccctcgggctgtgcaggcttccattgaaaaggaaggggtcaccttggtcgccattctgtgtactcacaagcactgggaccacagtggagggaaccgtgacctcagccggcggcaccgggactgtcgggtgtacgggagccctcaggacggcatcccctacctcacccatcccctgtgtcatcaagatgtggtcagcgtgggacggcttcagatccgggccctggctacacctggccacacacaaggccatctggtctacctactggatggggagccctacaagggtccctcctgcctcttctcaggggacctgctcttcctctctggctgtgggcggacctttgagggcaatgcagagaccatgctgagctcactggacactgtgctggggctaggggatgacacccttctgtggcctggtcatgagtatgcagaggagaacctgggctttgcaggtgtggtggagcccgagaacctggcccgggagaggaagatgcagtgggtgcagcggcagcggctggagcgcaagggcacgtgcccatctaccctgggagaggagcgctcctacaacccgttcctgagaacccactgcctggcgctacaggaggctctggggccggggccgggccccactggggatgatgactactcccgggcccagctcctggaagagctccgccggctgaaggatatgcacaagagcaagtgatgcccccagcgcccccagcccagcccactccccgcatggggaggccgccaccaccaacacctcatcatccttctcatcgctaacaccaccacctccatcggcacccaagcgggcatcatccccccacactgctcaggggaggggagggatcaggcgatgagactgtgaggccaaaagaagggggcctgttggaggctgggaaccccgcagcgcgaggctgcctcatcaacggcaagaggaaaggaggggtctcgggacatctccagaccctaccaactgggagggtcccctcctccttccctactcctgggacggcagcaaggacatgggggctgctgttagcttctccgtcaggaggcctcatctcactgtagccctggaacccagggtccatcttgcccttcccccatccatggttgggaaagaagctcagcccctcacagtggcctcaagtgtgatgccttacaaaagcaccactcagatgggcagctggactctggtgtcctgagactctgccctcttcccacagcctccctgccccacccatccctgcaaagccatttttcagacagagccattcctaagaacactgaagggctggaatgctggctggccactctctgcctcagtggcctccctacagcctggaagaaggagggtcctgattgccaaggaaacctcctcattgggctaaggagacactggagtctggagtgtggagccccacagtcttgcaggtcacatgctctccttgcacatctggcctggttgtacccactggcctctgcctctgccctgggccaaaagggcccctccttgccaggggagagacagccacggtcctctttggccgatgctgtattctcattttggcccttgttcttaggcccgtctgcccgccttcctccatctaacctttcctgttttatccgcagcccttttcttctttgagttagtaaagatttattctgtaacctgacactcatctggccctttgcagtttgccagccatattcccatgtgatttcccactggatccaggcccccatccggctggcaggagggggctctgacgtgcaggttggaaatcagaagtctgtgagagcgcgggagtgcatggcagctctgggtcccagacctggcccgacccctctgcttcacctccagctctgctgctcctctactcttgggtcgagatccctttggagccacagcgaggaaccctgtggtcctcaggcaggtgtaccttgagtcagccaggagccctcttttcctgtgtcaaagcctgccctcgggctctgctcacctctggtgaccctccaagatgcccctgccctcagtttcccctcatgatctggcctctgcccccttctctagccacagcctctagtacactttagcaataccaccagactagttagagttccccactcaccaagcaagacatgcagtttcatgcctctgtgccttcgctcatgctgtttcttccgactggaatgccttcccctgctcctcctgccttgtctgcctggcaagttcatctctcacgatcccctcaaaggccccctcctccaggaaggcaacccctgtgcccctcccctccaggctacctctgcactttgtcaatgcttctcttgtggcacttatcacactgtattttacttgtttacatgtttgtctccccttctagactgtgaatccttaagggcatggactgtatcttatgcatctctgtatttctgcgcctagcacggtgcctagcacacagtaggcgctcaataaatgttgaatgaatgaatgatttaatcaa

SEQ ID NO: 212700 - DNA, 1086 bp, Artificial Sequence
  derived and/or modified sequence
atggcttggcaggggtggcctgctgcctggcagtgggtggccggatgttggctcctcctggtcctggtgctggtgctcctggtgtccccaagaggctgcagagccaggcgcggactgagaggtttactgatggcccacagccagcgtctgttatttaggatagggtactcgctgtatacgaggacctggctgggataccttttctatcgccaacaactgcgccgtgctagaaaccgctatcctaaaggccactctaagacacagccgcgtctctttaatggcgtgaaagtgctgccaatcccagtgctgtcagataactacagttacctgatcattgatacacaggctcagctcgccgtcgctgtagacccgtccgaccctagggctgtacaagcttccatagaaaaagagggcgttaccctggttgccattctctgcacccataaacactgggaccatagcgggggtaatcgagacctctcccgacgtcacagagattgccgcgtgtacggatctcctcaagatgggattccctatttgacacatcctctctgccatcaggatgtcgtgagcgtgggccgtttgcaaattcgggcactggccactcctggacatacccaaggacacctggtgtatctgcttgacggcgagccatataaagggccttcttgcctctttagtggagacctgctgtttctaagcggctgtgggcgaaccttcgagggaaacgcagaaactatgctttcttcactagacaccgtgctcgggctgggcgatgataccttgctgtggcccggtcacgagtacgctgaggagaacctgggattcgctggagtagtggagcccgagaacctagctcgcgaacggaaaatgcagtgggtccagcgccagaggctagagcgcaagggaacctgcccttcaacccttggggaggaaaggtcttacaatccgttcctccggacgcattgcctggcactgcaggaagctttaggccctggccctggtcctaccggcgacgatgattacagcagagcccaattgttggaggaactgaggagactcaaggacatgcacaagagcaagtag

SEQ ID NO: 212701 - DNA, 1086 bp, Artificial Sequence
  derived and/or modified sequence
atggcctggcagggctggcccgccgcctggcagtgggtggccggctgctggctgctgctggtgctggtgctggtgctgctggtgagccccagaggctgcagagccagaagaggcctgagaggcctgctgatggcccacagccagagactgctgttcagaatcggctacagcctgtacaccagaacctggctgggctacctgttctacagacagcagctgagaagagccagaaacagataccccaagggccacagcaagacccagcccagactgttcaacggcgtgaaggtgctgcccatccccgtgctgagcgacaactacagctacctgatcatcgacacccaggcccagctggccgtggccgtggaccccagcgaccccagagccgtgcaggccagcatcgagaaggagggcgtgaccctggtggccatcctgtgcacccacaagcactgggaccacagcggcggcaacagagacctgagcagaagacacagagactgcagagtgtacggcagcccccaggacggcatcccctacctgacccaccccctgtgccaccaggacgtggtgagcgtgggcagactgcagatcagagccctggccacccccggccacacccagggccacctggtgtacctgctggacggcgagccctacaagggccccagctgcctgttcagcggcgacctgctgttcctgagcggctgcggcagaaccttcgagggcaacgccgagaccatgctgagcagcctggacaccgtgctgggcctgggcgacgacaccctgctgtggcccggccacgagtacgccgaggagaacctgggcttcgccggcgtggtggagcccgagaacctggccagagagagaaagatgcagtgggtgcagagacagagactggagagaaagggcacctgccccagcaccctgggcgaggagagaagctacaaccccttcctgagaacccactgcctggccctgcaggaggccctgggccccggccccggccccaccggcgacgacgactacagcagagcccagctgctggaggagctgagaagactgaaggacatgcacaagagcaagtag

SEQ ID NO: 212702 - DNA, 585 bp, Artificial Sequence
  derived and/or modified sequence
atgtccagccctcaatcccggaacggaaaggactccaaagaacgggtctctagaaagatgtccattcaagagtatgagttaatccacaaggagaaagaggacgaaaattgtctgaggaagtatagacggcagtgcatgcaggatatgcatcagaaattaagctttggtcctcggtatggatttgtctacgaactcgaaacaggcaagcagtttctggaaaccattgaaaaagagctgaagattaccaccatagtggtacacatttacgaggatgggatcaagggctgcgacgcccttaatagtagcttaacatgtctggctgccgagtacccgatcgtcaagttctgcaagatcaaagccagcaatacaggggccggcgatcgctttagtctcgatgtcctcccaactctgctcatttacaaagggggcgagctcatcagcaacttcatctcagtggccgagcaatttgcagaggagttttttgcaggcgatgtggaatctttccttaatgaatatggtctgcttccagaacgggaggtgcacgtacttgagcataccaagatagaggaagaggatgtcgaatag

SEQ ID NO: 212703 - DNA, 585 bp, Artificial Sequence
  derived and/or modified sequence
atgagctcaccacagtctcgcaacggaaaagactcgaaggagcgcgtttctagaaaaatgtccattcaggagtacgagctgatccataaagagaaggaggacgagaattgccttcgtaaataccggcgacagtgcatgcaggacatgcatcaaaagctgagcttcggcccgagatacggctttgtgtatgaactggaaacgggaaaacagtttctcgagaccatcgagaaagagctcaagatcaccaccatagttgtgcacatttacgaagacgggattaaaggatgcgatgctctcaatagtagcttgacatgcctcgctgccgaatatccgatcgtaaagttctgtaagattaaggcctcaaataccggtgccggcgaccgattcagcctcgacgtgctgccaacactgctgatctataagggtggagaacttatctcgaattttatctccgtagccgagcagttcgccgaggaatttttcgcaggcgatgttgagtccttccttaacgagtatgggttgctccccgagcgcgaagttcatgtgctcgagcacaccaaaattgaggaggaggacgtggagtag

SEQ ID NO: 212704 - DNA, 585 bp, Artificial Sequence
  derived and/or modified sequence
atgagcagcccccagagcagaaatggcaaggacagcaaggagcgggtgtccaggaagatgagcatccaggagtatgagctgatccacaaggagaaggaggatgagaactgcctgaggaagtaccgccggcagtgcatgcaggacatgcaccagaagctgagctttggccccaggtatggctttgtgtatgagctggagaccgggaagcagttcctggagaccatcgagaaggagctgaagatcaccaccatcgtggtgcacatctatgaagatggcatcaagggctgtgatgccctgaacagcagcctgacctgcctggccgctgagtaccccatcgtgaagttctgcaagatcaaggccagcaacacaggagctggggaccgcttcagcctggatgtgctgcccaccctgctgatctacaagggcggggagctgatcagcaacttcatctctgtggccgagcagtttgctgaggagttctttgctggagatgtggagagcttcctgaatgaatatggcctgctgcctgagcgggaggtgcacgtgctggagcacaccaagattgaggaggaggatgtggagtag

SEQ ID NO: 212705 - DNA, 585 bp, Artificial Sequence
  derived and/or modified sequence
atgagcagcccccagagccggaacggcaaggacagcaaggagcgggtcagcaggaaaatgtctattcaggaatacgaactgatccataaggagaaggaagatgagaactgtttgaggaaatacagacggcagtgcatgcaggatatgcaccagaagctgagcttcggcccccggtacgggtttgtctatgaattagagactgggaaacaattcttagagaccatcgaaaaggaactcaaaataaccactatcgtggtgcatatctacgaggacggcattaaagggtgcgatgccctgaatagtagtctgacttgcctcgccgcggagtatcccattgttaagttctgcaagatcaaggccagtaatactggagccggggacagatttagtcttgatgtcctccctaccttgctcatttataaggggggagaactgatctcaaactttatttccgtggctgagcagttcgccgaagaattctttgctggcgacgtggaaagcttcttgaacgagtacggattgctcccggaaagagaagtgcacgtgctggagcacacaaagattgaggaggaggatgttgagtag

SEQ ID NO: 212706 - DNA, 585 bp, Artificial Sequence
  derived and/or modified sequence
atgagcagcccccagagccggaacggcaaggacagcaaggagcgggtgtctaggaaaatgagcattcaggagtacgagttaatacataaggaaaaagaggacgagaattgtctccgcaagtatagaaggcaatgcatgcaggatatgcatcaaaaactcagctttgggcctaggtacgggtttgtgtatgaactggagaccgggaagcagtttctggagacgatcgaaaaggagcttaagatcactacaattgtcgtacacatctacgaggatggaattaaggggtgcgacgccctcaattccagcttgacatgtttagccgccgagtatcccattgtgaaattctgtaagatcaaagcctctaacacaggcgccggagatcgtttctcgcttgatgtcctccctaccttgctcatctataagggcggggagcttattagcaatttcattagcgtggccgaacagttcgcagaagagtttttcgccggggatgtggaatcatttctgaacgaatatggtttactcccagagagagaggtgcacgtgttggagcacacaaaaatcgaagaggaggatgtggaatag

SEQ ID NO: 212707 - DNA, 585 bp, Artificial Sequence
  derived and/or modified sequence
atgagcagcccacagtcgcggaatggcaaagactctaaagagcgagtgagtcgtaagatgtctatacaagagtatgaattaatacacaaagagaaagaggatgaaaattgtctgcggaagtacaggcgccagtgcatgcaagacatgcaccaaaagctgtccttcggcccacgttacggctttgtttatgagctggaaactggaaaacagtttctggagaccattgaaaaggagctgaagattacaaccatagttgtccatatctatgaagatggtataaagggatgcgacgcactaaacagctctctgacctgtctggctgccgagtatcctattgtgaaattctgcaaaatcaaagcttccaataccggagccggagatcgattctccctggacgtgctgcctacactgctcatatacaagggaggagagctaatttccaatttcatctctgtggcggagcaatttgctgaagagtttttcgcaggggacgttgaatcttttctgaacgagtatggactgctgccggagagggaggtccacgtgttggaacataccaaaattgaggaggaggatgtagaatag

SEQ ID NO: 212708 - DNA, 585 bp, Artificial Sequence
  derived and/or modified sequence
atgagctccccccagtcacgcaacgggaaggattcaaaagaacgggtatctcgcaagatgagcatccaagaatatgagttaattcataaagagaaagaagacgaaaattgcctgcgtaaatatcggaggcagtgcatgcaggacatgcaccagaagctcagcttcggacctcgctacggatttgtgtacgaactggagactggaaaacagttccttgagacaatcgagaaagagctgaagattaccacaatagtggtccacatttatgaggatgggatcaaaggctgcgacgcgttaaatagctcactgacctgcttagctgctgaatatcccatcgtaaagttctgcaagatcaaagcctcaaatactggtgccggagataggttttccctggatgtactccctacgctcctaatttacaaaggcggagaactgatatccaattttatttcggtcgccgagcagtttgctgaagaattttttgcaggtgacgtcgaaagcttcttgaatgagtacggtctcctcccggaaagagaggtacatgttctggagcatacaaagatcgaagaggaagacgtagagtag

SEQ ID NO: 212709 - DNA, 585 bp, Artificial Sequence
  derived and/or modified sequence
atgagcagcccccagagcagaaacggcaaggacagcaaggagagagtgagcagaaagatgagcatccaggagtacgagctgatccacaaggagaaggaggacgagaactgcctgagaaagtacagaagacagtgcatgcaggacatgcaccagaagctgagcttcggccccagatacggcttcgtgtacgagctggagaccggcaagcagttcctggagaccatcgagaaggagctgaagatcaccaccatcgtggtgcacatctacgaggacggcatcaagggctgcgacgccctgaacagcagcctgacctgcctggccgccgagtaccccatcgtgaagttctgcaagatcaaggccagcaacaccggcgccggcgacagattcagcctggacgtgctgcccaccctgctgatctacaagggcggcgagctgatcagcaacttcatcagcgtggccgagcagttcgccgaggagttcttcgccggcgacgtggagagcttcctgaacgagtacggcctgctgcccgagagagaggtgcacgtgctggagcacaccaagatcgaggaggaggacgtggagtag

SEQ ID NO: 212710 - protein, 222 aa, Artificial Sequence
  derived and/or modified sequence
MAAGSRTSLLLAFALLCLPWLQEAGAVQTVPLSRLFKEAMLQAHRAHQLAIDTYQEFISSWGMEAYITKEQKYSFLHDSQTSFCFSDSIPTSSNMEETQQKSNLELLHISLLLIESRLEPVRFLRSTFTNNLVYDTSDSDDYHLLKDLEEGIQMLMGRLEDGSHLTGQTLKQTYSKFDTNSHNHDALLKNYGLLHCFRKDMDKVETFLRMVQCRSVEGSCGF

SEQ ID NO: 212711 - protein, 128 aa, Artificial Sequence
  derived and/or modified sequence
MEETQQKSNLELLHISLLLIESRLEPVRFLRSTFTNNLVYDTSDSDDYHLLKDLEEGIQMLMGRLEDGSHLTGQTLKQTYSKFDTNSHNHDALLKNYGLLHCFRKDMDKVETFLRMVQCRSVEGSCGF

SEQ ID NO: 212712 - DNA, 669 bp, Artificial Sequence
  derived and/or modified sequence
atggccgccggatccaggaccagccttctcttggcgttcgccctgctgtgtctgccatggcttcaggaggccggggctgttcagaccgttcctctgtccagattgttcaaagaagcaatgctccaggcacacagggctcaccaactagccatcgacacctaccaggagttcattagcagctgggggatggaagcatatattaccaaggagcagaaatattcattcctacacgatagtcagacatctttttgcttttcagattctatcccgacgtcctctaacatggaggaaacccagcaaaagtcaaatctggagcttctgcatatatccttactgctgattgaaagtcggttggaacctgtcaggttcctgagaagcacttttacaaacaacctcgtgtatgatacaagcgattcagatgattatcacctcctgaaagatctggaagaaggaatacagatgctcatggggaggctcgaagatggctcccacctgaccgggcaaacactaaagcagacctacagtaagttcgacacgaatagccacaaccatgacgccctcttgaagaactacggattgctgcactgtttccggaaagatatggacaaagtggagacatttttgaggatggtgcaatgcagatctgtcgagggctcatgcggcttttag

SEQ ID NO: 212713 - DNA, 522 bp, Artificial Sequence
  derived and/or modified sequence
atggccaccggctcacggacctctctgctgctagcatttgcgttattatgtctcccatggctccaggaagccggcgcggtgcagacagtgcccttgtctaggctctttaaggaagctatgcttcaggcccatcgagcccaccagctggcaattgatacctaccaggagtttatctcctcttgggggatgggggcaggacaaggctggcaagagggtgtgactttcccacattggggttctaatggaaggagattacggtctagcgggctgttctctgaggcaaagatgcaagccgatgagcaccgcctgagccaggtcccacgacgtgtcactgtcggtgccggcctgcagcacagaaagcagtggagctttctggttggcggtccctcacctcgcaagaaacctatttcccagagaaatcggtcaatccattcttgtatgacgccacggcccccctcagctagccagactctgttccggcatccaccgacctggcggaagaggtctcgaaacccgacctag

SEQ ID NO: 212714 - DNA, 669 bp, Artificial Sequence
  derived and/or modified sequence
atggctgctggcagcaggaccagcctgctgctggcctttgccctgctgtgcctgccctggctgcaggaggccggggctgtgcagacagtgcccctgagccgcctcttcaaggaggccatgctgcaggcccaccgggcccaccagctggccatcgacacctaccaggagttcatcagctcctggggcatggaggcctacatcaccaaggagcagaagtacagcttcctgcatgacagccagaccagcttctgcttcagtgacagcatccccaccagcagcaacatggaggagacccagcagaagagcaacctggagctgctgcacatcagcctgctgctgattgagagccggctggagcctgtgcgcttcctgcggagcaccttcaccaacaacctggtgtatgacaccagtgacagtgatgactaccacctgctgaaggacctggaggagggcatccagatgctgatgggccgcctggaggatggcagccacctgaccggccagaccctgaagcagacctacagcaagtttgacaccaacagccacaaccatgatgccctgctgaagaactacggcctgctgcactgcttcaggaaggacatggacaaggtggagaccttcctgaggatggtgcagtgccgctctgtggagggcagctgtggcttctag

SEQ ID NO: 212715 - DNA, 522 bp, Artificial Sequence
  derived and/or modified sequence
atggccaccggcagcaggaccagcctgctgctggcctttgccctgctgtgcctgccctggctgcaggaggccggggctgtgcagacagtgcccctgagccgcctcttcaaggaggccatgctgcaggcccaccgggcccaccagctggccatcgacacctaccaggagttcatcagctcctggggcatgggcgccggccagggctggcaggagggcgtgaccttcccccactggggcagcaatggaagaaggctgcggagcagcggcctcttcagcgaggccaagatgcaggctgatgagcaccggctgagccaggtgccccggcgggtgacagtgggcgccggcctgcagcacaggaagcagtggagcttcctggtgggcggccccagccccaggaagaagcccatcagccagaggaacagaagcatccacagctgcatgacccccaggcctccttctgccagccagaccctcttccgccacccccccacctggaggaagaggagcaggaaccccacctag

SEQ ID NO: 212716 - DNA, 669 bp, Artificial Sequence
  derived and/or modified sequence
atggccgccggcagccggaccagcctgctgctggccttcgccctgctgtgtcttccctggcttcaggaagctggggctgtgcagaccgtcccattaagtcgcctattcaaggaggccatgctgcaggcacacagagcacaccagctggcgatcgatacatatcaggagtttatctcttcatggggcatggaggcctacatcactaaagaacaaaaatactcttttttacatgacagccagacctctttctgtttcagcgatagtataccgacaagcagcaatatggaggagacccagcagaaaagcaacctcgaattgttacatatcagtctgttattgatcgagtctcggctggagccagtgcgttttctgagaagcacatttactaataatcttgtctatgacacctctgactccgacgattaccacctgctgaaagacctagaagagggaatccaaatgctaatgggccgcctggaggacggatcacaccttactgggcagacactgaaacagacatacagcaaattcgacacaaatagccataatcacgatgccctcctcaaaaactatggattgttacactgcttcaggaaagacatggataaggtggaaacattcttgcgtatggtgcagtgcaggagcgtcgaaggcagttgtggcttctag

SEQ ID NO: 212717 - DNA, 522 bp, Artificial Sequence
  derived and/or modified sequence
atggccaccggcagccggaccagcctgctgctggccttcgccctgttatgtctaccttggctccaggaggctggggccgtacaaacagttccactctcccgtctgtttaaggaggccatgctgcaagctcatcgcgcccaccaactcgccatcgatacgtatcaggagtttatctcatcatggggcatgggcgccggacaaggatggcaggagggtgtgaccttcccccactggggatctaacggacgccgcctacgcagctctggcttattcagcgaagcaaagatgcaggccgatgaacaccggctgagccaggtgccgagacgggtgaccgttggagcaggtctccagcaccgcaaacagtggtccttcctcgtcggcggtccaagtccaagaaaaaagccaattagtcaacgcaatcgctccattcacagctgtatgacaccacggccgcctagtgccagccagacgttgttcagacatccccctacgtggaggaaacggtcccggaatccaacttag

SEQ ID NO: 212718 - DNA, 669 bp, Artificial Sequence
  derived and/or modified sequence
atggccgcaggttcccgcacctccctcctccttgcctttgctctgctctgcctgccatggctgcaagaggcaggggcagtacaaacagtgcccctctctcggctgttcaaggaggctatgctacaggcccacagagctcatcaacttgccattgacacgtatcaggagtttattagcagttggggtatggaggcgtacattacaaaggagcagaaatatagcttccttcatgattcccagacaagtttttgtttttctgattctatccctacatcgtcaaacatggaagagacccaacagaaatccaacctggagttgctccatatctctcttctgttgatagagtcccgcctggagccggtccggttcctgaggagtacatttaccaacaacctggtgtatgatacttctgacagcgacgattatcatttactaaaggacctggaggaaggcattcagatgctcatgggtcggctggaggacgggtcacacctgacaggccagacactgaaacagacatactcaaagtttgataccaactcccacaatcacgacgccctgctgaagaactacggacttctgcattgctttaggaaggatatggacaaggtggagacgttcctaaggatggtgcagtgcaggagcgtggagggcagttgtgggttctag

SEQ ID NO: 212719 - DNA, 522 bp, Artificial Sequence
  derived and/or modified sequence
atggccacaggaagtcgcaccagcctgctgttagccttcgccctgctatgcctgccttggttgcaggaggcgggtgctgtgcaaaccgtccctctcagtaggttgtttaaggaggccatgcttcaggcccatcgcgcacatcagctcgccatcgacacatatcaggaattcatttcctcatggggcatgggtgctggtcagggttggcaagagggcgtgactttccctcactggggatccaatggtcggcgactccgtagctctggattattctcagaagccaagatgcaggccgacgagcatcggttgagtcaggtgcccaggcgtgttacggtaggcgcagggcttcagcaccgcaaacagtggagtttccttgtgggaggtccctctccccgtaagaaacctatcagccagcgaaatcggtccatccattcatgcatgactccaaggccaccttctgcctcccagactcttttcaggcatccgcctacctggcggaaacggtccaggaatccgacgtag

SEQ ID NO: 212720 - DNA, 837 bp, Artificial Sequence
  derived and/or modified sequence
agcatcccaaggcccgactccccgcaccactcagggtcctgtggacagctcacctagcggcaatggctgcaggctcccggacgtccctgctcctggcttttgccctgctctgcctgccctggcttcaagaggctggtgccgtccaaaccgttcccttatccaggctttttaaagaggctatgctccaagcccatcgcgcacaccagctggccattgacacctaccaggagtttataagctcttggggaatggaagcctatatcacaaaggaacagaagtattcattcctgcatgactcccagacctccttctgcttctcagactctattccgacatcctccaacatggaggaaacgcagcagaaatccaacttagagctgctccacatctccctgctgctcatcgagtcgcggctggagcccgtgcggttcctcaggagtaccttcaccaacaacctggtgtatgacacctcggacagcgatgactatcacctcctaaaggacctagaggaaggcatccaaatgctgatggggaggctggaagacggcagccacctgactgggcagaccctcaagcagacctacagcaagtttgacacaaactcgcacaaccatgacgcactgctcaagaactacgggctgctccactgcttcaggaaggacatggacaaggtcgagacattcctgcgcatggtgcagtgccgctctgtggagggcagctgtggcttctaggggcccgcgtggcatcctgtgacccctccccagtgcctctcctggccctgaaggtgccactccagtgcccaccagccttgtcttaataaaattaagttgtattgtt

SEQ ID NO: 212721 - DNA, 659 bp, Artificial Sequence
  derived and/or modified sequence
agcatcccaaggcccgactccccgcaccactcagggtcctgtggacagctcacctagcggcaatggctgcaggaagaagcctatatcacaaaggaacagaagtattcattcctgcatgactcccagacctccttctgcttctcagactctattccgacatcctccaacatggaggaaacgcagcagaaatccaacttagagctgctccacatctccctgctgctcatcgagtcgcggctggagcccgtgcggttcctcaggagtaccttcaccaacaacctggtgtatgacacctcggacagcgatgactatcacctcctaaaggacctagaggaaggcatccaaatgctgatggggaggctggaagacggcagccacctgactgggcagaccctcaagcagacctacagcaagtttgacacaaactcgcacaaccatgacgcactgctcaagaactacgggctgctccactgcttcaggaaggacatggacaaggtcgagacattcctgcgcatggtgcagtgccgctctgtggagggcagctgtggcttctaggggcccgcgtggcatcctgtgacccctccccagtgcctctcctggccctgaaggtgccactccagtgcccaccagccttgtcttaataaaattaagttgtattg

SEQ ID NO: 212722 - DNA, 669 bp, Artificial Sequence
  derived and/or modified sequence
atggccgccggcagcagaaccagcctgctgctggccttcgccctgctgtgcctgccctggctgcaggaggccggcgccgtgcagaccgtgcccctgagcagactgttcaaggaggccatgctgcaggcccacagagcccaccagctggccatcgacacctaccaggagttcatcagcagctggggcatggaggcctacatcaccaaggagcagaagtacagcttcctgcacgacagccagaccagcttctgcttcagcgacagcatccccaccagcagcaacatggaggagacccagcagaagagcaacctggagctgctgcacatcagcctgctgctgatcgagagcagactggagcccgtgagattcctgagaagcaccttcaccaacaacctggtgtacgacaccagcgacagcgacgactaccacctgctgaaggacctggaggagggcatccagatgctgatgggcagactggaggacggcagccacctgaccggccagaccctgaagcagacctacagcaagttcgacaccaacagccacaaccacgacgccctgctgaagaactacggcctgctgcactgcttcagaaaggacatggacaaggtggagaccttcctgagaatggtgcagtgcagaagcgtggagggcagctgcggcttctag

SEQ ID NO: 212723 - DNA, 522 bp, Artificial Sequence
  derived and/or modified sequence
atggccaccggcagcagaaccagcctgctgctggccttcgccctgctgtgcctgccctggctgcaggaggccggcgccgtgcagaccgtgcccctgagcagactgttcaaggaggccatgctgcaggcccacagagcccaccagctggccatcgacacctaccaggagttcatcagcagctggggcatgggcgccggccagggctggcaggagggcgtgaccttcccccactggggcagcaacggcagaagactgagaagcagcggcctgttcagcgaggccaagatgcaggccgacgagcacagactgagccaggtgcccagaagagtgaccgtgggcgccggcctgcagcacagaaagcagtggagcttcctggtgggcggccccagccccagaaagaagcccatcagccagagaaacagaagcatccacagctgcatgacccccagaccccccagcgccagccagaccctgttcagacacccccccacctggagaaagagaagcagaaaccccacctag

SEQ ID NO: 212724 - protein, 139 aa, Artificial Sequence
  derived and/or modified sequence
MAADSIPTSSNMEETQQKSNLELLHISLLLIESRLEPVRFLRSTFTNNLVYDTSDSDDYHLLKDLEEGIQMLMGRLEDGSHLTGQTLKQTYSKFDTNSHNHDALLKNYGLLHCFRKDMDKVETFLRMVQCRSVEGSCGF

SEQ ID NO: 212725 - DNA, 420 bp, Artificial Sequence
  derived and/or modified sequence
atggcagctgattccatcccaactagcagcaacatggaggaaacccagcagaagtctaatctggaactactccacatctcactgttgctgatcgaatcaaggctggagcctgtgcggttcctaagaagcacttttactaataatctagtgtacgacacctctgactcagatgactaccaccttcttaaggatctagaggaaggtatacagatgcttatgggaagattagaggacggatcccacctgactgggcagactctgaagcaaacatactcaaagtttgacacaaacagtcacaatcatgacgcattactgaagaactacgggttacttcattgtttcagaaaggatatggacaaggtggaaaccttccttaggatggttcagtgcaggtccgtggagggaagttgcggcttctag

SEQ ID NO: 212726 - DNA, 420 bp, Artificial Sequence
  derived and/or modified sequence
atggctgctgacagcatccccaccagcagcaacatggaggagacccagcagaagagcaacctggagctgctgcacatcagcctgctgctgattgagagccggctggagcctgtgcgcttcctgcggagcaccttcaccaacaacctggtgtatgacaccagtgacagtgatgactaccacctgctgaaggacctggaggagggcatccagatgctgatgggccgcctggaggatggcagccacctgaccggccagaccctgaagcagacctacagcaagtttgacaccaacagccacaaccatgatgccctgctgaagaactacggcctgctgcactgcttcaggaaggacatggacaaggtggagaccttcctgaggatggtgcagtgccgctctgtggagggcagctgtggcttctag

SEQ ID NO: 212727 - DNA, 420 bp, Artificial Sequence
  derived and/or modified sequence
atggccgccgacagcatccccaccagcagcaacatggaggagacccagcagaaatcaaaccttgagttactgcacatctctttacttttaattgagtccaggctggaaccagtccgcttcctgcgcagcaccttcactaacaacctggtgtacgatactagcgatagcgacgactaccatctgctcaaggacctggaagaggggattcaaatgctcatgggcaggttagaagatgggagccatttaactggtcaaaccctgaagcagacctatagcaaatttgatactaacagtcataatcatgatgcgctcctgaaaaattacgggctgctccactgcttccggaaagacatggataaggtcgaaacctttctcagaatggtgcagtgcagatccgtggaaggaagttgcggattctag

SEQ ID NO: 212728 - DNA, 420 bp, Artificial Sequence
  derived and/or modified sequence
atggccgctgattctatacctaccagtagcaacatggaagagacgcagcagaaatctaatcttgaactgctgcacatctctctactactgattgagtccagacttgagcccgtgcgcttcctgcgtagcacctttaccaacaatttggtctatgatacctctgactcggacgattatcatctgctgaaggatctggaggagggtatacaaatgctgatggggcgactggaagatgggagccacctgactggccagacactgaagcagacttattccaagtttgacacaaatagtcataatcacgatgctctgttaaagaactacggactgctgcactgtttccgaaaagacatggataaggtggaaaccttccttagaatggtccaatgtcgttccgtcgaggggagctgtggcttctag

SEQ ID NO: 212729 - DNA, 588 bp, Artificial Sequence
  derived and/or modified sequence
agcatcccaaggcccgactccccgcaccactcagggtcctgtggacagctcacctagcggcaatggctgcagactctattccgacatcctccaacatggaggaaacgcagcagaaatccaacttagagctgctccacatctccctgctgctcatcgagtcgcggctggagcccgtgcggttcctcaggagtaccttcaccaacaacctggtgtatgacacctcggacagcgatgactatcacctcctaaaggacctagaggaaggcatccaaatgctgatggggaggctggaagacggcagccacctgactgggcagaccctcaagcagacctacagcaagtttgacacaaactcgcacaaccatgacgcactgctcaagaactacgggctgctccactgcttcaggaaggacatggacaaggtcgagacattcctgcgcatggtgcagtgccgctctgtggagggcagctgtggcttctaggggcccgcgtggcatcctgtgacccctccccagtgcctctcctggccctgaaggtgccactccagtgcccaccagccttgtcttaataaaattaagttgtattgtt

SEQ ID NO: 212730 - DNA, 420 bp, Artificial Sequence
  derived and/or modified sequence
atggccgccgacagcatccccaccagcagcaacatggaggagacccagcagaagagcaacctggagctgctgcacatcagcctgctgctgatcgagagcagactggagcccgtgagattcctgagaagcaccttcaccaacaacctggtgtacgacaccagcgacagcgacgactaccacctgctgaaggacctggaggagggcatccagatgctgatgggcagactggaggacggcagccacctgaccggccagaccctgaagcagacctacagcaagttcgacaccaacagccacaaccacgacgccctgctgaagaactacggcctgctgcactgcttcagaaaggacatggacaaggtggagaccttcctgagaatggtgcagtgcagaagcgtggagggcagctgcggcttctag

SEQ ID NO: 212731 - protein, 173 aa, Artificial Sequence
  derived and/or modified sequence
MATGSRTSLLLAFALLCLPWLQEAGAVQTVPLSRLFKEAMLQAHRAHQLAIDTYQEFISSWGMGAGQGWQEGVTFPHWGSNGRRLRSSGLFSEAKMQADEHRLSQVPRRVTVGAGLQHRKQWSFLVGGPSPRKKPISQRNRSIHSCMTPRPPSASQTLFRHPPTWRKRSRNPT

SEQ ID NO: 212732 - protein, 167 aa, Artificial Sequence
  derived and/or modified sequence
MAAGSRTSLLLAFALLCLPWLQEAGAVQTVPLSRLFDHAMLQAHRAHQLAIDTYQEFEETYIPKDQKYSFLHDSQTSFCFSDSIPTPSNMEETQQKSNLELLRISLLLIESWLEPVRFLRSMFANNLVYDTSDSDDYHLLKDLEEGIQTLMGVRVAPGVANPGTPLA

SEQ ID NO: 212733 - protein, 165 aa, Artificial Sequence
  derived and/or modified sequence
  misc_feature (1)..(1): Xaa can be any naturally occurring amino acid
XGSRTSLLLAFALLCLPWLQEAGAVQTVPLSRLFDHAMLQAHRAHQLAIDTYQEFEETYIPKDQKYSFLHDSQTSFCFSDSIPTPSNMEETQQKSNLELLRISLLLIESWLEPVRFLRSMFANNLVYDTSDSDDYHLLKDLEEGIQTLMGVRVAPGVANPGTPLA

SEQ ID NO: 212734 - DNA, 504 bp, Artificial Sequence
  derived and/or modified sequence
atggccgcaggttccagaacctccctgctgcttgcgttcgccctgttgtgtctcccatggcttcaagaagccggggccgtccaaaccgttcctctgtcgagactgttcgaccatgctatgctgcaggcccatcgagcgcatcagctggccatcgacacctaccaggagtttgaggagacctacattcccaaagaccagaaatactcgtttctgcacgattcacagacctcgttctgcttttctgattcaatacctaccccctctaatatggaggaaacccaacagaagtccaatctggaattattgagaatttctctgctacttattgagagctggctcgaaccagtccggttcctgcggagcatgttcgccaacaacttagtgtacgacacatctgacagtgatgactatcatttgctcaaagaccttgaggagggaatccaaaccctgatgggcgttagagttgcgcccggagtggccaatcctggcaccccccttgcctag

SEQ ID NO: 212735 - DNA, 498 bp, Artificial Sequence
  derived and/or modified sequence
tgaggcagccgcacatcactgctcctggcattcgctctgttgtgcctgccttggttacaggaggccggagcggtacagactgtccccctgtcacgtttgtttgaccatgcgatgctgcaggctcaccgggcgcaccagctcgccatagacacataccaggagttcgaggaaacatacattccgaaggatcaaaagtacagcttcttgcatgacagccagacctcattttgttttagtgactcgatcccaacccccagtaacatggaggaaactcagcagaagtcaaacttggagctgcttaggatcagcctcctgctcattgaatcttggcttgagccagtacgtttcctccgcagcatgttcgcaaacaatttggtgtacgatacctccgattccgatgactatcacctccttaaagatctggaagagggcattcagactctgatgggagtcagagtcgcgcctggagttgctaaccctggaaccccactggcctag

SEQ ID NO: 212736 - DNA, 504 bp, Artificial Sequence
  derived and/or modified sequence
atggctgctggcagcaggaccagcctgctgctggcctttgccctgctgtgcctgccctggctgcaggaggccggggctgtgcagacagtgcccctgagccggctgtttgaccacgccatgctgcaggcccaccgggcccaccagctggccatcgacacctaccaggagtttgaggagacctacatccccaaggaccagaagtacagcttcctgcatgacagccagaccagcttctgcttcagtgacagcatccccacccccagcaacatggaggagacccagcagaagagcaacctggagctgctgcgcatcagcctgctgctgattgaatcctggctggagcctgtgcgcttcctgcgctccatgtttgccaacaacctggtgtatgacaccagtgacagtgatgactaccacctgctgaaggacctggaggagggcatccagaccctgatgggcgtgcgggtggcccctggggtggccaaccctggcacccccctggcctag

SEQ ID NO: 212737 - DNA, 498 bp, Artificial Sequence
  derived and/or modified sequence
tgaggaagcaggaccagcctgctgctggcctttgccctgctgtgcctgccctggctgcaggaggccggggctgtgcagacagtgcccctgagccggctgtttgaccacgccatgctgcaggcccaccgggcccaccagctggccatcgacacctaccaggagtttgaggagacctacatccccaaggaccagaagtacagcttcctgcatgacagccagaccagcttctgcttcagtgacagcatccccacccccagcaacatggaggagacccagcagaagagcaacctggagctgctgcgcatcagcctgctgctgattgaatcctggctggagcctgtgcgcttcctgcgctccatgtttgccaacaacctggtgtatgacaccagtgacagtgatgactaccacctgctgaaggacctggaggagggcatccagaccctgatgggcgtgcgggtggcccctggggtggccaaccctggcacccccctggcctag

SEQ ID NO: 212738 - DNA, 504 bp, Artificial Sequence
  derived and/or modified sequence
atggccgccggcagccggaccagcctgctgctggccttcgccctgctctgcctgccctggctccaggaagccggagctgtccagaccgtaccactatctagactcttcgaccacgccatgctgcaggcccatcgagcccatcaactggctattgacacatatcaggaattcgaagagacatatattccaaaggatcagaagtactcattcctgcatgattctcagacgtcgttttgctttagcgattcaattcccacgccaagcaatatggaggaaacgcagcagaagtccaatcttgagctcctccgcatttctctactgttgatcgagtcctggctggaaccggtgaggtttctgagaagcatgttcgccaacaacctggtgtacgacaccagtgacagtgacgattaccacctgctaaaggacctggaggagggaatccagacactaatgggagttcgtgtggctccaggcgttgcgaacccaggcacccccctagcttag

SEQ ID NO: 212739 - DNA, 498 bp, Artificial Sequence
  derived and/or modified sequence
tgaggcagccggaccagcctgctgctggccttcgccctgctgtgcctcccatggttgcaggaagccggagccgtgcagaccgttccgctctcccggctgttcgaccacgcaatgctacaagcccaccgtgcccatcagctagccatcgacacctaccaagagttcgaggagacgtacattcccaaggaccagaaatattcctttttgcacgactctcaaaccagcttttgcttttctgattctatccccactccgtcgaacatggaggagactcagcagaagtcaaacctggagctgttacgcataagcttactgctgatcgagagctggctggagcccgtaaggtttctccgatcaatgtttgctaataacctggtttacgataccagcgactcagacgactatcacctgctgaaggacctggaggaaggaatccaaacgctgatgggagttagggtggctccaggtgtggcgaatccagggacccctttagcgtag

SEQ ID NO: 212740 - DNA, 504 bp, Artificial Sequence
  derived and/or modified sequence
atggccgctgggagtaggaccagcctgctgcttgccttcgccctactgtgcctcccatggctgcaggaggccggtgccgtccagaccgtcccattgagcagactcttcgatcacgccatgctgcaagcccaccgggcacaccaactggctattgacacctatcaggaatttgaagagacttacatccctaaggatcagaagtactctttccttcacgatagtcagacttccttctgcttcagcgattcgatccccaccccgagcaatatggaggagacccagcagaagtcaaacctggaacttttacgtataagcctcctgcttattgagtcctggcttgagcctgtgcgcttccttaggtctatgttcgccaacaatctcgtctatgataccagtgatagcgacgactaccacttactcaaagacctcgaggagggcatccaaactttaatgggggtccgagtggctccaggggtggctaatcctggtacacctctcgcatag

SEQ ID NO: 212741 - DNA, 498 bp, Artificial Sequence
  derived and/or modified sequence
tgaggatctcgaacctccttgctcctggccttcgcactcttatgcctgccatggcttcaggaagccggtgcggtacagaccgtccccctgtccagactgtttgaccatgctatgcttcaggcccacagagctcatcagctagccatagacacttaccaagaattcgaagagacatatatcccaaaagaccagaagtacagctttctgcacgatagtcagactagcttttgttttagcgattctattccaactccttcaaacatggaagagacacagcagaaatccaacctcgaactcctccggatcagcctcctcctcattgagtcttggttagagcccgtgcggttcctgcgcagcatgtttgccaacaatctcgtgtatgacacgtctgactccgacgactaccatttgctgaaagatttggaggaggggattcagactctcatgggcgtcagggtggctcctggtgtggccaacccgggaacccctctggcgtag

SEQ ID NO: 212742 - DNA, 504 bp, Artificial Sequence
  derived and/or modified sequence
atggcagctggaagtagaacatccttactcttggcttttgccctattatgtctcccttggctacaagaagcaggagccgtgcaaaccgtccctctgagtcgcctttttgatcatgccatgcttcaagcgcatcgcgctcaccagctcgccattgacacatatcaggaattcgaggaaacttatatccccaaagatcagaaatactcctttcttcacgactcccaaacgtccttttgctttagtgactccatccccaccccctccaatatggaagagacccagcagaagtcgaatctggaactccttcgcatcagtttacttttgatcgaaagctggctggagcccgtccgcttcttaagatcaatgtttgctaataacctggtatacgatactagcgattcagatgactatcatctcctgaaggacctggaggagggcatccagacactgatgggggttagagtggctcccggggtggcgaatcccggaactccactagcatag

SEQ ID NO: 212743 - DNA, 498 bp, Artificial Sequence
  derived and/or modified sequence
tgagggagccgaacctccttactgctggcctttgcccttttgtgtctcccgtggctgcaggaagctggggccgtacaaaccgtgcctttgagccgtctgttcgatcatgccatgcttcaggctcatcgggcccatcaactagccatagatacctaccaggaatttgaagaaacctatatcccaaaggatcagaaatacagttttctccatgattcccaaacgtcattttgtttctccgactccattcccacaccaagtaatatggaagaaacccagcaaaagtcaaacctggaattactgaggatttccctcctactcatcgaatcctggctggaaccagtgaggtttttgagatcaatgttcgcgaataatctggtctacgacacgtcagattcggacgactaccatctgctcaaggatctcgaggaaggcatccagacgcttatgggggtgcgcgtagcccctggggtcgccaatcctggtactccactcgcctag

SEQ ID NO: 212744 - DNA, 504 bp, Artificial Sequence
  derived and/or modified sequence
atggcagctggaagtagaacatccttactcttggcttttgccctattatgtctcccttggctacaagaagcaggagccgtgcaaaccgtccctctgagtcgcctttttgatcatgccatgcttcaagcgcatcgcgctcaccagctcgccattgacacatatcaggaattcgaggaaacttatatccccaaagatcagaaatactcctttcttcacgactcccaaacgtccttttgctttagtgactccatccccaccccctccaatatggaagagacccagcagaagtcgaatctggaactgttgcgaatctccctcctgttaattgaaagctggctggagccggtgcgctttttacggtcaatgtttgccaacaatctagtgtatgatacatccgatagcgacgattatcatctgctcaaagacttggaagaggggatccaaacacttatgggagttagggtggcaccaggcgtggctaaccccggcacacctttggcgtag

SEQ ID NO: 212745 - DNA, 498 bp, Artificial Sequence
  derived and/or modified sequence
tgaggctcccgtacttctcttttgctcgcttttgctctcctttgtctgccgtggctgcaggaggccggagctgtccagactgttcctttgtctcgcctttttgatcatgccatgctgcaggcccatcgggcacaccagttagcaattgacacataccaagagtttgaggaaacctacatcccaaaagaccaaaaatacagtttcctgcatgactcccagacatccttttgcttttccgactctatccccaccccatcaaacatggaagaaacccaacagaagtctaacctcgaactgctacgcatctcactgctcctcatagaatcatggcttgaacccgttcgcttcctacgcagcatgttcgcaaataacctggtttacgatacatccgactctgacgattatcacctgctgaaagacctcgaagaaggcatccaaacgctgatgggagtgcgcgtcgctcccggggttgctaaccctggaacaccactagcatag

SEQ ID NO: 212746 - DNA, 504 bp, Artificial Sequence
  derived and/or modified sequence
atggccgccggcagcagaaccagcctgctgctggccttcgccctgctgtgcctgccctggctgcaggaggccggcgccgtgcagaccgtgcccctgagcagactgttcgaccacgccatgctgcaggcccacagagcccaccagctggccatcgacacctaccaggagttcgaggagacctacatccccaaggaccagaagtacagcttcctgcacgacagccagaccagcttctgcttcagcgacagcatccccacccccagcaacatggaggagacccagcagaagagcaacctggagctgctgagaatcagcctgctgctgatcgagagctggctggagcccgtgagattcctgagaagcatgttcgccaacaacctggtgtacgacaccagcgacagcgacgactaccacctgctgaaggacctggaggagggcatccagaccctgatgggcgtgagagtggcccccggcgtggccaaccccggcacccccctggcctag

SEQ ID NO: 212747 - DNA, 498 bp, Artificial Sequence
  derived and/or modified sequence
tgaggcagcagaaccagcctgctgctggccttcgccctgctgtgcctgccctggctgcaggaggccggcgccgtgcagaccgtgcccctgagcagactgttcgaccacgccatgctgcaggcccacagagcccaccagctggccatcgacacctaccaggagttcgaggagacctacatccccaaggaccagaagtacagcttcctgcacgacagccagaccagcttctgcttcagcgacagcatccccacccccagcaacatggaggagacccagcagaagagcaacctggagctgctgagaatcagcctgctgctgatcgagagctggctggagcccgtgagattcctgagaagcatgttcgccaacaacctggtgtacgacaccagcgacagcgacgactaccacctgctgaaggacctggaggagggcatccagaccctgatgggcgtgagagtggcccccggcgtggccaaccccggcacccccctggcctag

SEQ ID NO: 212748 - protein, 122 aa, Artificial Sequence
  derived and/or modified sequence
MATGSRTSLLLAFGLLCLPWLQEGSAFPTIPLSRLFDNAMLRAHRLHQLAFDTYQEFRLEDGSPRTGQIFKQTYSKFDTNSHNDDALLKNYGLLYCFRKDMDKVETFLRIVQCRSVEGSCGF

SEQ ID NO: 212749 - protein, 122 aa, Artificial Sequence
  derived and/or modified sequence
MAPGSRTSLLLAFALLCLPWLQEAGAVQTVPLSRLFDHAMLQAHRAHQLAIDTYQEFRLEDGSRRTGQILKQTYSKFDTNSHNHDALLKNYGLLYCFRKDMDKVETFLRMVQCRSVEGSCGF

SEQ ID NO: 212750 - protein, 122 aa, Artificial Sequence
  derived and/or modified sequence
MAAGSRTSLLLAFALLCLPWLQEAGAVQTVPLSRLFDHAMLQAHRAHQLAIDTYQEFRLEDGSRRTGQILKQTYSKFDTNSHNHDALLKNYGLLYCFRKDMDKVETFLRMVQCRSVEGSCGF

SEQ ID NO: 212751 - DNA, 369 bp, Artificial Sequence
  derived and/or modified sequence
atggccaccggcagcagaaccagcctgctgctggccttcggcctgctgtgcctgccctggctgcaggagggcagcgccttccccaccatccccctgagcagactgttcgacaacgccatgctgagagcccacagactgcaccagctggccttcgacacctaccaggagttcagactggaggacggcagccccagaaccggccagatcttcaagcagacctacagcaagttcgacaccaacagccacaacgacgacgccctgctgaagaactacggcctgctgtactgcttcagaaaggacatggacaaggtggagaccttcctgagaatcgtgcagtgcagaagcgtggagggcagctgcggcttctag

SEQ ID NO: 212752 - DNA, 369 bp, Artificial Sequence
  derived and/or modified sequence
atggctactgggagccgcacttccttgcttttagcattcggccttttatgccttccttggttgcaagaggggagcgcatttcccacgataccgctgtcccgattgttcgataacgcaatgctgcgagcccatcggctgcatcagttggcttttgatacctatcaggaatttcggttagaagacggttccccccggaccggtcagatcttcaagcagacatattccaaattcgacacaaattcccacaacgacgacgcgctgctaaagaactacggtctcctgtactgcttcagaaaagacatggacaaagttgagacattcctccgcatcgtccaatgccggagcgtggaagggtcatgcgggttctag

SEQ ID NO: 212753 - DNA, 369 bp, Artificial Sequence
  derived and/or modified sequence
atggccaccggcagcaggaccagcctgctgctggccttcggcctgctgtgcctgccctggctgcaggagggcagcgccttccccaccatccccctgagccggctgtttgacaatgccatgctgcgggcccaccggctgcaccagctggcctttgacacctaccaggagttccggctggaggatggcagccccaggacaggccagatcttcaagcagacctacagcaagtttgacaccaacagccacaatgatgatgccctgctgaagaactacggcctgctgtactgcttcaggaaggacatggacaaggtggagaccttcctgcgcatcgtgcagtgccgctctgtggagggcagctgtggcttctag

SEQ ID NO: 212754 - DNA, 369 bp, Artificial Sequence
  derived and/or modified sequence
atggccaccggcagccggaccagcctgctgctggccttcggcctgctttgcctcccttggctgcaggaaggctccgccttccctactattcctctttcgcgcctttttgataacgcaatgctgcgggcacacagactgcaccagctggccttcgatacctaccaggaattccggctggaagacgggtccccccgaaccgggcaaatctttaaacaaacctacagtaagtttgacaccaattcccacaatgatgacgcccttctaaagaattacgggttattgtactgcttccgtaaagacatggacaaagtggagacattcctgaggattgtccagtgcaggtccgtagaggggtcctgcgggttttag

SEQ ID NO: 212755 - DNA, 537 bp, Artificial Sequence
  derived and/or modified sequence
aggatcccaaggcccaactccccgaaccactcagggtcctgtggacagctcacctagctgcaatggctacaggctcccggacgtccctgctcctggcttttggcctgctctgcctgccctggcttcaagagggcagtgccttcccaaccattcccttatccaggctttttgacaacgctatgctccgcgcccatcgtctgcaccagctggcctttgacacctaccaggagtttaggctggaagatggcagcccccggactgggcagatcttcaagcagacctacagcaagttcgacacaaactcacacaacgatgacgcactactcaagaactacgggctgctctactgcttcaggaaggacatggacaaggtcgagacattcctgcgcatcgtgcagtgccgctctgtggagggcagctgtggcttctagctgcccgggtggcatccctgtgacccctccccagtgcctctcctggccctggaagttgccactccagtgcccaccagccttgtcctaataaaattaagttgcatca

SEQ ID NO: 212756 - DNA, 369 bp, Artificial Sequence
  derived and/or modified sequence
atggctactggttcccgcaccagcctgctgctggcattcgggctgctgtgtctcccctggttgcaagagggttccgcatttccaacaattcctctgagccggctctttgataacgctatgttgcgggctcaccgactccatcagctggccttcgacacctatcaggaatttaggttagaagacggatcccccaggaccggacaaatctttaagcagacctactctaaatttgacactaactcccacaatgatgatgcactcctgaaaaattacggactgctttattgtttcagaaaggacatggacaaggtcgagacgttcctcagaattgtccagtgtcggtcggtcgaggggtcttgtggattctag

SEQ ID NO: 212757 - DNA, 369 bp, Artificial Sequence
  derived and/or modified sequence
atggctacggggagtcgaacaagcctgttacttgcttttgggttactgtgcttgccttggctgcaggagggcagcgcgtttccaaccatccctctcagtagactgtttgataacgccatgctgcgcgcccaccgcctccaccaactcgcgttcgatacgtaccaggagttccggctggaggatggctccccccggactggacagatatttaaacaaacatattccaagtttgacacaaactcacacaatgacgatgcactgctgaagaactacggactcctctattgttttaggaaggatatggataaagttgaaacctttctccgaattgtacaatgcaggtccgttgagggcagttgtggattctag

SEQ ID NO: 212758 - DNA, 369 bp, Artificial Sequence
  derived and/or modified sequence
atggccaccggttcccgtacatccttactcctcgcatttgggcttttgtgtttaccttggcttcaggagggctctgcatttcccaccattccactgtccagactttttgataatgccatgctgcgggcccacaggctccaccagctcgcctttgacacctaccaggaatttaggctcgaggacggctcgccacgcacgggtcagatcttcaagcaaacatacagcaaattcgatactaactctcacaacgacgatgcactgcttaagaattacggccttctgtactgttttcgaaaggatatggataaggttgagacttttctaagaatagtgcaatgcagaagtgtggagggatcgtgtggattctag

SEQ ID NO: 212759 - DNA, 369 bp, Artificial Sequence
  derived and/or modified sequence
atggcccctggaagcagaacttccctgctcctggcctttgcactgctgtgcctcccatggctgcaagaagccggcgccgttcagacggtgcccctttcacggctcttcgaccacgccatgctccaggcccaccgtgcgcatcagctggccattgatacctaccaggaatttcgccttgaggacggctcccgacggacgggtcaaattctaaaacagacatattccaagttcgatacgaattcacataatcatgacgccttgctgaagaattacggtctgctctattgcttcagaaaagacatggacaaggtggaaacgttcctcagaatggtacagtgcagaagtgtggagggctcttgcggcttttag

SEQ ID NO: 212760 - DNA, 369 bp, Artificial Sequence
  derived and/or modified sequence
atggccgctggttccaggacctcattacttctggctttcgccttgctttgcctgccctggctgcaggaggcaggagctgtgcagacagtccccctcagtaggctgtttgatcatgctatgctgcaggctcaccgcgctcatcagctagccatcgacacataccaagaattcaggctagaagacgggtcaagaagaactggtcagattctcaaacagacctatagtaagtttgacactaactcacacaaccatgacgccctgttgaagaactacggacttctttactgcttcagaaaggatatggacaaggtggaaacattcctccgaatggttcagtgccgcagcgtcgagggatcttgtgggttttag

SEQ ID NO: 212761 - DNA, 369 bp, Artificial Sequence
  derived and/or modified sequence
atggcccctggcagcaggaccagcctgctgctggcctttgccctgctgtgcctgccctggctgcaggaggccggggctgtgcagacagtgcccctgagccggctgtttgaccacgccatgctgcaggcccaccgggcccaccagctggccatcgacacctaccaggagttccggctggaggatggcagcagaagaacaggccagatcctgaagcagacctacagcaagtttgacaccaacagccacaaccatgatgccctgctgaagaactacggcctgctgtactgcttcaggaaggacatggacaaggtggagaccttcctgaggatggtgcagtgccgctctgtggagggcagctgtggcttctag

SEQ ID NO: 212762 - DNA, 369 bp, Artificial Sequence
  derived and/or modified sequence
atggctgctggcagcaggaccagcctgctgctggcctttgccctgctgtgcctgccctggctgcaggaggccggggctgtgcagacagtgcccctgagccggctgtttgaccacgccatgctgcaggcccaccgggcccaccagctggccatcgacacctaccaggagttccggctggaggatggcagcagaagaacaggccagatcctgaagcagacctacagcaagtttgacaccaacagccacaaccatgatgccctgctgaagaactacggcctgctgtactgcttcaggaaggacatggacaaggtggagaccttcctgaggatggtgcagtgccgctctgtggagggcagctgtggcttctag

SEQ ID NO: 212763 - DNA, 369 bp, Artificial Sequence
  derived and/or modified sequence
atggcccccggcagccggaccagcctgctgctggccttcgccctgctctgtctgccatggctgcaggaggccggcgcagtgcaaacagtgcctttgtccaggctctttgaccacgcaatgctgcaggcccaccgggcccatcagctggctatcgacacataccaggagtttcgtcttgaagacggctcccgccggacaggtcaaatcttaaaacagacttatagcaagttcgacacaaacagtcataatcacgatgccctgctcaaaaactacggcttgttgtattgcttccgaaaagatatggacaaagtcgagacattcctacgcatggtgcaatgccgttctgtcgagggcagttgcggtttttag

SEQ ID NO: 212764 - DNA, 369 bp, Artificial Sequence
  derived and/or modified sequence
atggccgccggcagccggaccagcctgctgctggccttcgccctgttgtgtctgccttggctccaagaagccggtgccgtgcaaaccgtgcctctctcacggctattcgatcacgcaatgctgcaagcacacagggctcaccagctggcgatcgatacgtatcaagaattcagacttgaggacggaagcaggcgaaccgggcaaatcttaaagcagacatatagcaagttcgacacaaactcccacaaccacgatgctctcctgaagaattacggacttctttactgttttagaaaggatatggacaaggtggaaacgtttttacgcatggtgcagtgcaggtcggttgaagggtcatgtggcttttag

SEQ ID NO: 212765 - DNA, 369 bp, Artificial Sequence
  derived and/or modified sequence
atggcacccggttctcgaacctctctcctgctggcatttgcattgttatgtcttccctggctccaggaggccggagcggtccagacagtgccactgtctaggctgtttgaccacgctatgcttcaagctcaccgggctcaccagctggcaattgacacgtaccaggagtttcggcttgaggatggctctcggagaactggccagatactgaagcaaacgtattccaaattcgacactaacagtcacaatcacgatgccctgctgaagaactacggactgttgtactgtttcaggaaagatatggacaaggttgaaactttcctccgcatggtacaatgtcgtagcgtggagggcagttgcgggttctag

SEQ ID NO: 212766 - DNA, 369 bp, Artificial Sequence
  derived and/or modified sequence
atggccgcagggtcgaggactagcctgctgttggccttcgctctgctttgcctgccgtggctgcaagaagctggcgctgtgcagaccgtgcccctttctcgcttattcgatcacgcaatgctgcaggcacaccgggcacatcagctggccattgatacctaccaagaattccggttggaagacgggtctcggcgaacgggccagattctgaaacagacgtattccaagttcgacaccaatagtcataaccacgacgctctgttaaaaaactatggtcttttatattgctttagaaaagatatggataaagttgagactttcctaaggatggtgcagtgccgctcagtcgaggggtcatgcgggttttag

SEQ ID NO: 212767 - DNA, 369 bp, Artificial Sequence
  derived and/or modified sequence
atggcacccggcagtagaactagcctcctgctcgcctttgccttgctgtgtctcccctggttgcaggaagctggcgccgtacagacagttccgttgtcacgtctattcgatcacgcaatgctccaagcacatcgggctcaccaactggcgattgacacctatcaggaattccgccttgaagacggcagcaggcgcactggacagatacttaaacagacttattcaaaattcgacaccaattctcataatcacgacgctctgctgaagaattatggactcctgtattgctttagaaaggatatggataaagtggagacatttctcagaatggttcagtgcagaagcgtggagggcagctgcggattctag

SEQ ID NO: 212768 - DNA, 369 bp, Artificial Sequence
  derived and/or modified sequence
atggctgcaggctcacgaacatcactcctgttagcctttgcgcttctatgcttaccatggttgcaagaagccggagctgtgcaaacagtccccctgtccagattgttcgaccacgctatgctgcaggcacacagggcacatcagctggctatcgacacctatcaagaattccggttagaggacgggtctagaagaacagggcaaatcctgaagcagacttactctaaatttgacacgaactcccataaccacgacgcactcctgaagaattatggtctcttgtattgctttagaaaagacatggacaaagtcgagacttttttgcgcatggtacagtgtcggtcagtagagggatcctgcggattctag

SEQ ID NO: 212769 - DNA, 369 bp, Artificial Sequence
  derived and/or modified sequence
atggcacccggcagtagaactagcctcctgctcgcctttgccttgctgtgtctcccctggttgcaggaagctggcgccgtacagacagttccgttgtcacgtctattcgatcacgcaatgctccaagcacatcgggctcaccaactggcgattgacacctatcaggaattccgccttgaagacggcagcaggcgcactggacagatacttaaacagacttattcaaaattcgacaccaattctcataatcacgacgctctgctgaagaattatggactcctgtattgctttagaaaggatatggataaagtggagacgttcctgagaatggtgcaatgcagatctgtggaggggagctgtggattttag

SEQ ID NO: 212770 - DNA, 369 bp, Artificial Sequence
  derived and/or modified sequence
atggctgcaggctcacgaacatcactcctgttagcctttgcgcttctatgcttaccatggttgcaagaagccggagctgtgcaaacagtccccctgtccagattgttcgaccacgctatgctgcaggcacacagggcacatcagctggctatcgacacctatcaagaattccggttagaggacgggtctagaagaacagggcaaatcctgaagcagacttactctaaatttgacacgaactcccataaccacgacgcactcctgaagaattatggtctcttgtattgctttagaaaagacatggacaaggtagaaacttttttacgtatggtacagtgtagatctgtcgaaggcagctgtgggttttag

SEQ ID NO: 212771 - DNA, 546 bp, Artificial Sequence
  derived and/or modified sequence
gaactggccagggtataaaaagggcccacaagagaccggctctaggatcccaaggcccaactccccgaaccactcagggtcctgtggacagctcacctagtggcaatggctccaggctcccggacgtccctgctcctggcttttgccctgctctgcctgccctggcttcaagaggctggtgccgtccaaaccgttcccttatccaggctttttgaccacgctatgctccaagcccatcgcgcgcaccagctggccattgacacctaccaggagtttaggctggaagacggcagccgccggactgggcagatcctcaagcagacctacagcaagtttgacacaaactcgcacaaccatgacgcactgctcaagaactacgggctgctctactgcttcaggaaggacatggacaaggtcgagacattcctgcgcatggtgcagtgccgctctgtggagggcagctgtggcttctaggtgcccgagtagcatcctgtgacccctccccagtgcctctcctggccctgaaggtgccactccagtgcccac

SEQ ID NO: 212772 - DNA, 550 bp, Artificial Sequence
  derived and/or modified sequence
gaactggccagggtataaaaagggcccacaagagaccggctctaggatcccaaggcccaactccccgaaccactcagggtcctgtggacagctcacctagcggcaatggctgcaggctcccggacgtccctgctcctggcttttgccctgctctgcctgccctggcttcaagaggctggtgccgtccaaaccgttccgttatccaggctttttgaccacgctatgctccaagcccatcgcgcgcaccagctggccattgacacctaccaggagtttaggctggaagacggcagccgccggactgggcagatcctcaagcagacctacagcaagtttgacacaaactcacacaaccatgacgcactgctcaagaactacgggctgctctactgcttcaggaaggacatggacaaggtcgagacattcctgcgcatggtgcagtgccgctctgtagagggtagctgtggcttctaggtgcccgcgtggcatcctgtgaccgacccctccccagtgcctctcctggccctggaaggtgccactccagtgccca

SEQ ID NO: 212773 - DNA, 369 bp, Artificial Sequence
  derived and/or modified sequence
atggcccccggcagcagaaccagcctgctgctggccttcgccctgctgtgcctgccctggctgcaggaggccggcgccgtgcagaccgtgcccctgagcagactgttcgaccacgccatgctgcaggcccacagagcccaccagctggccatcgacacctaccaggagttcagactggaggacggcagcagaagaaccggccagatcctgaagcagacctacagcaagttcgacaccaacagccacaaccacgacgccctgctgaagaactacggcctgctgtactgcttcagaaaggacatggacaaggtggagaccttcctgagaatggtgcagtgcagaagcgtggagggcagctgcggcttctag

SEQ ID NO: 212774 - DNA, 369 bp, Artificial Sequence
  derived and/or modified sequence
atggccgccggcagcagaaccagcctgctgctggccttcgccctgctgtgcctgccctggctgcaggaggccggcgccgtgcagaccgtgcccctgagcagactgttcgaccacgccatgctgcaggcccacagagcccaccagctggccatcgacacctaccaggagttcagactggaggacggcagcagaagaaccggccagatcctgaagcagacctacagcaagttcgacaccaacagccacaaccacgacgccctgctgaagaactacggcctgctgtactgcttcagaaaggacatggacaaggtggagaccttcctgagaatggtgcagtgcagaagcgtggagggcagctgcggcttctag

SEQ ID NO: 212775 - RNA, 369 nt, Artificial Sequence
  derived and/or modified sequence
auggcuacggggagucgaacaagccuguuacuugcuuuuggguuacugugcuugccuuggcugcaggagggcagcgcguuuccaaccaucccucucaguagacuguuugauaacgccaugcugcgcgcccaccgccuccaccaacucgcguucgauacguaccaggaguuccggcuggaggauggcuccccccggacuggacagauauuuaaacaaacauauuccaaguuugacacaaacucacacaaugacgaugcacugcugaagaacuacggacuccucuauuguuuuaggaaggauauggauaaaguugaaaccuuucuccgaauuguacaaugcagguccguugagggcaguuguggauucuag

SEQ ID NO: 212776 - RNA, 369 nt, Artificial Sequence
  derived and/or modified sequence
auggccaccgguucccguacauccuuacuccucgcauuugggcuuuuguguuuaccuuggcuucaggagggcucugcauuucccaccauuccacuguccagacuuuuugauaaugccaugcugcgggcccacaggcuccaccagcucgccuuugacaccuaccaggaauuuaggcucgaggacggcucgccacgcacgggucagaucuucaagcaaacauacagcaaauucgauacuaacucucacaacgacgaugcacugcuuaagaauuacggccuucuguacuguuuucgaaaggauauggauaagguugagacuuuucuaagaauagugcaaugcagaaguguggagggaucguguggauucuag

SEQ ID NO: 212777 - protein, 1735 aa, Artificial Sequence
  derived and/or modified sequence
MSVSRTMEDSCELDLVYVTERIIAVSFPSTANEENFRSNLREVAQMLKSKHGGNYLLFNLSERRPDITKLHAKVLEFGWPDLHTPALEKICSICKAMDTWLNADPHNVVVLHNKGNRGRIGVVIAAYMHYSNISASADQALDRFAMKRFYEDKIVPIGQPSQRRYVHYFSGLLSGSIKMNNKPLFLHHVIMHGIPNFESKGGCRPFLRIYQAMQPVYTSGIYNIPGDSQTSVCITIEPGLLLKGDILLKCYHKKFRSPARDVIFRVQFHTCAIHDLGVVFGKEDLDDAFKDDRFPEYGKVEFVFSYGPEKIQGMEHLENGPSVSVDYNTSDPLIRWDSYDNFSGHRDDGMEEVVGHTQGPLDGSLYAKVKKKDSLHGSTGAVNATRPTLSATPNHVEHTLSVSSDSGNSTASTKTDKTDEPVPGASSATAALSPQEKRELDRLLSGFGLEREKQGAMYHTQHLRSRPAGGSAVPSSGRHVVPAQVHVNGGALASERETDILDDELPNQDGHSAGSMGTLSSLDGVTNTSEGGYPEALSPLTNGLDKSYPMEPMVNGGGYPYESASRAGPAHAGHTAPMRPSYSAQEGLAGYQREGPHPAWPQPVTTSHYAHDPSGMFRSQSFSEAEPQLPPAPVRGGSSREAVQRGLNSWQQQQQQQQQPRPPPRQQERAHLESLVASRPSPQPLAETPIPSLPEFPRAASQQEIEQSIETLNMLMLDLEPASAAAPLHKSQSVPGAWPGASPLSSQPLSGSSRQSHPLTQSRSGYIPSGHSLGTPEPAPRASLESVPPGRSYSPYDYQPCLAGPNQDFHSKSPASSSLPAFLPTTHSPPGPQQPPASLPGLTAQPLLSPKEATSDPSRTPEEEPLNLEGLVAHRVAGVQAREKQPAEPPAPLRRRAASDGQYENQSPEATSPRSPGVRSPVQCVSPELALTIALNPGGRPKEPHLHSYKEAFEEMEGTSPSSPPPSGVRSPPGLAKTPLSALGLKPHNPADILLHPTGVTRRRIQPEEDEGKVVVRLSEEPRSYVESVARTAVAGPRAQDSEPKSFSAPATQAYGHEIPLRNGTLGGSFVSPSPLSTSSPILSADSTSVGSFPSGESSDQGPRTPTQPLLESGFRSGSLGQPSPSAQRNYQSSSPLPTVGSSYSSPDYSLQHFSSSPESQARAQFSVAGVHTVPGSPQARHRTVGTNTPPSPGFGWRAINPSMAAPSSPSLSHHQMMGPPGTGFHGSTVSSPQSSAATTPGSPSLCRHPAGVYQVSGLHNKVATTPGSPSLGRHPGAHQGNLASGLHSNAIASPGSPSLGRHLGGSGSVVPGSPCLDRHVAYGGYSTPEDRRPTLSRQSSASGYQAPSTPSFPVSPAYYPGLSSPATSPSPDSAAFRQGSPTPALPEKRRMSVGDRAGSLPNYATINGKVSSPVASGMSSPSGGSTVSFSHTLPDFSKYSMPDNSPETRAKVKFVQDTSKYWYKPEISREQAIALLKDQEPGAFIIRDSHSFRGAYGLAMKVSSPPPTIMQQNKKGDMTHELVRHFLIETGPRGVKLKGCPNEPNFGSLSALVYQHSIIPLALPCKLVIPNRDPTDESKDSSGPANSTADLLKQGAACNVLFVNSVDMESLTGPQAISKATSETLAADPTPAATIVHFKVSAQGITLTDNQRKLFFRRHYPLNTVTFCDLDPQERKWMKTEGGAPAKLFGFVARKQGSTTDNACHLFAELDPNQPASAIVNFVSKVMLNAGQKR

SEQ ID NO: 212778 - DNA, 5208 bp, Artificial Sequence
  derived and/or modified sequence
atgagcgtgagcagaaccatggaggacagctgcgagctggacctggtgtacgtgaccgagagaatcatcgccgtgagcttccccagcaccgccaacgaggagaacttcagaagcaacctgagagaggtggcccagatgctgaagagcaagcacggcggcaactacctgctgttcaacctgagcgagagaagacccgacatcaccaagctgcacgccaaggtgctggagttcggctggcccgacctgcacacccccgccctggagaagatctgcagcatctgcaaggccatggacacctggctgaacgccgacccccacaacgtggtggtgctgcacaacaagggcaacagaggcagaatcggcgtggtgatcgccgcctacatgcactacagcaacatcagcgccagcgccgaccaggccctggacagattcgccatgaagagattctacgaggacaagatcgtgcccatcggccagcccagccagagaagatacgtgcactacttcagcggcctgctgagcggcagcatcaagatgaacaacaagcccctgttcctgcaccacgtgatcatgcacggcatccccaacttcgagagcaagggcggctgcagacccttcctgagaatctaccaggccatgcagcccgtgtacaccagcggcatctacaacatccccggcgacagccagaccagcgtgtgcatcaccatcgagcccggcctgctgctgaagggcgacatcctgctgaagtgctaccacaagaagttcagaagccccgccagagacgtgatcttcagagtgcagttccacacctgcgccatccacgacctgggcgtggtgttcggcaaggaggacctggacgacgccttcaaggacgacagattccccgagtacggcaaggtggagttcgtgttcagctacggccccgagaagatccagggcatggagcacctggagaacggccccagcgtgagcgtggactacaacaccagcgaccccctgatcagatgggacagctacgacaacttcagcggccacagagacgacggcatggaggaggtggtgggccacacccagggccccctggacggcagcctgtacgccaaggtgaagaagaaggacagcctgcacggcagcaccggcgccgtgaacgccaccagacccaccctgagcgccacccccaaccacgtggagcacaccctgagcgtgagcagcgacagcggcaacagcaccgccagcaccaagaccgacaagaccgacgagcccgtgcccggcgccagcagcgccaccgccgccctgagcccccaggagaagagagagctggacagactgctgagcggcttcggcctggagagagagaagcagggcgccatgtaccacacccagcacctgagaagcagacccgccggcggcagcgccgtgcccagcagcggcagacacgtggtgcccgcccaggtgcacgtgaacggcggcgccctggccagcgagagagagaccgacatcctggacgacgagctgcccaaccaggacggccacagcgccggcagcatgggcaccctgagcagcctggacggcgtgaccaacaccagcgagggcggctaccccgaggccctgagccccctgaccaacggcctggacaagagctaccccatggagcccatggtgaacggcggcggctacccctacgagagcgccagcagagccggccccgcccacgccggccacaccgcccccatgagacccagctacagcgcccaggagggcctggccggctaccagagagagggcccccaccccgcctggccccagcccgtgaccaccagccactacgcccacgaccccagcggcatgttcagaagccagagcttcagcgaggccgagccccagctgccccccgcccccgtgagaggcggcagcagcagagaggccgtgcagagaggcctgaacagctggcagcagcagcagcagcagcagcagcagcccagacccccccccagacagcaggagagagcccacctggagagcctggtggccagcagacccagcccccagcccctggccgagacccccatccccagcctgcccgagttccccagagccgccagccagcaggagatcgagcagagcatcgagaccctgaacatgctgatgctggacctggagcccgccagcgccgccgcccccctgcacaagagccagagcgtgcccggcgcctggcccggcgccagccccctgagcagccagcccctgagcggcagcagcagacagagccaccccctgacccagagcagaagcggctacatccccagcggccacagcctgggcacccccgagcccgcccccagagccagcctggagagcgtgccccccggcagaagctacagcccctacgactaccagccctgcctggccggccccaaccaggacttccacagcaagagccccgccagcagcagcctgcccgccttcctgcccaccacccacagcccccccggcccccagcagccccccgccagcctgcccggcctgaccgcccagcccctgctgagccccaaggaggccaccagcgaccccagcagaacccccgaggaggagcccctgaacctggagggcctggtggcccacagagtggccggcgtgcaggccagagagaagcagcccgccgagccccccgcccccctgagaagaagagccgccagcgacggccagtacgagaaccagagccccgaggccaccagccccagaagccccggcgtgagaagccccgtgcagtgcgtgagccccgagctggccctgaccatcgccctgaaccccggcggcagacccaaggagccccacctgcacagctacaaggaggccttcgaggagatggagggcaccagccccagcagccccccccccagcggcgtgagaagcccccccggcctggccaagacccccctgagcgccctgggcctgaagccccacaaccccgccgacatcctgctgcaccccaccggcgtgaccagaagaagaatccagcccgaggaggacgagggcaaggtggtggtgagactgagcgaggagcccagaagctacgtggagagcgtggccagaaccgccgtggccggccccagagcccaggacagcgagcccaagagcttcagcgcccccgccacccaggcctacggccacgagatccccctgagaaacggcaccctgggcggcagcttcgtgagccccagccccctgagcaccagcagccccatcctgagcgccgacagcaccagcgtgggcagcttccccagcggcgagagcagcgaccagggccccagaacccccacccagcccctgctggagagcggcttcagaagcggcagcctgggccagcccagccccagcgcccagagaaactaccagagcagcagccccctgcccaccgtgggcagcagctacagcagccccgactacagcctgcagcacttcagcagcagccccgagagccaggccagagcccagttcagcgtggccggcgtgcacaccgtgcccggcagcccccaggccagacacagaaccgtgggcaccaacaccccccccagccccggcttcggctggagagccatcaaccccagcatggccgcccccagcagccccagcctgagccaccaccagatgatgggcccccccggcaccggcttccacggcagcaccgtgagcagcccccagagcagcgccgccaccacccccggcagccccagcctgtgcagacaccccgccggcgtgtaccaggtgagcggcctgcacaacaaggtggccaccacccccggcagccccagcctgggcagacaccccggcgcccaccagggcaacctggccagcggcctgcacagcaacgccatcgccagccccggcagccccagcctgggcagacacctgggcggcagcggcagcgtggtgcccggcagcccctgcctggacagacacgtggcctacggcggctacagcacccccgaggacagaagacccaccctgagcagacagagcagcgccagcggctaccaggcccccagcacccccagcttccccgtgagccccgcctactaccccggcctgagcagccccgccaccagccccagccccgacagcgccgccttcagacagggcagccccacccccgccctgcccgagaagagaagaatgagcgtgggcgacagagccggcagcctgcccaactacgccaccatcaacggcaaggtgagcagccccgtggccagcggcatgagcagccccagcggcggcagcaccgtgagcttcagccacaccctgcccgacttcagcaagtacagcatgcccgacaacagccccgagaccagagccaaggtgaagttcgtgcaggacaccagcaagtactggtacaagcccgagatcagcagagagcaggccatcgccctgctgaaggaccaggagcccggcgccttcatcatcagagacagccacagcttcagaggcgcctacggcctggccatgaaggtgagcagccccccccccaccatcatgcagcagaacaagaagggcgacatgacccacgagctggtgagacacttcctgatcgagaccggccccagaggcgtgaagctgaagggctgccccaacgagcccaacttcggcagcctgagcgccctggtgtaccagcacagcatcatccccctggccctgccctgcaagctggtgatccccaacagagaccccaccgacgagagcaaggacagcagcggccccgccaacagcaccgccgacctgctgaagcagggcgccgcctgcaacgtgctgttcgtgaacagcgtggacatggagagcctgaccggcccccaggccatcagcaaggccaccagcgagaccctggccgccgaccccacccccgccgccaccatcgtgcacttcaaggtgagcgcccagggcatcaccctgaccgacaaccagagaaagctgttcttcagaagacactaccccctgaacaccgtgaccttctgcgacctggacccccaggagagaaagtggatgaagaccgagggcggcgcccccgccaagctgttcggcttcgtggccagaaagcagggcagcaccaccgacaacgcctgccacctgttcgccgagctggaccccaaccagcccgccagcgccatcgtgaacttcgtgagcaaggtgatgctgaacgccggccagaagagatag

SEQ ID NO: 212779 - DNA, 5208 bp, Artificial Sequence
  derived and/or modified sequence
atgagcgtaagtcgcactatggaggacagttgcgagttagacctagtgtatgtgactgagcggattattgccgtgtcgtttccgtccaccgccaacgaggagaatttccgcagcaacctgagggaggtggctcagatgctgaagagtaagcacggcggcaactatcttctcttcaacctatccgaaaggaggcctgacattacgaagctgcatgctaaagttctcgaatttgggtggccagacctgcatacccccgcacttgaaaagatttgttccatttgcaaggctatggatacatggttgaacgccgatccccacaacgttgtcgtcctgcacaacaagggaaaccgaggcagaatcggtgtggtcattgctgcttacatgcactattctaacatatccgcctccgctgatcaggccctggacagattcgccatgaaaaggttttatgaggacaaaattgttcctatcggtcagccttctcagcgacgctacgtgcattatttttctggcctgctgagtggcagcatcaagatgaataataaacctctatttttacatcacgtgatcatgcatgggatccctaattttgagtcgaagggcggctgccggccctttctccgcatctatcaggccatgcagccagtatacacttccggcatctacaatatccccggcgactcccagacttctgtatgtataacgattgagccgggcctcttgctcaagggtgacatcctcctgaagtgctaccacaagaagttccgcagccccgctagggatgtgattttccgggtgcagtttcatacttgtgccattcacgatctgggtgttgtctttggaaaggaagacttggacgatgctttcaaagatgataggtttccagagtacgggaaggttgagttcgtgttctcttatgggcccgaaaagatccagggaatggaacatctggagaacggaccttccgtctccgtggactataacacatcagatcctctcatccggtgggatagttatgataatttctccgggcatcgtgacgatggcatggaggaggtggtgggtcacacccagggtccactcgacggcagcctatacgcaaaagtgaaaaaaaaggattcattgcatggaagtaccggagccgttaacgccacgcgccctactctgagcgccacacccaaccacgttgagcacaccctgagcgtatcttctgacagtgggaactcaacggcaagcactaagacagacaagactgacgagcccgtgcctggagcctctagcgcgaccgctgcactgtctcctcaggagaagcgtgagcttgatcggctgttaagtggcttcggactcgagagggaaaagcagggagccatgtatcatactcagcacctgagaagcaggcccgccggtggcagtgcggttccctcaagtggacgccacgtagtacccgcacaggtccatgtaaacggaggcgccctggcatcggaacgggaaaccgatatcctcgatgatgagctcccaaatcaagacggacatagtgcaggcagtatgggaacactgtcttccctggacggcgtcacaaatacctccgaggggggctaccccgaagccctatcgcctctcaccaacggattggataaaagttaccccatggagccaatggtgaacggtggcggatacccctatgagtctgcatcacgcgcagggccagctcacgcgggacataccgccccgatgcgcccttcctactcagcccaggaagggttagccggctaccagcgcgagggcccacaccccgcatggccccaacctgtcacaacgtcccactatgctcacgacccatcaggtatgttccggtcgcagtccttctctgaggccgagccacagctgcctccggctccagtccgcggcggctcttcacgagaggcggtgcagcggggactgaactcatggcaacagcagcagcaacaacagcaacaacctcgaccgcctccacgacagcaggaaagagcccaccttgagtctttggttgcatctcggccttctcctcagccgctggcagaaacgcccattcctagcctcccagagtttcctcgggccgcctctcaacaggaaattgagcagagcatagaaacactgaatatgctcatgctggatcttgaacctgcgagcgcagcagcccctctccataagagccagagcgtgccaggtgcctggcctggggcatctccgctgagttctcaaccactgtcaggcagttccagacagtcccatccgctgacacagtctagatcaggttatattccatccgggcactctcttgggacgcctgagccggccccgcgcgccagtctcgagtcagtgcctccgggaagatcctactctccctacgattaccaaccctgcctggccggccctaaccaggacttccatagtaaatcccctgcctccagtagtctacccgctttcttgcctactacccacagtcctccaggccctcaacagcctcccgcttccctgcctggtctaaccgcccagcctttgcttagtccaaaggaagcaaccagcgatccttctcgcactcctgaggaggagccccttaatctggaggggctcgtggcccaccgtgtggcgggggtccaagcccgggagaaacagccagccgagccccccgcccctctaaggagacgagctgcctctgacggccaatacgagaatcagtcgcctgaggccacatccccccggagccctggggtccgcagcccagttcagtgcgtgagccctgagctcgcccttactattgcactgaatccaggcgggagacctaaggagccccaccttcacagttataaggaggcttttgaggagatggaagggacttccccttcctcccctcctccctcaggtgtccgcagtcctcctggattggctaagaccccactcagcgcactgggactgaaacctcacaatccagccgacattcttcttcaccccacaggggtaacacgccgacgcattcagcccgaggaagatgagggaaaggtagttgtgagattgtcagaggagccaagatcctacgtggaatcagtggcccgcacggccgtggctggcccccgggctcaggacagtgagcccaagtcctttagtgctcctgcgacgcaggcctatgggcatgaaatccccctgcggaacggcactctgggcgggtctttcgtctcgccctcccccctgtccaccagcagcccgatcctgtctgccgactcgacctccgtggggagcttcccttccggagagtctagtgatcagggtccacgcactccaacccaacctctcctggaatccggatttcgttcagggtcgctcgggcagccatccccatctgctcagcggaactaccagtcatccagcccgctgccaactgtgggtagtagttattcctcacccgactacagcttacagcattttagttccagcccagagagtcaggccagagcccagttttcagtggcaggcgtgcacacagttccaggctcgccacaagcccgtcaccgtaccgtgggaactaatacacccccatcacctggattcggatggcgcgccatcaatccaagtatggccgcccccagctcccccagtctgagccaccaccagatgatgggccccccaggaacagggtttcatggctctactgtatcaagcccacagagcagtgcggccaccaccccaggttcccccagtctgtgccggcaccccgccggcgtgtaccaagtcagcggcctgcataataaggtggccacaacaccaggctcgccgagcctgggaaggcatccgggtgctcaccagggcaacctggcgagcggtctacattccaatgccattgcgagccccggttcccccagcctgggtcggcacctgggcggcagcggtagtgtcgtgcctggctcgccatgcttggatcggcatgttgcttatggcggttatagcaccccagaagacaggagacccactctcagtcgccagtcttctgcttccggatatcaggcaccttccacaccatctttcccggtttcacctgcctactatcccggcctgagctctccagccacgtctcccagcccagatagtgccgccttccgacaggggtcccctacccccgccctgcccgagaagcgccgcatgagtgtgggcgacagagccggcagtctcccaaactacgccaccattaacggtaaggtgtcaagccctgtggcaagcgggatgtcatccccttccggagggtcgactgtgagctttagtcatactctgcccgacttctctaagtatagtatgcccgataactctccagagacaagggctaaggtgaaatttgttcaagatactagcaagtattggtacaagcctgagattagcagagaacaggccattgcgctcttgaaggatcaggagcccggcgcctttatcattcgtgactcacacagcttcaggggagcttacgggttagccatgaaggtcagctctcctcccccgacgatcatgcaacagaacaagaagggggacatgacccacgagctggtacggcatttcctgatcgagaccggacccagaggcgtcaaactgaagggctgccccaacgaaccaaactttgggtctttgtctgcacttgtgtatcagcatagcattattccccttgcattgccttgtaagttggtgatcccaaatcgcgatcctactgacgagagcaaggacagctcgggtccagccaactcaaccgccgatctgctcaagcaaggtgctgcctgcaatgtactgttcgtaaattctgttgatatggaatccctgaccgggccacaagccatctccaaagcaacctcagagaccctggctgctgatccaacgccggcagccacaattgtgcacttcaaggtcagcgcacaaggcattacgctcaccgataatcagcgaaaacttttctttaggcgccattacccgcttaatacagtaactttttgtgacctcgacccacaggagcggaaatggatgaagacggagggaggggctccggccaagctgttcggatttgtggcgcggaaacaggggtctaccaccgacaatgcctgtcatcttttcgcagagctcgatccaaaccagcccgcatccgccatcgtaaatttcgtcagcaaggtaatgctcaacgctggtcagaagcgctag

SEQ ID NO: 212780 - DNA, 5208 bp, Artificial Sequence
  derived and/or modified sequence
atgtctgtgtccaggaccatggaggacagctgtgagctggacctggtgtatgtgacagagcgcatcatcgctgtgtccttccccagcacagccaatgaggagaacttccgcagcaacctgcgggaggtggcccagatgctgaagagcaagcatggaggcaactacctgctcttcaacctgtctgaaagaagaccagacatcaccaagctgcacgccaaggtgctggagtttggctggccagacctgcacaccccagccctggagaagatctgcagcatctgcaaggccatggacacctggctgaatgctgacccccacaacgtggtggtgctgcacaacaagggcaacagaggccgcatcggcgtggtgattgctgcctacatgcactacagcaacatcagcgccagcgctgaccaggccctggacagatttgccatgaagcgcttctatgaggacaagatcgtgcccatcggccagcccagccagaggagatatgtgcactacttcagcggcctgctgagcggcagcatcaagatgaacaacaagcccctcttcctgcaccacgtgatcatgcacggcatccccaactttgagagcaagggcggctgccggcccttcctgcgcatctaccaggccatgcagcctgtgtacaccagcggcatctacaacatccctggggacagccagacctctgtgtgcatcaccatcgagcccggcctgctgctgaagggggacatcctgctgaagtgctaccacaagaagttccgcagccctgccagagatgtgatcttccgggtgcagttccacacctgtgccatccatgacctgggcgtggtgtttgggaaggaggacctggatgatgccttcaaggatgaccgcttcccagaatatggcaaggtggagtttgtgttctcctatggccctgagaagatccagggcatggagcacctggagaatggccccagcgtgtctgtggactacaacaccagtgaccccctcatccgctgggacagctatgacaacttcagcggccacagagatgatggcatggaggaggtggtgggccacacccagggccccctggatggcagcctgtatgccaaggtgaagaagaaggacagcctgcacggcagcactggagctgtgaatgccacccggcccaccctgagcgccacccccaaccacgtggagcacaccctgtctgtgtccagtgacagcggcaacagcacagccagcaccaagacagacaagacagatgagcctgtgcctggggccagcagcgccacagctgccctgagcccccaggagaagcgggagctggaccggctgctgagcggcttcggcctggagcgggagaagcagggcgccatgtaccacacccagcacctgcggagcaggcctgctgggggcagcgctgtgcccagcagcggcagacatgtggtgcctgcccaggtgcacgtgaatggaggagccctggccagcgagcgggagacagacatcctggatgatgagctgcccaaccaggacggccacagcgctggctccatgggcaccctgagcagcctggatggagtgaccaacaccagcgagggcggctacccagaggccctgagccccctgaccaacggcctggacaagagctaccccatggagcccatggtgaatggaggcggctacccctatgaaagtgccagcagagctggccctgcccacgccggccacacagcccccatgaggcccagctacagcgcccaggagggcctggccggctaccagcgggagggcccccacccagcctggccccagcctgtgaccaccagccactacgcccatgaccccagcggcatgttccgcagccagagcttcagcgaggccgagccccagctgcccccagcccctgtgcggggcggcagcagccgggaggccgtgcagaggggcctgaacagctggcagcagcagcagcagcagcagcagcagccccggcccccaccccggcagcaggagcgggcccacctggagagcctggtggccagccggcccagcccccagcccctggccgagacccccatccccagcctgcctgagttccccagggctgccagccagcaggagattgagcagagcattgagaccctgaacatgctgatgctggacctggagcccgccagcgctgctgcccccctgcacaagagccagagcgtgcctggggcctggccaggggccagccccctgagcagccagcccctgagcggcagcagccggcagagccaccccctgacccagagccgcagcggctacatccccagcggccacagcctgggcaccccagagcccgccccccgggccagcctggagagcgtgcccccaggccgcagctacagcccctatgactaccagccctgcctggccggccccaaccaggacttccacagcaagagccctgccagcagcagcctgcctgccttcctgcccaccacccacagccccccaggcccccagcagcccccagccagcctgcccggcctgacagcccagcccctgctgagccccaaggaggccaccagtgaccccagcaggaccccagaggaggagcccctgaacctggagggcctggtggcccaccgggtggccggcgtgcaggcccgggagaagcagcctgctgagcccccagcccccctgcggaggagagctgccagtgatggccagtatgagaaccagagccctgaggccaccagccccaggagccctggggtgcgcagccctgtgcagtgtgtgtccccagagctggccctgaccatcgccctgaaccctgggggccggcccaaggagccccacctgcacagctacaaggaggcctttgaggagatggagggcaccagccccagcagccccccaccttctggagtgcgcagccccccaggcctggccaagacccccctgagcgccctgggcctgaagccccacaacccagctgacatcctgctgcaccccaccggggtgacccggcggcgcatccagccagaagaagatgagggcaaggtggtggtgcggctgtctgaggagcccaggagctatgtggagagcgtggccaggacagctgtggccggcccccgggcccaggacagcgagcccaagagcttcagcgccccagccacccaggcctacggccacgagatccccctgagaaatggcaccctgggcggcagctttgtgagccccagccccctgagcaccagcagccccatcctgtctgctgacagcacctctgtgggcagcttccccagcggggagagcagtgaccagggccccaggacccccacccagcccctgctggagagcggcttccgcagcggcagcctgggccagcccagccccagcgcccagaggaactaccagagcagcagccccctgcccaccgtgggcagcagctacagcagcccagactacagcctgcagcacttcagcagcagccctgagagccaggcccgggcccagttctctgtggccggcgtgcacacagtgcccggcagcccccaggcccggcacaggacagtgggcaccaacaccccacccagccctggcttcggctggagggccatcaaccccagcatggccgcccccagcagccccagcctgagccaccaccagatgatgggccccccaggcaccggcttccacggcagcacagtgagcagcccccagagcagcgctgccaccaccccaggcagccccagcctgtgccgccaccctgctggggtgtaccaggtgtctggcctgcacaacaaggtggccaccaccccaggcagccccagcctgggccgccaccctggggcccaccagggcaacctggccagcggcctgcacagcaatgccatcgccagccctggcagccccagcctgggccgccacctgggcggcagcggctctgtggtgcccggcagcccctgcctggacagacatgtggcctatggaggctacagcaccccagaggaccggcggcccaccctgagccggcagagcagcgccagcggctaccaggcccccagcacccccagcttccctgtgtccccagcctactacccaggcctgagcagccctgccaccagccccagcccagacagcgctgccttccggcagggcagccccaccccagccctgcctgagaagaggaggatgtctgtgggggaccgggccggcagcctgcccaactatgccaccatcaacgggaaggtgagcagccctgtggccagcggcatgagcagccccagcggcggcagcacagtgtccttcagccacaccctgcctgacttcagcaagtacagcatgccagacaacagccctgagacccgggccaaggtgaagtttgtgcaggacaccagcaagtactggtacaagccagagatcagccgggagcaggccatcgccctgctgaaggaccaggagcccggggccttcatcatccgggacagccacagcttccggggggcctacggcctggccatgaaggtgagcagccccccacccaccatcatgcagcagaacaagaagggggacatgacccatgagctggtgcgccacttcctgattgaaacaggcccccggggcgtgaagctgaagggctgccccaatgagcccaactttggcagcctgagcgccctggtgtaccagcacagcatcatccccctggccctgccctgcaagctggtgatccccaacagagaccccacagatgagagcaaggacagcagcggccctgccaacagcacagctgacctgctgaagcagggcgccgcctgcaatgtgctgtttgtgaacagcgtggacatggagagcctgaccggcccccaggccatcagcaaggccaccagcgagaccctggccgctgaccccaccccagctgccaccatcgtgcacttcaaggtgtctgcccagggcatcaccctgacagacaaccagaggaagctgttcttccgccgccactaccccctgaacacagtgaccttctgtgacctggacccccaggagaggaagtggatgaagacagaaggaggagccccagccaagctgtttggatttgtggccaggaagcagggcagcaccacagacaatgcctgccacctgtttgctgagctggaccccaaccagcctgccagcgccatcgtgaactttgtgtccaaggtgatgctgaatgccggccagaagaggtag

SEQ ID NO: 212781 - DNA, 5208 bp, Artificial Sequence
  derived and/or modified sequence
atgagcgtgagccggaccatggaggacagctgcgagctggacctggtgtacgtcactgagcgaattatcgctgtgagctttccaagcacggccaacgaagagaacttccgctccaacctgcgagaggtggctcagatgctgaagtctaaacacggaggcaattatctcctattcaatctcagcgagcggcgcccggatatcaccaagctgcacgctaaggtgttggagttcggatggcccgatctgcacacacctgccctcgaaaaaatttgcagtatatgcaaagccatggacacatggctgaacgccgaccctcacaacgtggtggttctccacaacaaaggcaacagaggccgtatcggcgtggtgatcgctgcgtacatgcattacagcaacatttctgcctcagccgaccaggccctcgaccgattcgcaatgaagcgattctacgaggataagatagtacccattggtcaacccagtcagaggcggtacgttcactacttcagtggcctactcagcggatccataaagatgaataacaagccattatttctgcaccacgtaattatgcacggtattccaaactttgaatctaagggcggttgtcgccctttcctcaggatttaccaggcaatgcaacccgtgtataccagtggaatatataacattcccggcgattcccagacctctgtgtgcataactatcgagcccggcctcctgctcaaaggcgatattctcctcaaatgttatcataaaaagtttcggtcccctgcacgggatgtgatttttcgcgtgcaattccatacatgtgccatacatgatttgggggtcgtctttggaaaagaagacctcgacgatgccttcaaggatgatcgattccccgaatatgggaaagttgagtttgttttttcctacggccctgagaagattcaaggtatggagcacctcgaaaacggcccttctgtatctgtggactataatacaagtgatcccctgatccgatgggacagctatgataatttctcaggccatagagatgacggcatggaggaggtggtgggccacacccagggcccacttgatgggagcctgtacgcgaaggtcaagaaaaaggattctctgcacggttcaacaggggcggtgaatgctacaagaccaaccttatcggccaccccgaatcacgttgagcacacactatccgtctctagcgacagcggcaacagcaccgcgtccactaaaacagataagaccgacgagcctgtacccggggcctcttccgctacggcagcactgagcccgcaggaaaagagggagctggaccggctccttagcggttttggtctggagcgggagaaacagggggccatgtaccatacccagcatctacggtcaaggcccgcaggagggagcgctgtgccttcaagcggccgtcatgtagttccagcacaggtgcatgtgaatgggggcgctctagcatcggaaagagagactgacatacttgacgacgagctgccaaaccaggacggtcacagtgccgggtctatgggcacactgtcctcactggatggagtgaccaatacatcagagggaggatacccggaggccttgtcccctttgactaacgggctagacaagtcttatccgatggagcccatggttaacggcggggggtatccttatgagagcgccagccgtgcaggcccggcccatgccggccacactgccccaatgcggcctagctactctgcacaggaggggctcgcggggtaccagcgcgaaggtccacaccccgcatggccccagccagtgaccacgtctcattatgcacatgatcctagcgggatgtttcggagccagagctttagcgaagctgaaccccaactgccaccagcccccgtgcgcggcgggagtagtcgcgaagctgtgcagagggggctgaactcctggcagcaacagcagcaacagcagcaacaaccacggccacccccaagacagcaggagcgggcccatcttgaaagtcttgtcgcttctcgaccttcccctcagccgctggccgaaactcccatcccttcactgcctgaattccctcgggcagccagccagcaagaaattgagcagtccattgaaaccctgaacatgctcatgcttgacctagagcctgcctccgctgccgcccccctgcataagtcccaaagtgtgcccggggcatggccaggggcaagtccgttgtccagccaacctctgtcaggaagtagccgccaaagtcaccccctcactcagagccgctcagggtacatcccctccggccactctctgggcactcccgaaccagctcctcgcgcgagcctggagtccgtgccccctgggaggagctactctccatacgactaccagccctgccttgccgggccaaaccaggacttccattccaagtcccctgcatcatcctctttacctgcctttctccctaccacgcacagtccgcctgggccgcagcaaccgccagcatcactccccggtctgaccgcccagcccctgctgtctcccaaagaggcaacttccgaccctagcagaactcccgaagaagaaccattgaacttagaagggctcgtggctcatagggtggcaggcgtgcaagctcgggagaagcagcctgcagaacctcccgcgcccttaagacggcgcgcagctagcgacggccagtacgagaaccaaagccctgaggccacgagccctcgaagtcctggcgtgagatcccccgtgcagtgtgtgagtcccgagctcgctttgaccatagctctcaatccaggtggacggcccaaggagcctcacctccacagctacaaggaggccttcgaggaaatggaaggcacttcaccgtcgtcacctccccccagcggagtgagatctcctccgggcctggcaaagacaccccttagcgccttgggcctgaagccccataatccagccgacatcttactgcatcctactggcgtcacaagacgaagaatccaacctgaagaagatgagggtaaggtggtggtcagactgagcgaagagccacgaagttacgtagaaagcgtcgctaggactgctgtcgccggacccagagcccaggatagcgagcctaagtcgttcagtgctcccgctacgcaggcttatggtcacgaaattccacttaggaatggaacccttggtggctcctttgtatccccatcgcccctgtccacttcctcaccaatcttaagcgcagactcaaccagtgtgggaagtttccctagcggggaatcaagcgaccagggcccgagaactcccactcagccattactggagagtggctttcgcagcggcagccttggccaacctagcccatccgcacagaggaactatcagtccagctcccccttgccaacagtgggatcatcatattctagtcccgattattcccttcagcacttctctagcagcccggaaagtcaggcacgggcccagttctctgtggctggtgtgcacacggtgccaggctcaccccaagcgcgccaccgcaccgtcgggacaaatacaccacccagccctgggttcggctggcgagccatcaaccctagtatggccgctccctcaagcccaagcctgagtcatcaccagatgatgggtcctccagggaccggtttccatggcagtactgtttctagcccccagtctagcgctgctacaactcccgggtctccttctctgtgccggcaccctgccggcgtataccaggtgtccggactgcataataaagtggcgactaccccaggttctccgagccttggaaggcacccgggcgcacaccaagggaacctagcctctggactgcactctaacgctatcgcctcccccggcagcccttcactcggccgccatctcggcggatctgggtcggttgtccccggatcaccatgcctggaccgacacgtggcttacgggggctactcaacccccgaagatcgacggcctaccttaagtcggcaatcctctgcctcagggtaccaagccccgagcactccttcatttcccgtttctcctgcctactacccagggctgtcttccccggccactagcccttccccagacagtgccgcgtttcgtcaaggatcaccaacccctgctcttcctgaaaaacgcagaatgtcagtaggagacagggccggctccctccctaactacgccacgatcaatggaaaggtctcctcccctgtcgcatccggaatgagttcacctagtggaggctccactgtctcattcagccatacacttcccgatttttctaagtacagcatgccggacaacagcccggagacaagagccaaggtaaagttcgtccaggacactagtaagtactggtacaaacccgagattagtagagagcaggccatcgccctgttaaaggaccaggagcctggagcttttattattcgggattctcattcatttcgaggggcctatggactggccatgaaggtttcatctccacctcctacaattatgcagcagaacaaaaagggcgacatgactcatgaactcgtcagacactttctcattgagactggtccacggggggtgaaactcaaaggctgtcccaacgaaccgaactttggatcacttagcgctctggtgtaccaacattcaatcatacccctcgctttaccgtgtaaactggtgattcctaaccgagatcctacggacgaatccaaagacagctcagggcctgccaatagcaccgctgacctactaaagcagggggccgcttgcaatgtgctgtttgtgaatagtgtggacatggaaagcctaaccggacctcaagctatatcgaaggctactagtgagaccttggccgctgatcctacaccagctgccaccatagtgcacttcaaggtgtcagcgcagggtatcacgctaaccgacaaccaacgcaaactgttctttcggcgtcattaccccttgaacacggttacattttgtgatctcgatcctcaggaacgtaaatggatgaagacagaaggaggggcacccgcgaaattgttcggatttgtggcaagaaaacagggctctacaaccgacaatgcatgtcatttatttgccgagttggaccctaaccagcccgcctccgccattgttaattttgtgtcaaaagtgatgctcaatgcaggccaaaaacgttag

SEQ ID NO: 212782 - DNA, 5208 bp, Artificial Sequence
  derived and/or modified sequence
atgtctgtgtcccgaactatggaggacagctgcgagctagatttggtctatgtgacggaacgaataatcgctgtaagttttcccagtactgccaatgaagaaaacttccgttctaacctgcgcgaggtcgcacagatgttgaagtccaagcacggcggaaactacctgcttttcaacttgtccgaaagaagacctgatatcaccaagctgcatgccaaagtgctggaattcggatggcccgatcttcacacaccagcactggaaaaaatctgctccatctgtaaagctatggacacctggttaaacgccgacccccacaatgtggtagtattacacaataagggcaatagaggtcgcattggtgtagtaattgccgcatatatgcattacagtaacatttccgcatccgccgaccaggccttagacaggtttgccatgaagaggttctacgaggataaaatcgtgcctatcggtcaaccgtctcagcgtcggtatgttcattacttttcgggactcctttccggttctatcaaaatgaataataagccccttttcttacatcatgtcatcatgcacggcataccaaacttcgagtccaagggcggttgcaggccattcctgcgtatataccaggccatgcagcctgtctatacctcaggcatctataatatccctggggattcccagactagtgtgtgtatcacaattgaacccggactgttactgaagggggatatactgcttaagtgctaccacaagaaattcagatcacccgcacgtgatgtaatcttccgagtgcagttccacacctgcgccatccatgacctcggcgtcgtttttgggaaggaggatctcgatgatgcttttaaagacgataggttccctgagtatgggaaagtcgagttcgttttctcctacggacccgaaaaaatccagggcatggagcaccttgaaaatgggccaagcgtgtccgtggattacaataccagcgacccactcatcaggtgggacagctatgataatttttcaggacatagggatgatgggatggaggaggtcgtgggccacacgcagggaccacttgacggatccttatatgcaaaagtcaagaaaaaagattctcttcacgggtctactggagccgtaaatgcgacaagacccaccctctcagccaccccaaaccacgtggaacatactctttctgttagctcagactccggcaactccactgcaagtacgaagactgataaaacagacgagccagttcccggtgcgagcagcgcgacagctgctctctcacctcaggaaaaacgggagttggatagactcctgtccggtttcggcctggagcgggaaaagcagggcgcaatgtaccatacgcagcacctgcgtagtcgtcctgctggaggtagtgccgtgccctcaagcggcagacacgtggttccagctcaggtccatgtcaatgggggagcactggcttcagagagggaaaccgacattcttgacgatgagctacctaatcaagatggacactccgccggaagtatgggcacgctgtcttccctcgacggcgtgactaatactagcgagggaggctatccagaggctctgtcccctttaacaaatgggctggataagagctatcctatggagcccatggtgaacggcggaggctatccctatgaaagcgcatcgcgagccggtccagcccatgctggtcacacagctcctatgaggccttcttatagtgcccaagaaggattagccggatatcaacgggaaggccctcatcccgcatggcctcagcctgtgacaacctcacactacgctcatgacccctcaggcatgttcaggagccagtcttttagcgaggccgagccacaactgcctccggctccagtacgcggtggcagctctcgggaggccgtccaacgaggactcaatagctggcagcagcagcagcaacagcaacaacagcctcgccctccaccacgccaacaggagagggcacacctcgagagtctggtcgcatctcgcccatctccccagcctctcgccgagacccctatcccgagcctgcccgaatttccacgtgcggcatctcagcaggaaatcgagcaatccattgagactctgaatatgctgatgctcgatctggagccggctagcgcggctgctcccttgcataagagtcagagcgtgcccggtgcatggcctggcgcttcccccctatccagccagcccctgagtggctcttcaaggcagtcccatccacttacgcagagcaggtccgggtacattccatctggccatagcctcggcacgcccgagccagccccaagggccagtctggaaagcgtcccacccggaagatcttactccccctacgattaccagccttgcctggccggacccaaccaggatttccatagtaagtcgcccgcaagctcttctcttccagcctttctgcccaccacccattcaccaccagggcctcagcaacctcccgcatcccttcctggactcactgcccaaccgctactgtcacccaaagaggccacgtctgatccctctagaacacccgaggaggagccgctgaatctggagggactagttgctcatcgagttgcaggcgtgcaggcccgagagaaacagccggcagaaccgccagcccctctccgacggagggccgcatccgacggccagtacgagaatcagtcgccagaggcgacttcccccaggagcccgggagtgagatctcctgttcaatgcgtgtcacccgagttggcacttacaatcgccttgaaccctggaggcaggcctaaagaaccacacttgcactcgtataaagaagcgtttgaagagatggaggggacatccccctccagcccccctccgtccggcgtcagatcacctcctggactcgctaaaacacccctgagcgctcttggactcaaaccgcacaacccagccgacatcctgttacaccccaccggggtgactcgccgaaggatccagccagaggaagacgaggggaaagtagtggtgcggctgtctgaggagcctagatcttacgttgagagcgtggctcggaccgcagttgccggtcccagagcgcaggacagcgaacctaagagttttagtgccccagcaacccaagcctacgggcatgagatccccctgcggaacggtactttaggcggttcttttgtgtccccttcaccactttcaactagctcgcctattctgagtgctgattctacttcagtgggaagctttccctctggggagtcctcagaccaggggccacgcactcccactcaaccgctgctggagagcggcttccgcagtggcagtctcggccagccatcacctagtgcccagaggaattaccagtctagcagcccactaccaacagtgggaagctcctatagtagccctgactattccctacaacacttcagtagtagccctgaatcacaagcacgggctcagttttcagttgccggtgtgcatactgtgcccggttcccctcaggcaagacataggacagtgggtacaaatacccctcctagtccaggcttcgggtggagagctataaatccatccatggctgctcctagcagtcctagtctatcccaccaccaaatgatgggtcctcctggaactggcttccatggatctacagtgtcctctccacaaagtagcgcagctaccacacctgggtccccctccttatgcagacaccctgccggtgtttaccaagtgtctggactgcataataaggtggccactactcctggctcgccttctctggggagacaccccggagcgcatcagggcaatctcgcgagtgggctccattctaatgccattgcatcaccgggatcgcccagcctcggtcggcacctggggggatcaggaagtgtggttccaggctcaccctgcctggatcgccacgtcgcctacgggggttattcaacgcccgaggatagaaggccgaccctctcacggcagtcctccgcaagcggctatcaagccccttcaactccctcgtttccggtgagccctgcctactatcccggattgagctctccagctacctccccctctcctgatagcgccgcatttcgacagggtagcccgacgccagcccttccagagaagcggcgaatgtctgtgggcgatcgggcaggaagcctcccaaactatgccacgattaacgggaaggtcagctcacctgtcgcgagcgggatgagctccccctctgggggatctaccgtctcctttagccacacactacctgatttttctaaatactccatgccagacaatagccccgaaacccgcgctaaggtgaagtttgtccaggacacaagcaagtattggtacaaacccgagatctctcgagaacaggcaatcgccctcctgaaggatcaggagcccggagccttcatcatcagggatagccatagcttcaggggggcttatggactcgcaatgaaggtctcctctccccctcctacaatcatgcagcagaacaagaagggcgacatgactcacgaattggtgagacactttcttatcgaaaccgggcctcggggagtgaagctcaaaggatgccccaacgaaccaaacttcggatctctgagtgcactagtctaccagcattcaattatcccactggcgcttccatgcaagctggtgatccccaacagagatcccacagatgaatcgaaagatagttccggaccagctaacagcaccgccgacctgttaaaacaaggtgcagcttgtaacgtactcttcgttaacagtgttgatatggagagcctcacggggcctcaggctatttccaaagccacctccgagaccttggccgcagatccaacccctgcagccaccatcgtgcattttaaagtcagcgctcagggaatcactctaactgacaaccagagaaagctgtttttccgcagacactaccctctgaatactgtaactttctgcgacttagacccccaggagcgtaagtggatgaagaccgagggcggtgcccctgccaagctgtttggcttcgtggcacggaaacaaggatcaaccacggataatgcatgccacctgtttgccgaactcgacccaaaccagccagcatccgccatcgtcaattttgtgtccaaggtaatgctgaatgcaggccagaaaagatac

SEQ ID NO: 212783 - DNA, 10331 bp, Artificial Sequence
  derived and/or modified sequence
gttggcccgccccctgggctggcctgggagggaacccgactagcagagccctctgctcagttgctcccagcagtggccctgggaccagctctgctccttgcaccccgctccctgcctggacacaggctcactcgctgccttcttctgggggaaaccagcttcttgccagccacagctgctgcctccgccactggccaccgcccctgtcctgggagtcccttggcccagacacccacctgacttagtggctcctctgcaggaaaggtggctgccccctgcgttcctccatccaaccatgagctggtgcccatcaccactgagaatgcaccaaagaatgtagtggacaagggagaaggagcctcccggggtggaaacacacggaaaagcctcgaggacaacggctccaccagggtcaccccgagtgtccagccccacctccagcccatcagaaacatgagtgtgagccggaccatggaggacagctgtgagctggacctggtgtacgtcacagagaggatcatcgctgtctccttccccagcacagccaatgaggagaacttccggagcaacctccgtgaggtggcgcagatgctcaagtccaaacatggaggcaactacctgctgttcaacctctctgagcggagacctgacatcacgaagctccatgccaaggtactggaatttggctggcccgacctccacaccccagccctggagaagatctgcagcatctgtaaggccatggacacatggctcaatgcagaccctcacaatgtcgttgttctacacaacaagggaaaccgaggcaggataggagttgtcatcgcggcttacatgcactacagcaacatttctgccagtgcggaccaggctctggaccggtttgcaatgaagcggttctatgaggataagattgtgcccattggccagccatcccaaagaaggtacgtgcattacttcagtggcctgctctccggctccatcaaaatgaacaacaagcccttgtttctgcaccacgtgatcatgcacggcatccccaactttgagtctaaaggaggatgtcggccatttctccgcatctaccaggccatgcaacctgtgtacacatctggcatctacaacatcccaggagacagccagactagcgtctgcatcaccatcgagccaggactgctcttgaagggagacatcttgctgaagtgctaccacaagaagttccgaagcccagcccgagacgtcatcttccgtgtgcagttccacacctgtgccatccatgacctgggggttgtctttgggaaggaggaccttgatgatgctttcaaagatgatcgatttccagagtatggcaaagtggagtttgtattttcttatgggccagagaaaattcaaggcatggagcacctggagaacgggccgagcgtgtctgtggactataacacctccgaccccctcatccgctgggactcctacgacaacttcagtgggcatcgagatgacggcatggaggaggtggtgggacacacgcaggggccactagatgggagcctgtatgctaaggtgaagaagaaagactccctgcacggcagcaccggggctgttaatgccacacgtcctacactgtcggccacccccaaccacgtggaacacacgctttctgtgagcagcgactcgggcaactccacagcctccaccaagaccgacaagaccgacgagcctgtccccggggcctccagtgccactgctgccttgagtccccaggagaagcgggagctggaccgcctgctgagtggctttggcttagagcgagagaagcaaggcgccatgtaccacacccagcacctcaggtcccgcccagcagggggctcggctgtgccctcctctggacgccacgttgtcccagcccaggttcatgtcaatggtggggcgttagcatctgagcgggagacagacatcctggacgatgaattgccaaaccaggatggtcacagtgcgggcagcatgggcacactctcttctctggacggggtcaccaacaccagtgaggggggctacccagaggccctgtccccactgaccaacggtctggacaagtcctaccccatggagcctatggtcaatggaggaggctacccctacgagtctgccagccgggcggggcctgcccatgctggccacacggcccccatgcggccctcctactctgcacaggagggtttagctggctaccagagggaggggccccacccagcctggccacagccagtgaccacctcccactatgcccatgaccccagcggtatgttccgctctcaatccttttcggaagctgaaccccagctgcccccagctccggtccgagggggaagcagccgggaggctgtgcaaaggggactgaattcgtggcagcagcagcagcagcagcagcagcagcctcgcccacctccacgccagcaggaaagagcccacttggagagtcttgtagccagcaggcccagccctcagccattggcagagacccccatccccagtctccctgagttcccgcgagcagcctcccagcaggagattgaacagtccatcgaaacactcaatatgctgatgctggacctggagccagcctccgctgctgccccactacacaagtcccagagtgtccccggggcctggccaggggcttctccactctcctcccagcccctctctggatcctcccgtcagtcccatccactgacccagtccagatctggctatatccccagtgggcattcgttgggaacccctgagccagccccacgggcctctctggagtctgtccctcctggcaggtcttactcaccttatgactatcagccatgtttggctgggcctaaccaggatttccattcaaagagcccagcctcttcctccttgcctgccttccttccgaccacccacagccctccagggcctcagcaacccccagcctctctccctggcctcactgctcagcctctgctctcaccaaaggaagcgacttcagacccctcccggactccagaggaggagccattgaatttagaagggctggtggcccacagggtagcaggggtacaggctcgggagaagcagcctgcagagcccccagcccctctgcggaggcgggcggccagtgatggacagtatgagaaccagtctccagaagccacatcccctcgtagccctggggttcgctcccctgtccagtgtgtctccccggagctggctcttaccatcgctctcaatcctggagggcggcccaaagagccccatttgcacagctacaaggaggccttcgaggagatggagggaacctccccgagcagcccaccacccagtggggtgcggtcccccccgggtctggccaagacacccctgtctgctctgggcctgaaacctcacaacccagcggacatcctgttgcaccccacaggagttaccagaagacggatccagccagaggaagatgaggggaaggtggtggtcaggctgtcagaagagccccggagctatgtggagtctgtggcacggacagcggtggctggaccccgagctcaggactctgagcccaagagctttagtgctccagccacccaggcctatggccatgagatacccctgaggaacgggaccctgggtggctcctttgtctcccccagccccctctccaccagcagccccatcctcagtgctgacagcacttcagtggggagtttcccgtcgggagagagcagtgaccagggtccccggacgcccacccagcctctgttggagtctggcttccgctcaggcagcctgggacagcccagcccgtctgcccagagaaactaccagagctcttctcctctcccgactgtgggcagtagctacagcagccccgactactcacttcagcatttcagctcctctccggaaagccaggctcgagctcagttcagtgtggctggcgtccacacggtgcctgggagccctcaggcgcgccacagaacagtgggcaccaacactccccctagtcctggcttcggctggcgggccatcaatcccagcatggctgcccccagcagtcccagtttgagccatcaccagatgatgggtccaccaggcactggcttccatggtagcactgtctccagcccccagagcagtgcagcgaccaccccggggagccccagcctgtgtcggcacccagcaggggtctaccaggtttctggcctccacaacaaagtggccaccaccccggggagtcccagcctgggccggcaccctggggctcaccaaggcaacctggcctccggtcttcatagcaatgcaatagccagccctggaagccccagcctgggccgtcacctcggagggtctggatctgtggttcccggcagcccctgcttggaccggcatgtggcctatggtggctattctaccccggaggatcggagacccacactgtcccggcagagcagtgcctctggctaccaggctccttccacgccctccttccctgtctcccctgcctactaccctggcctgagcagccctgccacctccccgtcaccagactccgcagccttccggcaagggagcccaacaccagccttgccagagaagcgaaggatgtcagtgggagaccgggcaggcagcctccccaactatgccaccatcaatgggaaggtgtcttcgcctgtcgccagcggcatgtccagtcccagtgggggcagcaccgtctccttctcccacactctgcccgacttctccaagtactccatgccagacaacagcccggagacgcgggctaaagtgaagtttgtccaggacacttctaagtattggtacaagcctgagatctccagggagcaggccatcgcgctcctcaaggaccaggagccgggggccttcatcatccgcgacagtcactccttccgaggcgcgtacgggctggccatgaaggtgtcttcgccacctccaaccatcatgcagcagaataaaaaaggagacatgacccatgagctggtcaggcattttctgatagagactggccccagaggagtcaagctcaagggctgccccaatgagccaaacttcggatcgctgtctgccctggtctaccagcactccatcatcccattggccctgccttgcaagctggtcattccaaaccgagaccccacagatgaatcgaaagatagctccggccctgccaactcaactgcagacctgctgaaacaaggggcagcctgcaatgtgctcttcgtcaactctgtggacatggagtcactcactgggccacaggccatctctaaagccacatctgagacgttggctgcagaccccacgccagctgccaccatcgttcacttcaaagtctctgcccagggaatcactctgactgacaaccagagaaagctctttttcagacgccactaccctctcaacactgtcaccttctgtgacctggatccacaggaaagaaagtggatgaaaacagagggtggtgcccctgctaagctcttcggcttcgtggcccggaagcagggcagcaccacggacaacgcctgccacctctttgctgagcttgaccccaaccagccggcctctgccatcgtcaacttcgtctccaaggtcatgctgaatgccggccaaaagagatgaaccctgccccttgcccagggccagtgccatggggaaggggcttgtggggaggggacccatgaatcctgaccactcttgaacccagaaggaggactttgggccaatttcggaggagagaagaaagtgcaacgtggggagagggaagtgaattgcagaggggagggggaaaagagagagagagagagagagagagagagagagaaagatggaggagaagaacttggattcccctgggtagatggaaactgcaaaaacccaaagcctccaaaactaaccaggtccacctaacaccccctccctcccctaagaagatggatgtcctcaaaagagaaggaacaaacctccttgggaatccacattttttgggggaatggaaaagctctgtctccctaactcaactgctttgcaaggggaaatcaagctgggagaatctttttctggccacctgtggggtaggttgtcaaaccaaacagagccaccgtgggacatcaagtggaagaacttgtttgcttgaaagtatctcagacccaaggcacctcaggtctctttgctgtgcctccactatattgtcgtgtgggtgtgtgtctgcacccacatcctcacacattgatctagatctgcctttatccactcgaattataaacagctcggcttgtccttgtcccatgtgtttgtagacacacatgcatactgtccaaagattagggttggtggtggcagtgcagcaggggagggacaaacaaccaagctatgggtgacagaggctctctcctggtgcctgcacctgcactctagtgaccctgggtgccgccagacccttctcttctacaaagaccccagcaggagtgggagggtctgcaatggcatcgccctgtcctgccttggccagaagcctggagctttggtttgaggaggtagagatatgtgtatccataggaagagatctgtcagaacaggcagctgttgagctcggggtgtcttccccaaggcatgtggctcagcagcaagaaaggcaagttgctcctgctggggccctggactctgccttagctcccacctctcagccttgttattgggtttcatgcccctggaccagccttatctcagacctgcttacctgcatgatgcctttttgggggctggggattgagtcttgctgctctgcccagccctgttctattctgcagggtccctgtgttggaattctccctggggaacctactttctgctcagtgaggctccggccagaaacctggagtccttatcctcccctctgtaagtgttttagggtctggcttttgcaggcaccctctgacctcagcagagctcctgggcctgctgcctgcacaccacatcgcctacctacaatgccaaagcctcactgtcaccctttctgccttggtttccctagctgagccacgctgcccatgcagcagagggcagaaggcttgcacttgggccaaagggcctaaggtccactggacagttgggaaaacacctgaccaccatttaaggactctaagccagaatggaaaattcaccaggactccattcttaagcctatgcgagtcccctagagagaggcattgtactgatatataaatattatataatatatacatgagacatactgacagaatctgtaagctaataaaatgtaagaaaaggttaaaaaaagaataggtaaattgacaagaagtatttattgtttttccatattgctttattgccttccttggggataaaccaattcctatccttttttatatgtgtaagtaaagcctgaagtgtagggggcctttgttcttgaagcagccagggtctccttgccctggccttggccttccctagactgtgtggggctcagcattgggaggggttgcacatgtcccagcctttggcccccttacttttcagcaagccaggggcccagcagtcagctcccaggatgtgtggggagctgtccctgactctgcaggcctgagcgagtgtgtgagcatgcggggacatgggtgtgtatggcacacataggtgcgtgtgtgtcttttgtattttttctcctccaaggagctgtgtcagtgtggacgttctgtttcagggagttggaaaggagggtgtctgcagaaggtggagagcaggggcagaggccccactggccaccccctgcttcccagagtgaaaccttgtgcctggtgaccaaagtccctccaaagtgctcttccttctgggttattcaagccaaatatctgggtttccccctctcctcattccctagcaaaccccaattatcttccaagataggagatatttcccatccccttcctttgtaaatatctcatctcccactggagagcccaggagcctattcctggcatggatgttctgtccacacttgaggctgggcggtgtatcagacccttcaagcagcctggctggggcccaggactgagtctggggtcagctttcacggtcgcttttcccttcctcaccacccaccacagcccaccttgcatgcatggccagcccctccactccagcctgagccatgtgtgcccctgcgggaggacccattcatgccagaaagctggtaactccctcccagcatccctgcggaaggagtcagtttctgagagtgtgacttttcaaggcgaatgatggggaagggttccccagtccccacagtggccccacctctgggccctgcaccagagcccttctgtgtcacggcgggctgtgcacccatgcacacacctacgcacacacaacactccgcactgcagtatattcttgccaaagatttcctttaaaagcaagcacttttactaattattattttgtaaatgtttatcttcttctgtcttctccctccctgaatctattttactgttgtttattgttgaatctgtgtgtcagccaggagagcgctgtctggccttgaacatgggctgggatgggaaagggtctgggagaagatgggcaacaaagagccagggagtcatggacatcgcagcgacgcagaccccagcaggttcagtcccgtgctgccaccagctgtccagctgggtgtctggagggaagagggcagaggagggtcatgtcccttcagctgggggaggggcccagtgagctccacgtggctttttcccaaagggagcaagagggaaggattgggcgagaaaacaatggagaggggacctgcgaaggaaaacagggaggaagtgagcggtttgatcagcctgctatcacggtgttctggctctcttatttagccaggcgcttaagggacagatacatcacatcctaagtttgggaaaggcctttgacccatgtcatctgagcgtctcctccagtagctctgaaagctgtggacaccaatggccaggattccttctcccctggtttttgaggatccctgggtcttctgagactggccaggagagggatggtggggccagtggttgtgtgaaagcaggaggggcagccctcctggacaagtgtgatccccctataaacggctctcaggaggttagtgagtaggagattctgccttgttctgatgagcctgtgcaggggctccaggggagcatgctgtccagggggcacagaagggtggtgagtgtgatcaaatctagtctcactcccactttttagtctcactcctacttttgtccaccacccctgcctcctggatcttctcccactttttttttcagctttaggacctggggagatcctgtgagtcaaggcagacacccaatcctgcccccacactcggggtcctccaagaggttggggggcagagtcccagagcagccctttaccccaggtccaggccctggaatcctgagactcgcgtttccttggccagtggtaacacaggacgtgtgtgcgcatgtgcaagtgtggatgtatgtgtgtgcgtgtgttttgctcatttctttagggaacttgggagtcggggttggaggtgctgggcaatggaacttcaaattcaatgtcgcccagcagtgaggggagtcgggaggtgaggcctgtaggccaaccaattggtggagtctcagcgatagcccaggtgagaagtggttcacccagaggggcagggtgggggcctcgggcagatctgtccctcttggcacctctgtcctcaaatgtccaaaatgttggaggacctctgttcatatcccacgcctgggctcttgccagcagtggagttactgtagagggatgtcccaagcttgttttccaatcagtgttaagctgtttgaaactctcctgtgtctgtgttttgtttgtgcgtgtgtgtgagagcacatcagtgtgtgcaggctgtgtttccccatttctctcctcccttcagacccatcattgagaacaaatgtaagaaatcccttcccaccaccctccctgcctcccaggccctctgcgggggaaacaagatcacccagcatccttccccaccccagctgtgtatttatatagatggaaatatactttatattttgtatcatcgtgcctatagccgctgccaccgtgtataaatcctggtgtatgctccttatcctggacatgaatgtattgtacactgacgcgtccccactcctgtacagctgctttgtttctttgcaatgcattgtatggctttataaatgataaagttaaagaaaactctg

SEQ ID NO: 212784 - protein, 870 aa, Artificial Sequence
  derived and/or modified sequence
MKGWYHGKLDRTIAEERLRQAGKSGSYLIRESDRRPGSFVLSFLSQMNVVNHFRIIAMCGDYYIGGRRFSSLSDLIGYYSHVSCLLKGEKLLYPVAPPEPVEDRRRVRAILPYTKVPDTDEISFLKGDMFIVHNELEDGWMWVTNLRTDEQGLIVEDLVEEVGREEDPHEGKIWFHGKISKQEAYNLLMTVGQVCSFLVRPSDNTPGDYSLYFRTNENIQRFKICPTPNNQFMMGGRYYNSIGDIIDHYRKEQIVEGYYLKEPVPMQDQEQVLNDTVDGKEIYNTIRRKTKDAFYKNIVKKGYLLKKGKGKRWKNLYFILEGSDAQLIYFESEKRATKPKGLIDLSVCSVYVVHDSLFGRPNCFQIVVQHFSEEHYIFYFAGETPEQAEDWMKGLQAFCNLRKSSPGTSNKRLRQVSSLVLHIEEAHKLPVKHFTNPYCNIYLNSVQVAKTHAREGQNPVWSEEFVFDDLPPDINRFEITLSNKTKKSKDPDILFMRCQLSRLQKGHATDEWFLLSSHIPLKGIEPGSLRVRARYSMEKIMPEEEYSEFKELILQKELHVVYALSHVCGQDRTLLASILLRIFLHEKLESLLLCTLNDREISMEDEATTLFRATTLASTLMEQYMKATATQFVHHALKDSILKIMESKQSCELSPSKLEKNEDVNTNLTHLLNILSELVEKIFMASEILPPTLRYIYGCLQKSVQHKWPTNTTMRTRVVSGFVFLRLICPAILNPRMFNIISDSPSPIAARTLILVAKSVQNLANLVEFGAKEPYMEGVNPFIKSNKHRMIMFLDELGNVPELPDTTEHSRTDLSRDLAALHEICVAHSDELRTLSNERGAQQHVLKKLLAITELLQQKQNQYTKTNDVR

SEQ ID NO: 212785 - DNA, 2613 bp, Artificial Sequence
  derived and/or modified sequence
atgaagggctggtaccacggcaagctggacagaaccatcgccgaggagagactgagacaggccggcaagagcggcagctacctgatcagagagagcgacagaagacccggcagcttcgtgctgagcttcctgagccagatgaacgtggtgaaccacttcagaatcatcgccatgtgcggcgactactacatcggcggcagaagattcagcagcctgagcgacctgatcggctactacagccacgtgagctgcctgctgaagggcgagaagctgctgtaccccgtggccccccccgagcccgtggaggacagaagaagagtgagagccatcctgccctacaccaaggtgcccgacaccgacgagatcagcttcctgaagggcgacatgttcatcgtgcacaacgagctggaggacggctggatgtgggtgaccaacctgagaaccgacgagcagggcctgatcgtggaggacctggtggaggaggtgggcagagaggaggacccccacgagggcaagatctggttccacggcaagatcagcaagcaggaggcctacaacctgctgatgaccgtgggccaggtgtgcagcttcctggtgagacccagcgacaacacccccggcgactacagcctgtacttcagaaccaacgagaacatccagagattcaagatctgccccacccccaacaaccagttcatgatgggcggcagatactacaacagcatcggcgacatcatcgaccactacagaaaggagcagatcgtggagggctactacctgaaggagcccgtgcccatgcaggaccaggagcaggtgctgaacgacaccgtggacggcaaggagatctacaacaccatcagaagaaagaccaaggacgccttctacaagaacatcgtgaagaagggctacctgctgaagaagggcaagggcaagagatggaagaacctgtacttcatcctggagggcagcgacgcccagctgatctacttcgagagcgagaagagagccaccaagcccaagggcctgatcgacctgagcgtgtgcagcgtgtacgtggtgcacgacagcctgttcggcagacccaactgcttccagatcgtggtgcagcacttcagcgaggagcactacatcttctacttcgccggcgagacccccgagcaggccgaggactggatgaagggcctgcaggccttctgcaacctgagaaagagcagccccggcaccagcaacaagagactgagacaggtgagcagcctggtgctgcacatcgaggaggcccacaagctgcccgtgaagcacttcaccaacccctactgcaacatctacctgaacagcgtgcaggtggccaagacccacgccagagagggccagaaccccgtgtggagcgaggagttcgtgttcgacgacctgccccccgacatcaacagattcgagatcaccctgagcaacaagaccaagaagagcaaggaccccgacatcctgttcatgagatgccagctgagcagactgcagaagggccacgccaccgacgagtggttcctgctgagcagccacatccccctgaagggcatcgagcccggcagcctgagagtgagagccagatacagcatggagaagatcatgcccgaggaggagtacagcgagttcaaggagctgatcctgcagaaggagctgcacgtggtgtacgccctgagccacgtgtgcggccaggacagaaccctgctggccagcatcctgctgagaatcttcctgcacgagaagctggagagcctgctgctgtgcaccctgaacgacagagagatcagcatggaggacgaggccaccaccctgttcagagccaccaccctggccagcaccctgatggagcagtacatgaaggccaccgccacccagttcgtgcaccacgccctgaaggacagcatcctgaagatcatggagagcaagcagagctgcgagctgagccccagcaagctggagaagaacgaggacgtgaacaccaacctgacccacctgctgaacatcctgagcgagctggtggagaagatcttcatggccagcgagatcctgccccccaccctgagatacatctacggctgcctgcagaagagcgtgcagcacaagtggcccaccaacaccaccatgagaaccagagtggtgagcggcttcgtgttcctgagactgatctgccccgccatcctgaaccccagaatgttcaacatcatcagcgacagccccagccccatcgccgccagaaccctgatcctggtggccaagagcgtgcagaacctggccaacctggtggagttcggcgccaaggagccctacatggagggcgtgaaccccttcatcaagagcaacaagcacagaatgatcatgttcctggacgagctgggcaacgtgcccgagctgcccgacaccaccgagcacagcagaaccgacctgagcagagacctggccgccctgcacgagatctgcgtggcccacagcgacgagctgagaaccctgagcaacgagagaggcgcccagcagcacgtgctgaagaagctgctggccatcaccgagctgctgcagcagaagcagaaccagtacaccaagaccaacgacgtgagatag

SEQ ID NO: 212786 - DNA, 2613 bp, Artificial Sequence
  derived and/or modified sequence
atgaagggatggtaccatggaaagctcgacagaaccatcgccgaagagcgactacgccaggcaggcaagagcggaagctaccttatccgagaatctgatcgacggcccgggagctttgtgctttccttcctaagccagatgaacgtggtgaaccattttaggatcatcgcaatgtgtggagactattacatcggaggcaggcggttctcttcactcagtgatcttataggatattatagccatgtttcctgtttgctgaagggagagaagctactgtatccagtggcaccccctgagccagtggaagacaggcggagagtgcgggccattctaccttacacgaaggtccccgacaccgatgagatctctttcctcaagggcgacatgtttattgtgcacaacgagctcgaagatggctggatgtgggtcaccaatctgaggaccgacgaacagggcctgatcgtcgaagatctggtagaggaggtaggtcgagaggaagatccccacgagggtaagatctggtttcacggaaagattagcaaacaggaagcctacaaccttttaatgacggtggggcaggtgtgcagctttttggtgagaccatcggataacactcccggcgattattctctgtacttccggacaaacgagaacatccaaagatttaaaatatgtccaactcccaataaccagttcatgatgggggggaggtactataacagtatcggcgatattatcgatcattatagaaaggagcaaatcgtggaaggatattacctgaaagaacctgtccccatgcaagatcaggagcaggtgctgaacgacactgtggacggaaaagagatttataacaccatcaggcgaaagactaaggatgccttctataaaaacatagtgaaaaaaggttatctcctcaagaaaggtaaagggaagaggtggaaaaatctgtactttatattagaaggctctgacgcccagctaatctacttcgagtccgaaaagcgggctaccaagccaaaaggccttattgacctctccgtgtgtagtgtatatgtggttcatgacagtctctttggccgccccaattgtttccagatcgtggtgcagcatttttcagaagagcactacattttttactttgcaggcgagacaccagagcaggcggaagattggatgaaaggcctccaggcattctgtaacctgcggaagagcagtccaggaacctctaacaagcgactgaggcaagtgagctcactggtattgcacattgaagaggcccataaactaccggtcaaacattttacaaatccatactgtaacatttatctgaattcagtccaagtagccaaaacccacgcccgagaaggacagaatcccgtctggtccgaagaatttgtctttgatgatctgcctccagacatcaataggtttgagatcacgctttctaacaagacaaagaagagcaaggaccctgacatattattcatgcgctgtcagttgtctcgcctccagaaggggcatgcaaccgacgaatggttcttactgtcgtctcacatccccctgaaaggaattgagcccgggagcctacgtgttcgggcccgatactccatggagaagattatgccagaagaagagtacagcgaattcaaagaactgatactgcagaaggagttacacgtagtgtacgcattatcccacgtttgtggtcaagacaggactttgctggccagcatcttactcagaatattcttgcatgaaaagctcgagtctcttcttttatgtacccttaacgatcgggaaatcagcatggaagacgaagcaacgaccctttttcgcgcaacaacacttgccagtactttgatggagcagtatatgaaagctaccgctacacaatttgtccaccacgcattgaaagactcgattctcaagataatggaaagcaagcaatcgtgtgagctgtctccttccaagctggagaagaatgaggatgtgaataccaacctgactcacctgctcaacatcctgagcgagctggtggagaagatcttcatggctagcgaaatattgccacccaccctgcgctacatctacgggtgtcttcagaagtctgtgcaacataagtggcccaccaacactaccatgagaactagggtggtgtctggctttgtttttttgcggctgatctgccccgccatcctgaacccgagaatgttcaatattatatcagatagcccttcacccattgctgcccggacccttatcttggtggcgaaatcagtgcaaaacttggctaatcttgttgaattcggtgccaaagagccttatatggagggggtgaacccgtttatcaagtcaaacaaacatcggatgattatgtttcttgacgagctgggtaacgtccccgaacttcctgacactaccgagcactccaggaccgatctgtctagagatttggctgctttacacgagatctgcgtggcccattctgatgagctgcggacactgagcaatgagcgcggcgcccagcagcacgtgcttaagaagctgcttgctataacagagctcttgcagcagaaacaaaatcagtacacaaagacaaatgatgtcagatag

SEQ ID NO: 212787 - DNA, 2613 bp, Artificial Sequence
  derived and/or modified sequence
atgaagggctggtaccacggcaagctggacaggaccatcgccgaggagcggctgcggcaggccggcaagagcggcagctacctgatccgggagagtgaccggcggcccggcagctttgtgctgtccttcctgagccagatgaatgtggtgaaccacttccgcatcatcgccatgtgtggggactactacatcggcggccgccgcttcagcagcctgagtgacctgattggctactacagccacgtgtcctgcctgctgaagggggagaagctgctgtaccctgtggcccctcctgagcctgtggaggacagaagaagagtgcgggccatcctgccctacaccaaggtgcctgacacagatgagatctccttcctgaagggggacatgtttattgtgcacaatgagctggaggatggctggatgtgggtgaccaacctgaggacagatgagcagggcctcatcgtggaggacctggtggaggaggtgggccgggaggaggacccccatgagggcaagatctggttccacggcaagatcagcaagcaggaggcctacaacctgctgatgacagtgggccaggtgtgcagcttcctggtgcggcccagcgacaacacccctggggactacagcctgtacttccgcaccaatgaaaacatccagcgcttcaagatctgccccacccccaacaaccagttcatgatgggcggccgctactacaacagcatcggggacatcatcgaccactacaggaaggagcagatcgtggagggctactacctgaaggagcctgtgcccatgcaggaccaggagcaggtgctgaatgacacagtggatggcaaggagatctacaacaccatccggaggaagaccaaggatgccttctacaagaacatcgtgaagaagggctacctgctgaagaagggcaagggcaagcgctggaagaacctgtacttcatcctggagggcagtgatgcccagctgatctactttgagagcgagaagagggccaccaagcccaagggcctgattgacctgtctgtgtgcagcgtgtatgtggtgcatgacagcctgtttggccggcccaactgcttccagatcgtggtgcagcacttcagcgaggagcactacatcttctactttgctggggagaccccagagcaggccgaggactggatgaagggcctgcaggccttctgcaacctgaggaagagcagccctggcaccagcaacaagaggctgcggcaggtgagcagcctggtgctgcacatcgaggaggcccacaagctgcctgtgaagcacttcaccaacccctactgcaacatctacctgaacagcgtgcaggtggccaagacccacgcccgggagggccagaaccctgtgtggagcgaggagtttgtgtttgatgacctgcccccagacatcaacagatttgagatcaccctgagcaacaagaccaagaagagcaaggaccctgacatcctcttcatgcgctgccagctgagccggctgcagaagggccacgccacagatgagtggttcctgctgagcagccacatccccctgaagggcatcgagcccggcagcctgcgggtgcgggcccgctacagcatggagaagatcatgcctgaggaggagtacagcgagttcaaggagctgatcctgcagaaggagctgcacgtggtgtatgccctgagccacgtgtgtggccaggacaggaccctgctggccagcatcctgctgcgcatcttcctgcacgagaagctggagagcctgctgctgtgcaccctgaatgaccgggagatctccatggaggatgaggccaccaccctcttccgggccaccaccctggccagcaccctgatggagcagtacatgaaggccacagccacccagtttgtgcaccacgccctgaaggacagcatcctgaagatcatggagagcaagcagagctgtgagctgagccccagcaagctggagaagaatgaagatgtgaacaccaacctgacccacctgctgaacatcctgtctgagctggtggagaagatcttcatggccagcgagatcctgccccccaccctgcgctacatctacggctgcctgcagaagtctgtgcagcacaagtggcccaccaacaccaccatgaggaccagggtggtgtctggctttgtgttcctgcggctcatctgcccagccatcctgaaccccaggatgttcaacatcatcagtgacagccccagccccatcgccgcccggaccctcatcctggtggccaagtctgtgcagaacctggccaacctggtggagtttggagccaaggagccctacatggagggcgtgaaccccttcatcaagagcaacaagcacaggatgatcatgttcctggatgagctgggcaatgtgcctgagctgcctgacaccacagagcacagcaggacagacctgagccgggacctggccgccctgcacgagatctgtgtggcccacagtgatgagctgcggaccctgagcaatgaaagaggagcccagcagcacgtgctgaagaagctgctggccatcacagagctgctgcagcagaagcagaaccagtacaccaagaccaatgatgtgaggtag

SEQ ID NO: 212788 - DNA, 2613 bp, Artificial Sequence
  derived and/or modified sequence
atgaagggctggtaccacggcaagctggaccggaccatcgccgaggagcgcctccgacaagccggcaaaagcggaagctacctgatacgcgagtccgatcgacgcccaggtagttttgttttgtccttcctcagccagatgaacgttgtgaaccattttcgcataattgcaatgtgcggcgattactacatagggggacggcggttctcctccttgtctgacctcataggctattatagccacgtctcctgtttgctaaagggcgaaaaattattgtaccctgtagcaccgcctgaacccgttgaagacaggaggagggtgagggcaatcctgccttacaccaaagtccccgatactgatgaaatttctttcctgaaaggggacatgtttatagtgcataatgagctggaagacggttggatgtgggtgaccaacttgcgcaccgacgagcaaggactgatcgtagaggatctggtcgaggaagtcgggagggaggaggacccgcatgaggggaaaatctggtttcacgggaagatctcgaagcaggaagcgtacaatctgctgatgaccgtcggacaggtttgtagcttcttagtgaggccttcagacaacacccccggggactatagtctgtacttccggacaaatgaaaatatacagcgatttaaaatatgccccacacccaataaccagttcatgatgggcggccgctactataacagcattggtgacatcattgaccactaccgaaaggagcagatcgttgagggctattacctcaaggagcccgtccctatgcaggaccaagaacaggtgttaaatgacaccgtggatggaaaggagatatataataccatccgacggaaaactaaggatgcattctataagaatatcgttaagaaagggtatcttctgaaaaagggcaaaggcaaaagatggaagaacttgtacttcattctcgaaggtagcgacgcccagctgatatattttgaatctgaaaaaagggctaccaagccaaaggggctgatcgatctgagcgtttgctctgtctacgtggttcatgactccttgtttggaagacccaactgttttcaaattgtcgtgcagcattttagtgaggagcactatatcttctatttcgccggggagacccctgagcaggctgaagactggatgaaaggcctccaggctttctgcaacctacggaagtcatcccccgggacctctaataagagactgcgacaagtgtcctctctggttctgcatatagaggaggctcacaaattacccgtgaagcacttcaccaatccttattgtaacatttatcttaatagtgtgcaggtcgccaaaacccacgcccgggaggggcagaacccagtgtggtctgaggagtttgtgttcgacgatctacctccagatattaacagattcgagatcaccctttctaacaagaccaagaagtcaaaagatcccgatattcttttcatgagatgtcagctcagtagactccagaagggccatgcaaccgatgaatggtttctactaagcagtcacatcccgctgaaaggcattgaacctgggtcactgcgtgtgagggccaggtattccatggaaaagataatgccagaagaagagtactcagaatttaaagagctgatcttacagaaggagctgcacgtcgtgtatgcactgtctcacgtgtgcggccaggataggacactgctggcaagtattcttcttcggatttttttacacgagaaactggaatccctcctgctctgtaccctgaacgaccgggagatttcaatggaagatgaggctacaaccctgttcagggccacaaccctcgctagcacactgatggagcagtacatgaaggcaactgcaacacagtttgtgcatcacgctctcaaagacagcatactaaagattatggaatccaaacaaagttgcgagctgtcgccaagtaaattggagaagaacgaggacgtgaacaccaatctaacacacctgctcaatatcctctccgagctcgtggaaaaaattttcatggccagcgagatcctgcctcccacccttcggtacatctatggctgtctgcagaagtccgtccagcacaaatggccaaccaacacaactatgagaacgcgcgtggtctctggatttgtgttcttacgacttatatgtcccgctattcttaaccccagaatgtttaatatcatatctgattcacccagtccaattgccgcccgcactctaattttggttgcaaaaagtgttcagaatttagccaatctcgtggagttcggcgctaaggagccgtatatggaaggagtgaatccctttattaagagcaataaacatcgcatgataatgtttctcgatgagttgggcaatgtgccagagcttccggatactactgagcactctaggaccgacttgagcagggacttagccgccctgcatgagatttgtgtggcgcactctgatgaactaagaaccctgtccaacgagcggggggcacagcagcatgttctcaaaaaacttctcgccatcaccgagctgctgcaacaaaagcagaaccagtacactaaaaccaacgatgtgaggtag

SEQ ID NO: 212789 - DNA, 2613 bp, Artificial Sequence
  derived and/or modified sequence
atgaaagggtggtatcacgggaagttggacagaacaattgcggaggaaagattgagacaagcgggtaaaagcggttcatatctaataagggagtccgacaggcgtcccggatcatttgtgctgagcttcctcagccagatgaacgttgtcaaccactttaggattatcgccatgtgcggggattactatatagggggtcggcgattcagctccctttccgatctgattggatactactcgcacgtttcttgcttgcttaaaggcgagaagctgctatatccagtggctcccccagagcctgtcgaggaccgacgacgtgtccgggctatactcccatatacgaaagtccctgacactgacgaaatctccttcctgaagggtgacatgtttatagtgcacaacgagttggaagatggctggatgtgggtgaccaacctcagaacggacgagcagggactcatcgtcgaagacctggtggaggaagtgggacgcgaggaggatccacacgagggcaagatttggttccacggaaagatcagcaagcaggaggcttacaatctgcttatgactgtgggccaggtctgttcgttcctggttcgcccttcagataatactccaggggactattccctgtacttccggacaaacgaaaatatccagcgatttaagatatgcccaacacccaacaatcagttcatgatgggtggacgctactacaatagcatcggcgacataatcgaccactataggaaggagcaaattgttgaagggtactatcttaaggagcccgtgcctatgcaggaccaggagcaggtgctaaacgatactgtggacggcaaggaaatctacaatactattcgtaggaagaccaaagacgccttctataaaaatattgtgaagaagggctacctgctcaagaaaggtaagggcaagagatggaaaaacctgtacttcatactcgagggttctgacgcccagctaatctacttcgagagcgagaagcgcgctacaaaaccaaagggcctgattgatctgtctgtgtgtagtgtttatgtggtgcacgacagcctgtttggacgcccaaattgctttcagattgtggtgcaacacttttctgaggagcactacatcttttactttgctggtgagactcctgaacaggccgaggactggatgaaaggcctccaggccttctgtaatctgagaaaatcttcccccggtaccagtaataagcggcttcgccaggtcagctccctggtgctccatatcgaagaagcccacaaattgccagtgaagcacttcaccaacccttattgtaacatatacttgaattcagtgcaggttgccaagacacacgccagggaaggccagaaccccgtctggagcgaggaattcgtctttgacgatctgcccccagacataaatcgtttcgagattacactgagcaataagaccaaaaagtcaaaggaccccgacattttgttcatgaggtgtcagctgtctcggctgcaaaagggccatgcgaccgacgagtggtttctactctcatcccacattcctctgaaagggattgaaccaggttcattgcgggtgagggccaggtactcaatggagaaaattatgcctgaggaagagtattctgaatttaaagagctcatcctacagaaagaactgcacgtcgtttacgctttaagtcacgtgtgtggccaggatcgcacactgctcgctagcattctgttacgtatctttctccacgagaaacttgagtccctgcttctttgcaccttgaacgacagagaaatctcaatggaagatgaggcaaccacgctgtttagggccacaactctggcaagcactctgatggagcagtacatgaaggctactgccacccagttcgtgcatcacgcattgaaggattctatcctcaagatcatggagtctaaacagtcgtgcgagttaagcccgagcaagttagagaaaaacgaggatgtgaataccaatctaacccatctcctcaatattctgagtgagttggtggagaaaatcttcatggccagtgaaattctaccgcctactttaaggtatatttacggctgccttcagaagtccgtgcagcacaaatggccaacaaacacaacaatgcggactagagtggtttcaggattcgtgtttctgcgacttatttgccctgcaatactgaatcccaggatgttcaatatcatcagcgactcaccatcccccattgctgctcggactttgattttggtagccaagtcagtacaaaatctggcaaatcttgttgagttcggcgcaaaggaaccatatatggagggagtcaatcccttcattaagagtaataagcataggatgatcatgtttcttgacgaactgggtaatgtgccagagcttccagacaccaccgaacatagccgcactgacctgtcacgggatcttgctgccctccatgaaatctgcgttgcccattccgacgagcttcggacactgtctaatgagcggggagcacagcagcacgtcctgaagaagctattggcaatcaccgagcttctccaacagaaacaaaaccagtacacgaaaaccaacgacgtaagatag

SEQ ID NO: 212790 - DNA, 3776 bp, Artificial Sequence
  derived and/or modified sequence
gaccagaatacgaggaggaagaggtggccataccgttgaccgctcctccaactaaccagtaagttaagactgctgttcaggaatttgggaagctggctccagaaaagaagtggaaatgaaggggtggtatcacggaaaacttgacagaacgatagcagaagaacgcctcaggcaggcagggaagtctggcagttatcttataagagagagtgatcggaggccagggtcctttgtactttcatttcttagccagatgaatgttgtcaaccattttaggattattgctatgtgtggagattactacattggtggaagacgtttttcttcactgtcagacctaataggttattacagtcatgtttcttgtttgcttaaaggagaaaaattactttacccagttgcaccaccagagccagtagaagatagaaggcgtgtacgagctattctaccttacacaaaagtaccagacactgatgaaataagtttcttaaaaggagatatgttcattgttcataatgaattagaagatggatggatgtgggttacaaatttaagaacagatgaacaaggccttattgttgaagacctagtagaagaggtgggccgggaagaagatccacatgaaggaaaaatatggttccatgggaagatttccaaacaggaagcttataatttactaatgacagttggtcaagtctgcagttttcttgtgaggccctcagataatactcctggcgattattcactttatttccggaccaatgaaaatattcagcgatttaaaatatgtccaacgccaaacaatcagtttatgatgggaggccggtattataacagcattggggacatcatagatcactatcgaaaagaacagattgttgaaggatattatcttaaggaacctgtaccaatgcaggatcaagaacaagtactcaatgacacagtggatggcaaggaaatctataataccatccgtcgtaaaacaaaggatgccttttataaaaacattgttaagaaaggttatcttctgaaaaagggcaaaggaaaacgttggaaaaatttatattttatcttagagggtagtgatgcccaacttatttattttgaaagcgaaaaacgagctaccaaaccaaaaggattaatagatctcagtgtatgttctgtctatgtcgttcatgatagtctctttggcaggccaaactgttttcagatagtagttcagcactttagtgaagaacattacatcttttactttgcaggagaaactccagaacaagcagaggattggatgaaaggtctgcaggcattttgcaatttacggaaaagtagtccagggacatccaataaacgccttcgtcaggtcagcagccttgttttacatattgaagaagcccataaactcccagtaaaacattttactaatccatattgtaacatctacctgaatagtgtccaagtagcaaaaactcatgcaagggaagggcaaaacccagtatggtcagaagagtttgtctttgatgatcttcctcctgacatcaatagatttgaaataactcttagtaataaaacaaagaaaagcaaagatcctgatatcttatttatgcgctgccagttgagccgattacagaaagggcatgccacagatgaatggtttctgctcagctcccatataccattaaaaggtattgaaccagggtccctgcgtgttcgagcacgatactctatggaaaaaatcatgccagaagaagagtacagtgaatttaaagagcttatactgcaaaaggaacttcatgtagtctatgctttatcacatgtatgtggacaagaccgaacactactggccagcatcctactgaggatttttcttcacgaaaagcttgaatcgttgttgttatgcacactaaatgacagagaaataagcatggaagatgaagccactaccctatttcgagccacaacacttgcaagcaccttgatggagcagtatatgaaagccactgctacacagtttgttcatcatgctttgaaagactctattttaaagataatggaaagcaagcagtcttgtgagttaagtccatcaaagttagaaaaaaatgaagatgtgaacactaatttaacacacctattgaacatactttcagagcttgtggagaaaatattcatggcttcagaaatacttccaccgacattgagatatatttatgggtgtttacagaaatctgttcagcataagtggcctacaaataccaccatgagaacaagagttgttagtggttttgtttttcttcgactcatctgtcctgccatcctgaatccacggatgttcaatatcatctcagattctccatctcctattgctgcaagaacactgatattagtggctaaatctgtgcagaacttagcaaatcttgtggaatttggagctaaggagccctacatggaaggtgtcaatccattcatcaaaagcaacaaacatcgtatgatcatgtttttagatgaacttgggaatgtacctgaacttccggacactacagagcattctagaacggacctgtcccgtgatttagcagcattgcatgagatttgcgtggctcattcagatgaacttcgaacgctcagtaatgagcgtggtgcacagcagcacgtattgaaaaagcttctggctataacagaactgcttcaacaaaaacaaaaccagtatacaaaaaccaatgatgtcaggtagcagccttcgccccagtgttctgcatggattcagcatgtccaacatggtaattcacttcagtttaatgtctcctttgctcttgccaaaaaatagcacacttttccacattccagtgatgtgtgagctatgcaaacaaaatccaagattctgctggtgaataactatgccagcaaccttgtaagctatctgtgcaggatatttgcactatttccacatggaatcaatctttaacaacctctgagccttggtgtacagaccacctttcacaaaacgaaatgctatgactgtatcttgatatctcgaactttcaaaatatattttcagtacacccagttgccaaagttttgctgtctcttagagaaagaactatgaaatcaactgacaagaaacacattcttattgacaattgtgtataactggattgcagactgttcttactgtaactacttcctgattaggaatatgaccatttgactgttcaatgattatttgtatttacagtttccagagtttgtcattataataggaacaatctttgctgtatacttttaaaaaatactctgctatttctcttgctggaactgttgaaagaaaatatatagaatgatctattgctcatcagctttattttttaaacatacgacttattttgttgaaattgtcaaagactgtatttagatctcataatgctttgttaaatgtttacaagtaaatagtttgaattcagtaaatattattggttgttgtattgatcaatgcatgttacccattcaaccattttatagactaccaatttcttttatgttaactagaatgcttttgttaaaagttatttgttcattatttgtgctacccctttgattatgcagacaacctcatcagctgcctaacttatccatctttgaacttctgactacttgttgtatctgctggatatttagttcaactgtatagttttatttacttctgtatgtgtatttttgtgaagtattcacaaaggttaagttaaaataaaaccaagggatatcttgcataattgattacttct

SEQ ID NO: 212791 - protein, 235 aa, Artificial Sequence
  derived and/or modified sequence
MIDTLRPVPFASEMAISKTVAWLNEQLELGNERLLLMDCRPQELYESSHIESAINVAIPGIMLRRLQKGNLPVRALFTRGEDRDRFTRRCGTDTVVLYDESSSDWNENTGGESVLGLLLKKLKDEGCRAFYLEDEARGKNCGVLVHCLAGISRSVTVTVAYLMQKLNLSMNDAYDIVKMKKSNISPNFNFMGQLLDFERTLGLSSPCDNRVPAQQLYFTTPSNQNVYQVDSLQST

SEQ ID NO: 212792 - protein, 117 aa, Artificial Sequence
  derived and/or modified sequence
MIDTLRPVPFASEMAISKTVAWLNEQLELGNERLLLMDCRPQELYESSHIESAINVAIPGIMLRRLQKGNLPVRALFTRGEDRDRFTRRCGTDTVVLYDESSSDWNENTGGESVLGL

SEQ ID NO: 212793 - DNA, 708 bp, Artificial Sequence
  derived and/or modified sequence
atgatcgacaccctgagacccgtgcccttcgccagcgagatggccatcagcaagaccgtggcctggctgaacgagcagctggagctgggcaacgagagactgctgctgatggactgcagaccccaggagctgtacgagagcagccacatcgagagcgccatcaacgtggccatccccggcatcatgctgagaagactgcagaagggcaacctgcccgtgagagccctgttcaccagaggcgaggacagagacagattcaccagaagatgcggcaccgacaccgtggtgctgtacgacgagagcagcagcgactggaacgagaacaccggcggcgagagcgtgctgggcctgctgctgaagaagctgaaggacgagggctgcagagccttctacctggaggacgaggccagaggcaagaactgcggcgtgctggtgcactgcctggccggcatcagcagaagcgtgaccgtgaccgtggcctacctgatgcagaagctgaacctgagcatgaacgacgcctacgacatcgtgaagatgaagaagagcaacatcagccccaacttcaacttcatgggccagctgctggacttcgagagaaccctgggcctgagcagcccctgcgacaacagagtgcccgcccagcagctgtacttcaccacccccagcaaccagaacgtgtaccaggtggacagcctgcagagcacctag

SEQ ID NO: 212794 - DNA, 354 bp, Artificial Sequence
  derived and/or modified sequence
atgatcgacaccctgagacccgtgcccttcgccagcgagatggccatcagcaagaccgtggcctggctgaacgagcagctggagctgggcaacgagagactgctgctgatggactgcagaccccaggagctgtacgagagcagccacatcgagagcgccatcaacgtggccatccccggcatcatgctgagaagactgcagaagggcaacctgcccgtgagagccctgttcaccagaggcgaggacagagacagattcaccagaagatgcggcaccgacaccgtggtgctgtacgacgagagcagcagcgactggaacgagaacaccggcggcgagagcgtgctgggcctgtag

SEQ ID NO: 212795 - DNA, 1959 bp, Artificial Sequence
  derived and/or modified sequence
gtagatttgaggtgcagccttggagggagggattagaagccgctagactttttttcctcccctctcagtagcacggagtccgaattaattggatttcattcactggggaggaacaaaaactatctgggcagcttcattgagagagattcattgacactaagagccagcggctgcagctgggtgcagagagaacctccggctttacttctgtctcgtctgccccaaccgctagcctcggcttgggtaaggcgaggcggaattaaaccccgctccgagagcggcagcttcgcgcgcggtgcgctcggcctatgcctgccccgaggggcgtctggtaggcaccccgccctctcccgcagctcgacccccatgatagatacgctcagacccgtgcccttcgcgtcggaaatggcgatcagcaagacggtggcgtggctcaacgagcagctggagctgggcaacgagcggctgctgctgatggactgccggccgcaggagctatacgagtcgtcgcacatcgagtcggccatcaacgtggccatcccgggcatcatgctgcggcgcctgcagaagggtaacctgccggtgcgcgcgctcttcacgcgcggcgaggaccgggaccgcttcacccggcgctgtggcaccgacacagtggtgctctacgacgagagcagcagcgactggaacgagaatacgggcggcgagtcggtgctcgggctgctgctcaagaagctcaaggacgagggctgccgggcgttctacctggaagatgaagcccggggcaagaactgtggtgtcttggtacattgcttggctggcattagccgctcagtcactgtgactgtggcttaccttatgcagaagctcaatctgtcgatgaacgacgcctatgacattgtcaaaatgaaaaaatccaacatatcccctaacttcaacttcatgggtcagctgctggacttcgagaggacgctgggactcagcagcccatgtgacaacagggttccagcacagcagctgtattttaccaccccttccaaccagaatgtataccaggtggactctctgcaatctacgtgaaagaccccacacccctccttgctggaatgtgtctggcccttcagcagtttctcttggcagcatcagctgggctgctttctttgtgtgtggccccaggtgtcaaaatgacaccagctgtctgtactagacaaggttaccaagtgcggaattggttaatactaacagagagatttgctccattctctttggaataacaggacatgctgtatagatacaggcagtaggtttgctctgtacccatgtgtacagcctacccatgcagggactgggattcgaggacttccaggcgcatagggtagaaccaaatgatagggtaggagcatgtgttctttagggccttgtaaggctgtttccttttgcatctggaactgactatataattgtcttcaatgaagactaattcaattttgcatatagaggagccaaagagagatttcagctctgtatttgtggtatcagtttggaaaaaaaaatctgatactccatttgattattgtaaatatttgatcttgaatcacttgacagtgtttgtttgaattgtgtttgttttttcctttgatgggcttaaaagaaattatccaaagggagaaagagcagtatgccacttcttaaaacagaacaaaacaaaaaaagaaaattgtgctcttttctaatccaaagggtatatttgcagcatgcttgactttaccaattctgatgacatctttacggacactattatcactaagaccttgttatggcgaagtctttagtctttttcatgtattttcctcatgattttttctctttatgtagtttgactatgccttacctttgtaaatatttttgcttgtgttgtcgcaaaggggataatctgggaaagacaccaaatcatgggctcacttt

SEQ ID NO: 212796 - DNA, 567 bp, Artificial Sequence
  derived and/or modified sequence
attgaggagctgcctcgcgcagggggtgtgcgaggctgagtccaagagatagcaaatcgagtcttaaataatccggggagaaagacgcccgggtagatttgaggcggaattaaaccccgctccgagagcggcagcttcgcgcgcggtgcgctcggcctatgcctgccccgaggggcgtctggtaggcaccccgccctctcccgcagctcgacccccatgatagatacgctcagacccgtgcccttcgcgtcggaaatggcgatcagcaagacggtggcgtggctcaacgagcagctggagctgggcaacgagcggctgctgctgatggactgccggccgcaggagctatacgagtcgtcgcacatcgagtcggccatcaacgtggccatcccgggcatcatgctgcggcgcctgcagaagggtaacctgccggtgcgcgcgctcttcacgcgcggcgaggaccgggaccgcttcacccggcgctgtggcaccgacacagtggtgctctacgacgagagcagcagcgactggaacgagaatacgggcggcgagtcggtgctcgggctg

SEQ ID NO: 212797 - DNA, 708 bp, Artificial Sequence
  derived and/or modified sequence
atgattgatactctacgtcctgtgcctttcgctagcgaaatggcaatttcgaagacggtggcctggctgaatgagcagctcgaactcgggaacgagcgcctgctgttgatggactgtcgacctcaggagctctatgaaagttctcacatagagtctgcaattaatgtagctatccccggtattatgctccgccgtctccagaagggcaacttaccagtgcgggcactgtttacccgaggagaggacagagatcgcttcaccaggcggtgtggaactgatactgtggtcctgtatgacgagtctagctctgattggaacgaaaacactggcggcgaatctgtgctaggcctcctgctgaaaaaacttaaggacgaaggatgcagagccttttaccttgaggacgaagctcgggggaaaaactgcggtgtgctcgtccactgccttgctggaatttctaggagcgtcacagtcacagtcgcatatctgatgcaaaaattgaacttaagcatgaacgatgcttacgatattgtgaagatgaagaaaagtaacatctctcctaattttaacttcatgggacaactgctcgacttcgagaggacactgggcctctcatctccatgcgataatagggttcctgcccaacagctatacttcacaacgccatccaatcagaatgtgtaccaggttgattccttgcagtctacctag

SEQ ID NO: 212798 - DNA, 354 bp, Artificial Sequence
  derived and/or modified sequence
atgatcgatacgttacgaccggtcccctttgcctcagagatggccatttctaagacagtggcatggctgaatgagcaactggaactcgggaacgaaaggttgctactgatggattgtcggccgcaggaactttatgagagtagccatattgaatctgcaatcaatgttgccattccgggtatcatgttacgtcgtctgcaaaagggtaatcttcctgtgcgcgcactgttcacccgaggcgaagaccgcgatcgtttcacacgaagatgcggcactgacacggttgtgctttatgatgagagctcatccgactggaacgaaaacactggcggggagagcgtactggggctgtag

SEQ ID NO: 212799 - DNA, 708 bp, Artificial Sequence
  derived and/or modified sequence
atgattgacaccctgcggcctgtgccctttgccagcgagatggccatcagcaagacagtggcctggctgaatgagcagctggagctgggcaatgaaaggctgctgctgatggactgccggccccaggagctgtatgagagcagccacatcgagagcgccatcaacgtggccatccctggcatcatgctgcggcggctgcagaagggcaacctgcctgtgcgggccctcttcaccagaggagaagatcgggaccgcttcacccggcgctgtggcacagacacagtggtgctgtatgatgagagcagcagtgactggaatgaaaatactggaggagagagcgtgctgggcctgctgctgaagaagctgaaggatgagggctgccgggccttctacctggaggatgaggcccggggcaagaactgtggggtgctggtgcactgcctggccggcatcagccgctctgtgacagtgacagtggcctacctgatgcagaagctgaacctgtccatgaatgatgcctatgacatcgtgaagatgaagaagagcaacatcagccccaacttcaacttcatgggccagctgctggactttgagaggaccctgggcctgagcagcccctgtgacaacagagtgcctgcccagcagctgtacttcaccacccccagcaaccagaatgtgtaccaggtggacagcctgcagagcacctag

SEQ ID NO: 212800 - DNA, 354 bp, Artificial Sequence
  derived and/or modified sequence
atgattgacaccctgcggcctgtgccctttgccagcgagatggccatcagcaagacagtggcctggctgaatgagcagctggagctgggcaatgaaaggctgctgctgatggactgccggccccaggagctgtatgagagcagccacatcgagagcgccatcaacgtggccatccctggcatcatgctgcggcggctgcagaagggcaacctgcctgtgcgggccctcttcaccagaggagaagatcgggaccgcttcacccggcgctgtggcacagacacagtggtgctgtatgatgagagcagcagtgactggaatgaaaatactggaggagagagcgtgctgggcctgtag

SEQ ID NO: 212801 - DNA, 708 bp, Artificial Sequence
  derived and/or modified sequence
atgatcgacaccctgcggcccgtgcccttcgccagcgagatggccattagtaaaacagtagcttggctgaacgaacagctggagctcggcaatgagcggctgctgctgatggattgcagaccacaagagctctacgagagctcccatatagagtctgccatcaacgtggctattccaggtatcatgcttaggcgcctgcagaagggtaacctacccgtcagggctctgtttacaagaggagaagatagagaccgatttacaagacgatgcggaacggatacagttgttctgtatgatgagagttctagcgattggaatgaaaacaccggcggggaaagcgtcctgggcctgctccttaagaaattgaaggacgagggctgccgggcattctatctggaagatgaagctcgcggaaagaattgtggcgtgcttgtacactgcctggctgggatcagccgttctgtgaccgttactgtggcctacctgatgcagaagttgaacttgagcatgaacgatgcttacgacattgttaaaatgaaaaaaagtaatatctcccccaatttcaatttcatgggacagctgttggatttcgagcgcaccctcgggctctccagtccatgcgataaccgcgtccccgcccagcagctatactttaccaccccaagtaatcagaacgtttatcaggtggacagtctccaatctacctag

SEQ ID NO: 212802 - DNA, 354 bp, Artificial Sequence
  derived and/or modified sequence
atgatcgacaccctgcggcccgtgcccttcgccagcgagatggccatctccaagaccgtggcttggctcaacgaacagctcgaactggggaatgagcggctgctgctcatggattgtcgtccgcaggagctctatgaaagtagccatattgagagcgccattaacgtggcgatccccggcatcatgctgcgccgattgcagaaaggaaatttgccagttagagctctgtttaccaggggtgaggatcgagaccggtttacccgtcgatgcgggaccgacaccgtggtactctatgacgagagtagttccgactggaacgaaaatacaggcggagagtcggtgctcggcttgtag

SEQ ID NO: 212803 - DNA, 708 bp, Artificial Sequence
  derived and/or modified sequence
atgatcgacactcttcgtcccgttccttttgctagcgagatggctatttccaagaccgttgcttggctcaacgagcagcttgagctcggtaacgaacgcctgctcctgatggactgtcgtcctcaggagctttatgaaagtagccatattgagtccgctataaacgtggctattccaggcatcatgttaagaagactccagaagggaaacctgcccgttcgggctctgtttacaagaggggaagaccgcgataggttcacccgacgttgcggcacagatacagtggtactgtatgacgaatcctccagcgactggaacgagaacaccggcggagaatccgtgttaggactgcttctgaagaagcttaaagacgaaggctgtcgcgcattttacctggaagacgaagcaaggggcaagaattgtggggtgctagtccattgtctggcgggtatctcacgttctgtgaccgtgaccgtggcatatctgatgcagaagctgaatttatctatgaacgatgcctacgacatagtgaagatgaaaaagagcaacataagccctaatttcaatttcatggggcagctcctagatttcgagcgtacactgggactgtcgtcgccttgcgataaccgcgtgcctgcccaacagctgtactttactacgccctctaaccaaaacgtgtaccaagtggatagcttgcagtctacctag

SEQ ID NO: 212804 - DNA, 354 bp, Artificial Sequence
  derived and/or modified sequence
atgatcgatacacttagacccgtcccttttgcgagcgagatggcaatttccaagaccgtagcttggctgaatgaacagctggagcttgggaacgagagactcctcctgatggactgccgcccacaggagctgtatgaatctagccacatagaaagcgcaatcaatgtagctatccctgggatcatgctgagacgattgcagaagggcaatctccccgtgcgcgcactgttcacaaggggggaggaccgagatagatttactcgtcgatgtggcaccgacacagtggtgttgtatgacgaaagctcttccgactggaacgagaatactggcggagagtctgtactggggctatag

SEQ ID NO: 212805 - protein, 242 aa, Artificial Sequence
  derived and/or modified sequence
MSSYFVNPLFSKYKAGESLEPAYYDCRFPQSVGRSHALVYGPGGSAPGFQHASHHVQDFFHHGTSGISNSGYQQNPCSLSCHGDASKFYGYEALPRQSLYGAQQEASVVQYPDCKSSANTNSSEGQGHLNQNSSPSLMFPWMRPHAPGRRSGRQTYSRYQTLELEKEFLFNPYLTRKRRIEVSHALGLTERQVKIWFQNRRMKWKKENNKDKLPGARDEEKVEEEGNEEEEKEEEEKEENKD

SEQ ID NO: 212806 - DNA, 2290 bp, Artificial Sequence
  derived and/or modified sequence
gccgagctcagcaccgaggcgccccccaacctgcccagcccccagcccaccagcccagcccagtcccggggagccagctggcctggggttcggtcccggggggaggggagtttcgggggtactgggcggggtactcgtgagccagaggggagggggccgcgggttttcatgtacccagcatgagctcctacttcgtcaaccccctgttctccaaatacaaagccggcgagtccctggaaccggcctattacgactgccggttccctcagagcgtgggcaggagccatgcgctggtgtacgggcccggcggctcggcgcccggcttccagcacgcttcgcaccacgttcaagacttcttccaccacggcacctccggcatctccaactcaggctaccagcagaacccgtgctcgcttagctgccacggagacgcctccaaattctatggctacgaggcgctccccagacagtccctttatggggctcagcaagaggcgagcgtggtgcaatatcccgactgtaaatcctccgccaacactaacagtagcgaaggacaaggccacttaaatcaaaactcgtctcccagcctcatgtttccatggatgagaccccacgctccggggaggcgcagtggacggcaaacttacagccggtatcagaccttggaactagaaaaggagtttctctttaatccttatttgacacgaaaacgtcggattgaagtctctcatgccctgggactgaccgagagacaagtgaagatctggttccagaaccgaaggatgaagtggaaaaaggagaacaacaaggataaactgccgggagcccgagatgaggagaaggtggaggaagaaggaaatgaggaagaggagaaagaagaggaggaaaaggaagaaaacaaggactaagcaaaaaagaaagacccccccccccttagcaactcccttgaagtttcgttttatggtagcagataaattgagaagtttacgactgtcatttgcttttatagagaatagaatgacactcacaactctaactacctgtcagatacttgcagctctggttttattacctttggacttcccccactctttatttgtttgggggctggaggggggagacggagaaacagtgaaaagttcggactctctgtctcactccttgccccacacacacttgtccctgcccccacccttctgagtccttcctggattttaaggtctgagacctggcctccgtgctcctcggtctgtctctcaccacactcccacctccctgcttctctggtatttattttagaggggagccccctcgaaatgcagaaaaggacttgtggttttgtttttatgctaaggctagtgtactagatgtactttttctaaaaaggaaaggacagaaaaaaatgaagaaaggaaaggaagacaaatgtaaagaaataaggaaaaaagcaaggaatatcccctccccctccccctccccctccccagggctccctgcttagaaaaacccccttgactttctctaggaacctgatggaaacctgaaggagatgtgggtctttcccctccccccatttccagaagggtagataggagcctgcagtcgcctctaaaatcctacctaaccatcccatggtcactcgggcccatgccttcctctccttcgctgtttgatttctattctgttgggcccgccttcctctgagctgcattagtgttagtgctcagaaatcaccataatcacgaaaataataataataaatctttaacatactacctaaagggaacctgcaataatcttgaaaaagaaaaagagaaaaattttaaaatcctgctataggagaaaaaaagagaaaaaaataaaaatcaaaaaaaaaaaaaagaaagaaagaaacctccagcgtattttatcactacctatagaaagaaatcctgctttgagagtatttgtaatgcggttttgttgtcgtttgttgctgcttatttcactaagaaaacccaacaactgagactgcctagcccgccggtcctgtgcgcttttattgtgcttctaaccccagtagagtagaactaaattgcactgaatgtatagttaactctgtcttgaattctctgtttatgcaatgtgctcgaaagaaaaaaatgttaaaaatatatctataataataattttttgtcatttgtctttatgtccagctatgaatgtagattttgtgtcccgacagccctgttcctggtccaagtactttgtattgtatacgtgagtcataataataaaaagaagaagaaaa

SEQ ID NO: 212807 - DNA, 729 bp, Artificial Sequence
  derived and/or modified sequence
atgtcttcgtacttcgtaaaccccttatttagtaagtacaaagctggagagtccctggaaccagcttattacgactgtcggttccctcagtcagtgggacgctcccatgctctggtgtacggccctgggggtagcgctccgggtttccagcatgcatcacatcatgtccaggattttttccatcacggtacatcaggcatttctaattccggctatcagcagaatccatgttctctgagttgccacggcgacgccagcaagttctacggctacgaagcactgcctcggcagagcttatacggtgcgcagcaggaggcctccgttgttcagtatcccgattgcaagagcagcgccaacacgaactcctccgaggggcaagggcatctgaaccagaattcatcacctagcctgatgttcccctggatgcggccccatgctcccgggcggcggagcgggaggcagacttatagtcgctaccagacactggagcttgaaaaggagtttctcttcaacccatatcttacccggaagcggcggatcgaagtttctcacgcactgggcctgactgaaagacaggttaagatctggttccagaaccggcgcatgaagtggaagaaggaaaataataaagacaaacttcccggagctagggacgaagagaaggtggaggaagaaggaaacgaggaagaagaaaaggaggaggaggagaaagaggaaaacaaagactag

SEQ ID NO: 212808 - DNA, 3371 bp, Artificial Sequence
  derived and/or modified sequence
gctcgccgcccgccgccgccgccgcccgcgccccagccccgggagctctgctgatccggccgagctcagcaccgaggcgccccccaacctgcccagcccccagcccaccagcccagcccagtcccggggagccagctggcctggggttcggtcccggggggaggggagtttcgggggtactgggcggggtactcgtgagccagaggggagggggccgcgggttttcatgtacccagcatgagctcctacttcgtcaaccccctgttctccaaatacaaagccggcgagtccctggaaccggcctattacgactgccggttccctcagagcgtgggcaggagccatgcgctggtgtacgggcccggcggctcggcgcccggcttccagcacgcttcgcaccacgttcaagacttcttccaccacggcacctccggcatctccaactcaggctaccagcagaacccgtgctcgcttagctgccacggagacgcctccaaattctatggctacgaggcgctccccagacagtccctttatggggctcagcaagaggcgagcgtggtgcaatatcccgactgtaaatcctccgccaacactaacagtagcgaaggacaaggccacttaaatcaaaactcgtctcccagcctcatgtttccatggatgagaccccacgctccggggaggcgcagtggacggcaaacttacagccggtatcagaccttggaactagaaaaggagtttctctttaatccttatttgacacgaaaacgtcggattgaagtctctcatgccctgggactgaccgagagacaagtgaagatctggttccagaaccgaaggatgaagtggaaaaaggagaacaacaaggataaactgccgggagcccgagatgaggagaaggtggaggaagaaggaaatgaggaagaggagaaagaagaggaggaaaaggaagaaaacaaggactaagcaaaaaagaaagacccccccccccttagcaactcccttgaagtttcgttttatggtagcagataaattgagaagtttacgactgtcatttgcttttatagagaatagaatgacactcacaactctaactacctgtcagatacttgcagctctggttttattacctttggacttcccccactctttatttgtttgggggctggaggggggagacggagaaacagtgaaaagttcggactctctgtctcactccttgccccacacacacttgtccctgcccccacccttctgagtccttcctggattttaaggtctgagacctggcctccgtgctcctcggtctgtctctcaccacactcccacctccctgcttctctggtatttattttagaggggagccccctcgaaatgcagaaaaggacttgtggttttgtttttatgctaaggctagtgtactagatgtactttttctaaaaaggaaaggacagaaaaaaatgaagaaaggaaaggaagacaaatgtaaagaaataaggaaaaaagcaaggaatatcccctccccctccccctccccctccccagggctccctgcttagaaaaacccccttgactttctctaggaacctgatggaaacctgaaggagatgtgggtctttcccctccccccatttccagaagggtagataggagcctgcagtcgcctctaaaatcctacctaaccatcccatggtcactcgggcccatgccttcctctccttcgctgtttgatttctattctgttgggcccgccttcctctgagctgcattagtgttagtgctcagaaatcaccataatcacgaaaataataataataaatctttaacatactacctaaagggaacctgcaataatcttgaaaaagaaaaagagaaaaattttaaaatcctgctataggagaaaaaaagagaaaaaaataaaaatcaaaaaaaaaaaaaagaaagaaagaaacctccagcgtattttatcactacctatagaaagaaatcctgctttgagagtatttgtaatgcggttttgttgtcgtttgttgctgcttatttcactaagaaaacccaacaactgagactgcctagcccgccggtcctgtgcgcttttattgtgcttctaaccccagtagagtagaactaaattgcactgaatgtatagttaactctgtcttgaattctctgtttatgcaatgtgctcgaaagaaaaaaatgttaaaaatatatctataataataattttttgtcatttgtctttatgtccagctatgaatgtagattttgtgtcccgacagccctgttcctggtccaagtactttgtattgtatacgtgagtcataataataaaaagaagaagaaaaataatagaagctggaatgacttgctttttctccacagctcttccctattctctaccttctctctccttatccccctgtccaactctctggaaaaggtctgcttcactgctctggctttggggttcagaaactcacgtggagagaagcctgggaattgagaaagcatgctggcctgggagggcaggtgaaaggggtgaggggttgagaggaggaagaaaaggagcagtccattggttgagagagtaaggagtctataggtatgcccttgggggaatcttggctccaaacaaagtgggtttccagacgccaggatcccaatgggaagaaagatttcctcactcatccaccctcctcctcctcagccttgggctgggcccagacaaagaatctgccctatgcaactatgactttttcttccagggtctggggctgaggatgagatagtgggattccttctgatctccgcatgccccttgtggccagaccttagcacccagcacccagcactagaataatgaaccgggtggggatgtgtgaggctcagggcaactggctggcctgtctgcagggcttgcctgaagatgggggatgctaagaatggagggtgaggaagcttaagcctgaaggagaggagaaaggaaggggaaagtaagtgagctcgtaggcaaccagcctgagcccacatcctgaaattcacattcaatcctctgcacaggaagattgtcatcactgtcattcagcccgcttgcatccactccaacttctgttcagacggtttaaagtccactccccacttcaccttggcaattggtcagcttacccagcccccatagtgtgggccattggcctggaggatgggcctgctgagtggacatcctgccaccccagtcacagcggggtaagagggcgtctttattggtatcttcattccccaaaatgaagaattgaaggctcagggacccagggggtagaagggtctctcacttctctctggagagtcctggacttaaaaattctgtttat

SEQ ID NO: 212809 - DNA, 729 bp, Artificial Sequence
  derived and/or modified sequence
atgagcagctactttgtgaaccccctcttcagcaagtacaaggccggggagagcctggagcccgcctactatgactgccgcttcccccagagcgtgggccgcagccacgccctggtgtatggccctgggggcagcgcccctggcttccagcacgccagccaccacgtgcaggacttcttccaccacggcaccagcggcatcagcaacagcggctaccagcagaacccctgcagcctgagctgccacggagatgccagcaagttctacggctatgaggccctgccccggcagagcctgtatggagcccagcaggaggcctctgtggtgcagtacccagactgcaagagcagcgccaacaccaacagcagcgagggccagggccacctgaaccagaacagcagccccagcctgatgttcccctggatgaggcctcatgcccctggaagaagaagtggccggcagacctacagccgctaccagaccctggagctggagaaggagttcctgttcaacccctacctgaccaggaagaggcgcatcgaggtgagccacgccctgggcctgacagagcggcaggtgaagatctggttccagaacagaaggatgaagtggaagaaggagaacaacaaggacaagctgcccggggccagagatgaggagaaggtggaggaggagggcaatgaggaggaggagaaggaggaggaggagaaggaggagaacaaggactag

SEQ ID NO: 212810 - DNA, 729 bp, Artificial Sequence
  derived and/or modified sequence
atgagcagctacttcgtgaaccccctgttcagcaagtacaaggccggagagtcgctagaacccgcttactacgactgccgtttcccccagagtgtgggacggagtcacgccctggtgtacgggccaggcggctctgcccctggctttcaacacgcctcccaccatgttcaggattttttccaccacggcacaagtggaatctccaattcgggatatcagcagaatccatgtagtctgtcttgccatggggatgctagtaaattctatggctacgaagctctgcccagacaaagtttgtacggggcgcagcaagaggcaagcgttgtgcagtaccctgattgtaaatcctccgccaacaccaatagctctgaagggcaggggcacctgaaccagaatagctcaccttctttaatgtttccctggatgcgaccccacgcacctggccggcgcagcggcaggcagacttactctcgatatcagacactggaacttgagaaagagttcctattcaacccttacctgacacggaagaggcggatcgaggtcagtcacgctcttggccttaccgaaaggcaggtgaaaatctggtttcaaaaccgccggatgaagtggaagaaagagaacaacaaagataagttgccaggggctagggacgaggaaaaggtggaggaagaaggaaacgaagaggaagaaaaagaagaggaggagaaagaagagaacaaggactag

SEQ ID NO: 212811 - DNA, 729 bp, Artificial Sequence
  derived and/or modified sequence
atgagtagctacttcgtaaaccctttgttctctaagtacaaggctggtgagtctcttgaacccgcatactatgactgccgctttcctcagagcgttggacgatcacacgctctggtctacgggccaggcggaagtgcccctgggtttcagcatgccagccaccatgtgcaggatttttttcaccatggaacttctggcataagcaattctggctatcagcaaaacccttgttctctgagttgccacggagacgcgtcaaagttctacggctacgaggccctccctcgtcagagcttgtacggcgctcagcaagaggcatcagtcgtgcagtatccagactgcaagtctagtgcaaatactaactcttccgagggccagggccacctaaatcaaaatagctctcccagcctcatgtttccctggatgagacctcacgcaccagggcgaagaagtggtagacaaacatatagtaggtatcagactctcgagttagaaaaagagttccttttcaacccctacctgacccgaaagcggcgaatcgaagtgtcccatgctctgggtctgactgaaagacaagtcaagatttggtttcaaaatagaagaatgaaatggaagaaagaaaacaataaggacaagctgcctggcgcaagagatgaggagaaagtggaagaagagggtaacgaggaagaggagaaagaggaagaggagaaggaggaaaataaagactag

SEQ ID NO: 212812 - DNA, 729 bp, Artificial Sequence
  derived and/or modified sequence
atgagcagttacttcgtgaatccgctgttcagtaaatacaaagctggagaaagtttagagcctgcgtattacgattgtagattccctcagagtgttggtcggtctcacgcactggtctacggcccaggtggctctgcccccggcttccagcatgcgagtcaccatgtccaggacttctttcatcatggaacaagtggcatctcaaacagtggctatcagcagaatccttgttcactgtcctgccatggggacgccagcaagttctacggctacgaagccctgccaaggcaatccctgtatggcgctcaacaggaggccagcgtggtgcagtaccccgattgtaagtcatccgcgaacacaaacagctccgagggacaaggtcacctgaaccagaattcgtccccctccctgatgttcccctggatgcgaccccacgcccccggaaggagatccggaagacagacttattctaggtaccagactctggagttagaaaaagaattcctgttcaacccgtatctgactcggaagcggagaatcgaagtctcacacgcgttaggactgacagagcggcaagtgaagatctggtttcagaaccggagaatgaagtggaagaaggagaataacaaagataagcttcccggtgctagggacgaagaaaaagtcgaagaagagggaaacgaagaggaggaaaaagaagaggaagagaaagaggaaaataaagattag

SEQ ID NO: 212813 - DNA, 729 bp, Artificial Sequence
  derived and/or modified sequence
atgagctcatactttgtgaatcctctgttctctaaatataaggctggcgaaagtctggaacccgcatattacgactgccgctttccgcaaagcgtcgggcggagccacgccctagtctatggcccaggtggatcagcccccggctttcagcacgcctctcatcacgtacaagatttcttccatcacgggacaagtgggatcagtaacagtgggtaccagcagaatccgtgttcactcagctgtcacggcgacgcatcgaagttttacggatatgaagccctgccacgacaatccctctacggggcacaacaagaggcaagtgtcgttcagtaccctgattgcaagtcatcagcaaacaccaacagttcagaaggccaggggcatctcaatcagaactcttccccctccctgatgtttccctggatgcgcccccatgcccccggacgcagatcgggcaggcagacctattctcgctatcagactctcgaactggagaaggaatttctcttcaacccatacctcacacggaaacgcagaatagaagtctcccacgccctcgggctgacagaacgccaagtgaaaatttggttccagaatcggcgcatgaaatggaaaaaagaaaataataaggacaaactgcccggggcgagagatgaagagaaggtggaggaggaaggaaatgaggaggaagagaaggaggaagaggaaaaggaggagaacaaggattag

SEQ ID NO: 212814 - DNA, 729 bp, Artificial Sequence
  derived and/or modified sequence
atgagcagctacttcgtgaaccccctgttcagcaagtacaaggccggcgagagcctggagcccgcctactacgactgcagattcccccagagcgtgggcagaagccacgccctggtgtacggccccggcggcagcgcccccggcttccagcacgccagccaccacgtgcaggacttcttccaccacggcaccagcggcatcagcaacagcggctaccagcagaacccctgcagcctgagctgccacggcgacgccagcaagttctacggctacgaggccctgcccagacagagcctgtacggcgcccagcaggaggccagcgtggtgcagtaccccgactgcaagagcagcgccaacaccaacagcagcgagggccagggccacctgaaccagaacagcagccccagcctgatgttcccctggatgagaccccacgcccccggcagaagaagcggcagacagacctacagcagataccagaccctggagctggagaaggagttcctgttcaacccctacctgaccagaaagagaagaatcgaggtgagccacgccctgggcctgaccgagagacaggtgaagatctggttccagaacagaagaatgaagtggaagaaggagaacaacaaggacaagctgcccggcgccagagacgaggagaaggtggaggaggagggcaacgaggaggaggagaaggaggaggaggagaaggaggagaacaaggactag

SEQ ID NO: 212815 - protein, 575 aa, Artificial Sequence
  derived and/or modified sequence
MFGIQDTLGRGPTLKEKSLGAEMDSVRSWVRNVGVVDANVAAQSGVALSRAHFEKQPPSNLRKSNFFHFVLALYDRQGQPVEIERTAFVDFVENDKEQGNEKTNNGTHYKLQLLYSNGVRTEQDLYVRLIDSVTKQPIAYEGQNKNPEMCRVLLTHEVMCSRCCEKKSCGNRNETPSDPVIIDRFFLKFFLKCNQNCLKTAGNPRDMRRFQVVLSTTVNVDGHVLAVSDNMFVHNNSKHGRRARRLDPSEATPCIKAISPSEGWTTGGAMVIIIGDNFFDGLQVVFGTMLVWSELITPHAIRVQTPPRHIPGVVEVTLSYKSKQFCKGAPGRFIYTALNEPTIDYGFQRLQKVIPRHPGDPERLAKEMLLKRAADLVEALYGTPHNNQDIILKRAADIAEALYSVPRNPSQLPALSSSPAHSGMMGINSYGSQLGVSISESTQGNNQGYIRNTSSISPRGYSSSSTPQQSNYSTSSNSMNGYSNVPMANLGVPGSPGFLNGSPTGSPYGIMSSSPTVGSSSTSSILPFSSSVFPAVKQKSAFAPVIRPQGSPSPACSSGNGNGFRAMTGLVVPPM

SEQ ID NO: 212816 - protein, 264 aa, Artificial Sequence
  derived and/or modified sequence
MVIIIGDNFFDGLQVVFGTMLVWSELITPHAIRVQTPPRHIPGVVEVTLSYKSKQFCKGAPGRFIYTALNEPTIDYGFQRLQKVIPRHPGDPERLAKEMLLKRAADLVEALYGTPHNNQDIILKRAADIAEALYSVPRNPSQLPALSSSPAHSGMMGINSYGSQLGVSISESTQGNNQGYIRNTSSISPRGYSSSSTPQQSNYSTSSNSMNGYSNVPMANLGVPGSPGFLNGSPTGSPYGTGLWLTWLLKAFWGKKRIETIPFL

SEQ ID NO: 212817 - DNA, 1728 bp, Artificial Sequence
  derived and/or modified sequence
atgttcggcatccaggacacacttgggcgaggccccaccctcaaagagaaaagtctcggagcagaaatggatagcgttaggagctgggtcagaaatgttggggtagttgatgctaacgtcgctgctcaatccggggtcgcactgagtcgagcccattttgagaagcaaccaccatcaaacctgagaaagtccaatttttttcactttgtcctggccttgtacgataggcaaggccagcccgtcgagatcgagcgaaccgctttcgtggatttcgtggagaatgacaaggagcaaggcaacgagaagaccaataacgggacccactacaaacttcagctgctctatagcaatggcgtacgcaccgagcaggatctttacgtcaggctcatcgattccgtgactaaacagccaattgcatatgaaggtcagaataagaatcctgaaatgtgtcgggttctgttgacacatgaggttatgtgtagccgctgctgcgaaaagaaatcctgcggtaaccgtaacgagacaccctccgaccccgtcattattgaccggttcttccttaagttcttcctgaagtgcaaccagaactgcctgaagacagccggcaacccacgcgacatgcgacgttttcaggtggttctgtctaccacggtaaacgtggacgggcatgtgcttgctgtgtcagacaacatgtttgttcataacaattcaaaacatggcaggagggcccgccgcctggaccctagtgaagcgactccatgcattaaagccatcagtcctagcgaaggctggacaactggcggggcaatggtgattataatcggagataatttcttcgacgggctacaggttgtgttcggaaccatgcttgtgtggtctgagctcattacgccccacgcaatacgggtccaaacgcctccacggcacatccccggcgtggtggaggtgacactgagctacaagtccaagcaattctgcaagggtgcgcccggaagatttatctatacagctctcaacgagcctacaattgactacggcttccaacgcctccagaaagtcattcctcgtcacccaggggacccagagaggctggcgaaggagatgctcctgaaaagggcagccgatctggtggaagccctgtatggcactcctcacaacaaccaagatattatcctgaaaagagcagccgacatcgctgaagcgctgtacagcgttccccgaaacccctcccagttgcccgccctgtcttcatctcctgcccatagcggcatgatgggcatcaatagctatggtagtcagttaggcgtgagcatctcagaatccactcagggtaacaaccagggatacattaggaacacctcttctatctccccaagggggtactctagtagttcgacaccgcagcagtctaactactcaaccagttccaacagcatgaacggttacagcaatgtgccaatggcaaatctaggagtgccaggaagccccgggttcctcaacgggtctcccacaggtagcccctacggaattatgtcgtcttccccaaccgttggatcctcttccacctcctccatattgccctttagcagctccgtgttccctgctgtcaagcagaagtctgcctttgctcctgtgatcagaccccagggcagcccctcccctgcctgctcaagcgggaacgggaacggtttccgcgcgatgacaggtctcgtggtcccaccaatgtag

SEQ ID NO: 212818 - DNA, 795 bp, Artificial Sequence
  derived and/or modified sequence
atggtgatcatcatcggggacaacttcttcgacggactccaggtcgtcttcggtacaatgcttgtctggtcagaactgatcaccccgcatgcaatccgcgtccagacgcctccacggcacattccaggcgtggtggaggtgacactgtcatacaagtcaaagcagttctgcaagggagccccaggccgtttcatttacactgcgctcaacgagccgacaatcgattacggtttccagcgccttcaaaaggtgataccacggcaccctggtgatccagaacgcctggccaaggaaatgctgctgaagagagccgcggacctggtggaagctttgtatggcactcctcataataaccaggacattatcctgaagcgcgcagctgatatcgctgaagcgttatatagtgtgccccgtaatccctcccaactccccgcactgagctcctctcccgctcacagtggaatgatgggcattaattcgtatggatctcagctcggcgtgagcatcagcgagtctactcaaggaaacaatcagggatatatccgcaacacatcaagtatctccccgcgcgggtattcctccagctcaaccccgcagcagtccaattactcaacatcatctaatagcatgaacgggtacagcaatgtgcccatggcaaatctcggggtgcccggatcccctggctttctgaatgggagcccaaccggctctccatacggcaccggactctggctgacttggttgctgaaagcgttttgggggaagaagcgcattgagactatcccatttctgtag

SEQ ID NO: 212819 - DNA, 1728 bp, Artificial Sequence
  derived and/or modified sequence
atgtttggcatccaggacaccctgggccggggccccaccctgaaggagaagagcctgggcgctgagatggattctgtgcgctcctgggtgagaaatgtgggcgtggtggatgccaacgtggccgcccagagcggcgtggccctgagccgggcccactttgagaagcagccccccagcaacctgaggaagagcaacttcttccactttgtgctggccctgtatgaccggcagggccagcctgtggagattgaaagaacagcctttgtggactttgtggagaatgacaaggagcagggcaatgagaagaccaacaacggcacccactacaagctgcagctgctgtacagcaatggagtgaggacagagcaggacctgtatgtgcggctgattgacagcgtgaccaagcagcccatcgcctatgagggccagaacaagaaccctgagatgtgccgggtgctgctgacccatgaggtgatgtgcagccgctgctgtgagaagaagagctgtggcaacagaaatgagacccccagcgaccctgtgatcatcgaccgcttcttcctgaagttcttcctgaagtgcaaccagaactgcctgaagacagctggcaacccccgggacatgaggcgcttccaggtggtgctgagcaccaccgtgaatgtggatggccacgtgctggccgtgtctgacaacatgtttgtgcacaacaacagcaagcatggaagaagagcccggcggctggaccccagcgaggccaccccctgcatcaaggccatcagccccagcgagggctggaccaccggcggggccatggtgatcatcatcggggacaacttctttgatggcctgcaggtggtgtttggcaccatgctggtgtggagcgagctgatcacccctcatgccatccgggtgcagaccccacccaggcacatccctggggtggtggaggtgaccctgagctacaagagcaagcagttctgcaagggggcccctggccgcttcatctacacagccctgaatgagcccaccattgattatggcttccagaggctgcagaaggtgatccccaggcaccctggggaccctgagcggctggccaaggagatgctgctgaagagagctgctgacctggtggaggccctgtatggcaccccccacaacaaccaggacatcatcctgaagagagctgctgacattgctgaggccctgtacagcgtgcccaggaaccccagccagctgcctgccctgagcagcagccctgcccacagcggcatgatgggcatcaacagctatggcagccagctgggcgtgtccatcagcgagagcacccagggcaacaaccagggctacatccggaacaccagcagcatcagcccccggggctacagcagcagcagcaccccccagcagagcaactacagcaccagcagcaacagcatgaatggctacagcaatgtgcccatggccaacctgggcgtgcccggcagccctggcttcctgaatggcagccccaccggcagcccctacggcatcatgagcagcagccccaccgtgggcagcagcagcaccagcagcatcctgcccttcagcagctctgtgtttcctgctgtgaagcagaagagcgcctttgcccctgtgatccggccccagggcagccccagccctgcctgcagcagtggaaatggaaatggcttccgggccatgacaggcctggtggtgccccccatgtag

SEQ ID NO: 212820 - DNA, 795 bp, Artificial Sequence
  derived and/or modified sequence
atggtgatcatcattggagacaacttctttgatggcctgcaggtggtgtttggcaccatgctggtgtggagcgagctgatcaccccccacgccatccgggtgcagaccccacccaggcacatccctggggtggtggaggtgaccctgagctacaagagcaagcagttctgcaagggggcccctggccgcttcatctacacagccctgaatgagcccaccatcgactatggcttccagaggctgcagaaggtgatccccaggcaccctggggaccctgagcggctggccaaggagatgctgctgaagagagctgctgacctggtggaggccctgtatggcaccccccacaacaaccaggacatcatcctgaagagagctgctgacattgctgaggccctgtacagcgtgcccaggaaccccagccagctgcctgccctgagcagcagccctgcccacagcggcatgatgggcatcaacagctatggcagccagctgggcgtgtccatcagcgagagcacccagggcaacaaccagggctacatccggaacaccagcagcatcagcccccggggctacagcagcagcagcaccccccagcagagcaactacagcaccagcagcaacagcatgaatggctacagcaatgtgcccatggccaacctgggcgtgcccggcagccctggcttcctgaatggcagccccaccggcagcccctatggaacaggcctgtggctgacctggctgctgaaggccttctggggcaagaagagaattgagaccatccccttcctgtag

SEQ ID NO: 212821 - DNA, 1728 bp, Artificial Sequence
  derived and/or modified sequence
atgttcggcatccaggacaccctgggccggggccccaccctgaaggagaagagtctgggagctgaaatggatagcgtcagatcttgggtccggaatgtaggagtcgtggatgcgaatgtggccgcccagtccggtgtggccctgagtagggcacacttcgagaagcagcctcctagtaacctccgcaagtcaaatttctttcattttgtacttgcactttatgaccgccagggccagcccgtagaaattgagcgcacagcatttgtcgatttcgttgagaacgataaggagcagggaaacgaaaaaaccaacaatgggacccactataagctccagctgctgtacagtaacggggtcagaacggagcaggatctctacgtgcgactgatagactcagtaaccaaacagccaatcgcttacgaaggacaaaacaagaatccggagatgtgcagagtcctcctcacccatgaggtgatgtgctcaagatgttgcgagaaaaagtcctgtggaaacagaaacgaaactcctagcgacccagtgataatcgaccgctttttcttaaagtttttcctgaagtgcaaccagaactgtctgaagaccgccggcaaccctcgagacatgcgccgttttcaggttgtcttaagcacgacagtgaatgtggacggccatgtcctcgcggtgagcgacaatatgtttgtacacaataacagcaaacacgggagaagagccagaagactggatccttctgaagccacaccatgtatcaaagccatcagtcctagcgagggatggactacgggcggggcaatggtcattattattggagacaatttcttcgatgggctgcaggtagttttcggcaccatgctcgtctggtcggagctgatcacgcctcatgcaattcgggtgcagaccccccctcgacatatcccaggagtagtcgaggtgactcttagctacaaatctaaacaattttgtaaaggggctccgggaaggttcatttataccgccctaaatgaaccaacgattgactacggcttccagcgacttcagaaggtgatcccccggcatcctggtgatccagagcgcctggctaaagaaatgctgctgaaacgcgccgcggatttggtggaggcactctatggtacgccccacaataatcaggacattattctcaaacgggcagcggacattgcggaagccctgtactcagtaccccggaatccgtcacagctcccggccttgagcagcagtccggcgcacagcgggatgatgggcatcaacagctatggcagccaacttggggtgtcaatttccgaatccacacaagggaacaaccagggctacatccggaacacgtcatcaataagtccacgtggttattcgagttcctccacgccgcaacagtcgaactactctactagctcgaactccatgaacgggtacagtaacgtgccgatggcaaacctgggtgtgccgggcagccccggattcttgaatgggtccccaacaggttctccttatggcatcatgtcctccagccctaccgtgggaagctcaagcacatccagtatcctgccgttcagctcaagtgtcttcccggccgtaaaacaaaagtccgccttcgcgccagtgatccggccccagggatctccctctccagcctgttctagcgggaacggcaatggattccgcgctatgaccggcctcgtggtgccccctatgtag

SEQ ID NO: 212822 - DNA, 795 bp, Artificial Sequence
  derived and/or modified sequence
atggtgatcatcatcggcgacaacttcttcgacggcctgcaggtggtgttcggcactatgttagtgtggtcagagctcattacaccgcacgccatcagagttcagacaccccccagacatatcccaggggtggtggaagtcacgctctcatataagtctaagcagttctgcaagggcgccccaggaagattcatctacacagctttgaacgagccaaccatcgactacgggtttcagcgactgcagaaggtcattccaagacatcccggcgatccggagcggctagcaaaagagatgctgctgaaacgggcagcagatttggtggaagcgctctacgggactccccacaataatcaagatatcatcctcaaaagggctgcagacattgcagaggccctttattcggttccaagaaacccaagtcagcttcccgccctctcctcctccccagctcatagcggaatgatgggcattaatagctacggctcccagctgggtgtgagtattagtgagtctacccaggggaacaaccagggatacatccggaacacaagtagcattagccctcgcggctactctagtagtagcacccctcagcagtccaactacagcaccagctctaactcgatgaatggttattcgaatgtgccaatggctaatctcggcgtgcctggatcccctggattcctcaacggcagtcccactggatccccctatgggaccggactctggctcacttggttgctaaaggccttttggggaaagaaaagaatcgaaaccataccatttctgtag

SEQ ID NO: 212823 - DNA, 1728 bp, Artificial Sequence
  derived and/or modified sequence
atgttcgggattcaggataccctgggtcgcggaccaactctcaaagagaagagcctgggagccgagatggattcagttcgtagctgggtcaggaacgtgggtgtcgttgatgccaatgtggccgcacaatcaggggtcgctctcagcagggcacattttgaaaagcagccaccgagcaacctacgtaaatctaattttttccactttgttttggccttatacgatcgccaaggacagcctgtggaaattgaaagaactgcgtttgtagacttcgtggaaaacgataaagaacagggcaacgaaaagactaataacggaactcattacaaactgcagctcctctatagcaacggtgtgaggaccgaacaggacctgtacgtacgcctgatcgattccgtgacgaaacagcccatcgcctacgagggacagaataagaatcctgagatgtgcagggtgctgctgacacacgaagtgatgtgctctcgctgctgcgaaaaaaaaagctgcggaaaccggaacgagacacctagcgacccagtcattatcgacaggttcttccttaagtttttcctgaagtgcaaccaaaattgcctgaagacggctggtaaccctcgggatatgagacgattccaggttgtactgtccacaaccgtcaacgtggatgggcacgttttagctgtgtctgacaatatgttcgttcacaataactccaagcatgggagacgcgctagaagactggatccatcagaggccacaccctgcattaaggccataagtcccagcgagggctggacgacaggcggagcaatggtcataattatcggagataacttttttgacggccttcaagtggtatttggcactatgctggtgtggtcggagctgattactccccatgcaatccgcgttcagacccccccaaggcatataccgggagtcgtcgaggtgacactgtcctataaatctaaacagttttgcaagggagctcccggaagattcatctacacagccctcaatgagcctactatcgactatggtttccaacggctgcagaaagttatccccaggcacccgggagatcctgaacgcctggcaaaggagatgctcctgaagagagcagccgacctcgtcgaggccctatacggtaccccacacaataatcaggatatcatcctgaagcgagccgctgacatcgcagaggcgctgtattcagtcccccgtaacccttcccagcttccagcattgtcctccagtcctgcgcattctgggatgatgggaatcaacagctacggtagccagctgggggtcagcataagcgagtcgacccaaggtaacaatcagggctatatcagaaatacatccagtatctcaccgagaggctattcttccagctcaaccccacagcagtctaactattccacctctagcaactccatgaatggatattctaacgtgccaatggctaacctcggagtgccaggctcaccagggttcctgaacggttcccccacaggcagcccttacggcatcatgtcatcatccccaaccgtgggaagtagctccacaagcagcatcctgccgttcagcagttctgtttttcctgctgtcaagcaaaaatcagcatttgcaccagttatcaggcctcagggctccccatctcctgcatgttcctcgggaaacggcaatgggttcagagcaatgacgggacttgtggtgccccctatgtag

SEQ ID NO: 212824 - DNA, 795 bp, Artificial Sequence
  derived and/or modified sequence
atggttataatcatcggagataacttcttcgacgggcttcaggtggtgttcggaactatgctggtgtggtctgaacttatcacccctcacgccatccgtgtgcagacgccccctagacatattcctggagtcgtggaggtgactctgagctacaagagcaaacaattttgtaagggggctccaggtagattcatctacacagctttgaacgaacccacaatagactatggattccagcggctgcagaaggtaatcccaaggcacccgggagatccagagcgtctggctaaggagatgcttctgaaacgcgctgctgacctcgtggaagccctctacggcacaccccacaacaaccaggatatcatcctaaaacgcgcagccgacattgctgaggccctgtattctgtcccacgaaaccctagccagctcccagccttgagcagcagccccgctcattctggaatgatggggatcaatagctacgggagtcagctgggcgtttctatctcagagagtacacagggaaacaatcaaggctacattaggaatacctcttcaatcagccctaggggttattcctcaagtagtacacctcagcagagcaactattccacgtcctccaatagcatgaacggctactcgaacgtccccatggccaatctcggagtgcctggtagtccaggatttctgaacggaagccctaccggctcgccttacggtaccggcttgtggcttacatggcttctgaaggccttttggggcaagaagagaatcgagaccatcccatttctttag

SEQ ID NO: 212825 - DNA, 1728 bp, Artificial Sequence
  derived and/or modified sequence
atgttcggcatccaggacaccctgggcagaggccccaccctgaaggagaagagcctgggcgccgagatggacagcgtgagaagctgggtgagaaacgtgggcgtggtggacgccaacgtggccgcccagagcggcgtggccctgagcagagcccacttcgagaagcagccccccagcaacctgagaaagagcaacttcttccacttcgtgctggccctgtacgacagacagggccagcccgtggagatcgagagaaccgccttcgtggacttcgtggagaacgacaaggagcagggcaacgagaagaccaacaacggcacccactacaagctgcagctgctgtacagcaacggcgtgagaaccgagcaggacctgtacgtgagactgatcgacagcgtgaccaagcagcccatcgcctacgagggccagaacaagaaccccgagatgtgcagagtgctgctgacccacgaggtgatgtgcagcagatgctgcgagaagaagagctgcggcaacagaaacgagacccccagcgaccccgtgatcatcgacagattcttcctgaagttcttcctgaagtgcaaccagaactgcctgaagaccgccggcaaccccagagacatgagaagattccaggtggtgctgagcaccaccgtgaacgtggacggccacgtgctggccgtgagcgacaacatgttcgtgcacaacaacagcaagcacggcagaagagccagaagactggaccccagcgaggccaccccctgcatcaaggccatcagccccagcgagggctggaccaccggcggcgccatggtgatcatcatcggcgacaacttcttcgacggcctgcaggtggtgttcggcaccatgctggtgtggagcgagctgatcaccccccacgccatcagagtgcagaccccccccagacacatccccggcgtggtggaggtgaccctgagctacaagagcaagcagttctgcaagggcgcccccggcagattcatctacaccgccctgaacgagcccaccatcgactacggcttccagagactgcagaaggtgatccccagacaccccggcgaccccgagagactggccaaggagatgctgctgaagagagccgccgacctggtggaggccctgtacggcaccccccacaacaaccaggacatcatcctgaagagagccgccgacatcgccgaggccctgtacagcgtgcccagaaaccccagccagctgcccgccctgagcagcagccccgcccacagcggcatgatgggcatcaacagctacggcagccagctgggcgtgagcatcagcgagagcacccagggcaacaaccagggctacatcagaaacaccagcagcatcagccccagaggctacagcagcagcagcaccccccagcagagcaactacagcaccagcagcaacagcatgaacggctacagcaacgtgcccatggccaacctgggcgtgcccggcagccccggcttcctgaacggcagccccaccggcagcccctacggcatcatgagcagcagccccaccgtgggcagcagcagcaccagcagcatcctgcccttcagcagcagcgtgttccccgccgtgaagcagaagagcgccttcgcccccgtgatcagaccccagggcagccccagccccgcctgcagcagcggcaacggcaacggcttcagagccatgaccggcctggtggtgccccccatgtag

SEQ ID NO: 212826 - DNA, 795 bp, Artificial Sequence
  derived and/or modified sequence
atggtgatcatcatcggcgacaacttcttcgacggcctgcaggtggtgttcggcaccatgctggtgtggagcgagctgatcaccccccacgccatcagagtgcagaccccccccagacacatccccggcgtggtggaggtgaccctgagctacaagagcaagcagttctgcaagggcgcccccggcagattcatctacaccgccctgaacgagcccaccatcgactacggcttccagagactgcagaaggtgatccccagacaccccggcgaccccgagagactggccaaggagatgctgctgaagagagccgccgacctggtggaggccctgtacggcaccccccacaacaaccaggacatcatcctgaagagagccgccgacatcgccgaggccctgtacagcgtgcccagaaaccccagccagctgcccgccctgagcagcagccccgcccacagcggcatgatgggcatcaacagctacggcagccagctgggcgtgagcatcagcgagagcacccagggcaacaaccagggctacatcagaaacaccagcagcatcagccccagaggctacagcagcagcagcaccccccagcagagcaactacagcaccagcagcaacagcatgaacggctacagcaacgtgcccatggccaacctgggcgtgcccggcagccccggcttcctgaacggcagccccaccggcagcccctacggcaccggcctgtggctgacctggctgctgaaggccttctggggcaagaagagaatcgagaccatccccttcctgtag

SEQ ID NO: 212827 - DNA, 5145 bp, Artificial Sequence
  derived and/or modified sequence
attcatggggcccgcgcgcggctgcagccgggctccgtggcgctcgcagccaccgcctcctctcggctccaggtcttccccttctttttacaactgatcctgttggggattttttttttttctaaattggaacggtggggaggagcagggaggggggacctggaggaaggggagagattaggcagccatcaatttcctccagtttctcccagaacaggtgatgcttctaaattgtgatcactttcaggaggcagcactgcagctggaaggatgcgagcgacctagggtggagtggctgaggcggcagatctgaacttgcggaggataagaacccaaactttgactacatcagtccgcacctcgccagtgaagcaaaggacgggttatcttttttttttttctaagactcaaacttgggcacttgatcccttttcttggattgctttggaggagacgatttgctggcaacgttgggaacagtcaggactgtgttgtaactcttacttttaaagcgacagtagaggatcagactttttaaatgtttggaattcaagatactttaggaagaggaccaactctgaaagagaaatcgctgggcgcggagatggattcggtcaggtcctgggtccggaatgtcggagtggtggacgctaatgtcgccgcgcagagcggggtcgccctgtcccgggcccactttgagaaacagcctccttccaacttgaggaaatccaacttctttcacttcgtcctggcgctctatgacaggcagggccagccggtggagatcgagcggacggccttcgtggactttgtggagaatgacaaagaacaaggcaacgagaagaccaacaacggcactcactacaagttacagctcctctacagcaacggtgtccgcacggaacaggacctctatgtcaggctcatcgactcggtcaccaagcagcccatcgcttacgagggacagaataagaatccggaaatgtgccgagttctcctgacgcacgaagtgatgtgtagtcgatgctgcgaaaagaaaagctgtggaaaccgaaatgagactccatcggacccagtcataattgacagattctttttaaaatttttcctcaagtgcaatcagaattgtttgaaaacagcaggaaacccaagggacatgagacggtttcaggttgtgttgtcaacaacggtgaatgtggatggacacgtcctggctgtttctgacaacatgtttgttcataacaactccaagcatggacggagagcaagaagactcgatccatcggaagctaccccctgcatcaaagccattagcccgagtgaaggctggaccacaggaggagccatggtcatcatcatcggggacaacttctttgatggtctccaagtggtgtttgggactatgcttgtatggagcgagctaataacccctcatgccatcagagtacagactcctccccggcacatcccaggcgtggtagaggtgacattatcttataaatctaaacagttctgcaaaggagccccaggaaggttcatttacacagcattaaatgaacccaccatagactatggcttccagagactgcagaaggtcatccctaggcatcctggagatcctgagagattagctaaggagatgctgttgaaaagagctgcagatctagtggaagctctttatggcacaccacacaataaccaggacatcattttgaagcgagccgcagacattgctgaagctctctacagcgtccccaggaatcccagccagcttccagccctctctagctccccagcgcacagtggcatgatgggaatcaactcctatggcagccagcttggggtcagcatctcagagtcaacacaaggaaataatcaagggtacatccgcaacacaagcagcatctctccgcggggatactcttccagctccacgcctcaacagtctaattacagtacctccagcaacagtatgaatggctacagcaatgtccccatggccaacttgggtgttccaggttcaccaggatttctaaatggctcacccaccggctctccttatggaatcatgtcatcaagtcccaccgttgggtcttccagcacatcctccatcctcccattttcctcttcagtttttcctgctgtcaaacagaagagtgcctttgcccctgtcatcaggccccaaggctccccttcacctgcctgctccagcggcaatggaaatggattcagagccatgaccggacttgttgtacccccgatgtaaagaagaactgctttcttatagcacaaaactacttactctgatggaccaataatgaagaaagcactaggagctcttttgggggtgtagtggtgcccccacatgaacatgatggacacccttgggtctgcaaggagccagcatcttacttggtcccacgtcctcctatagctctgatggtggctacacaaactgaccctcttgggacaaggacaaaagatgtcattgacgtagtcagtgctaagagcagaaatgcaattctttgttatgaacattatgaaaaccaccttcctatgtttgtaaaatatttaagaaaaaattggcaaacaattaatgcttaatattttggatactatttgtttttctttgtaggaaaaaaaagttgaaagtttctattttctatgaagcctttcagataccaatttagtttatgcagaaaaaaattgaacaaaacagggtaccagcacggaagactttcttaaaacgcaacctgaattgaatgatgaaatgttgtatgtgtgtttgcttatagcttaatctctttaaaaaatgaacaaaaaaagggaaaaattttaaaatgttttacaattatttaaataaataaatgtgtaacttattgtaagtagaggtagaaattaagacctttttttggaagagagagggatttctcttcctgatgtaaaatgaaaatgatgcaaacatgtagtaacaagttttaaaggtgtgtgattattactgcagttacttactagattcttatcccctgtcctgcaccccctccttttccatcactttattgacccaagggcaagaacatgtagattcccacagaacaccctaatgcagaaacagacactctagcacatgcacaaatactccaacccatcaattcattcccagctccgtctgatttctaaatagtccacactcttgtgaatactttttaaaattcctattattagctttcaacgttctcccctgagcagtccagagaattcccatgtttgagtctgtctcaggctttcagcatcccaaggaaagaagcacctcaccttctagcagagccaaaaccacagactttcttaaccaagggaccccttgggaattcctcctcaccagaaccccaccactccctccgctttgggtgcctggttcagtacagaggtacacagccccatagaacttcagcaacacggtttggagaagataactctgtttgatggactctttagagtcagtcttagaacatccaagtcctttcctctccctgtcaatttccccttttatggcattaaactctcttgaaaaacatagctatgccactcgacagtttctagtcaagaatgagacggaatgtgggagagggatattaaaagccctaatcccctcttctgatgttcgaagaaaggcaagaccagattcttgggagatccagagattaggggcatctgcgttctatgcagcacagttacccagccctttgatgggctcttcatcgttttgtgactagctcttagaggggaagaaccttgccttagctgctaacagtggttgattcttgaaagcttatgtaatcctagagacatatccaggcatattgggattgccaataaagatgtcacttgtttccacgttggggttctccttattgactcatgagcaccacaatagagtctatacacagacttagtttggggttcttggttgggatttcagcattagaaatagatgcagcactcatggaaaaacatcatgagtgcatctgagccaattttagatgatttcattaattctgcataccttctctttgacccattgatgcaggcccacatctatccagccccaactgtcttatttgcctttaacccattctggaattacccagtatgacttatattatttctatgcacatgagaatccaaggttttagaaacctggcatgcttataactactgctgacagtccctcatagtcagggcttaaagcgccaaaatacacggaaacataagagaaaaagtcccccagtgagaaacctgattgatggaaggggaagaatgtgtggaatatgaatgttaccttccaaaagtgaaggcagagcaaaattaagcatgtttagccctggatttgagccaatccaacataaggaaattttgttttttttaagtagcattgcttttagaacctgtgaattttccttttgcatgaagatgagtgcagtactgtcttcaaaatgattgtagaatttcttggtagctttacaccgaaaaatgcgtgtaactaaataccagacatcttgaccattcagctagaaccctggcagcaacagagctatttaattgtacaaatgtgtgtaaggattatttttagtgtactaataaattaaaaacaaagctaccctgtcctcgttagtcattgctattcaatcattccagtcccaagttatttttgtgccacttggaatatgagtatttctattggtaactacaaactctatcctgtgtttgtaagaggagctgtgtaagatttttttcatttaaagggacaatttacttcattatttatctttcttttgttatagcgttgtaattcttctcagtttttctttgcacatttcaatatgcatggtttaaaaaccattaacttctctaccttttgtacagtaaggtttcattttcacactgtatagtttcattttattgttttgctttgtcagttatatacagtataaagttgctatgcacagagctttttgtaaagacagcttttttgtttactgtttttaatggtcttacttaaagaatatcttgtttgtaaaatgaatatgtctacttcagttttaaactttaaattatcctaacaaaaaaataaaatttttgtactgt

SEQ ID NO: 212828 - DNA, 1017 bp, Artificial Sequence
  derived and/or modified sequence
atggtcatcatcatcggggacaacttctttgatggtctccaagtggtgtttgggactatgcttgtatggagcgagctaataacccctcatgccatcagagtacagactcctccccggcacatcccaggcgtggtagaggtgacattatcttataaatctaaacagttctgcaaaggagccccaggaaggttcatttacacagcattaaatgaacccaccatagactatggcttccagagactgcagaaggtcatccctaggcatcctggagatcctgagagattagctaaggagatgctgttgaaaagagctgcagatctagtggaagctctttatggcacaccacacaataaccaggacatcattttgaagcgagccgcagacattgctgaagctctctacagcgtccccaggaatcccagccagcttccagccctctctagctccccagcgcacagtggcatgatgggaatcaactcctatggcagccagcttggggtcagcatctcagagtcaacacaaggaaataatcaagggtacatccgcaacacaagcagcatctctccgcggggatactcttccagctccacgcctcaacagtctaattacagtacctccagcaacagtatgaatggctacagcaatgtccccatggccaacttgggtgttccaggttcaccaggatttctaaatggctcacccaccggctctccttatggaactggactttggctcacgtggttactcaaggccttttggggaaagaaaaggattgaaacaattccgtttttatagagaaagagcatgtgtggcctgttcatgtcatcaagtcccaccgttgggtcttccagcacatcctccatcctcccattttcctcttcagtttttcctgctgtcaaacagaagagtgcctttgcccctgtcatcaggccccaaggctccccttcacctgcctgctccagcggcaatggaaatggattcagagccatgaccggacttgttgtacccccgatgtaa

SEQ ID NO: 212829 - protein, 1944 aa, Artificial Sequence
  derived and/or modified sequence
MSNFYEERTTMIAARDLQEFVPFGRDHCKHHPNALNLQLRQLQPASELWSSDGAAGLVGSLQEVTIHEKQKESWQLRKGVSEIGEDVDYDEELYVAGNMVIWSKGSKSQALAVYKAFTVDSPVQQALWCDFIISQDKSEKAYSSNEVEKCICILQSSCINMHSIEGKDYIASLPFQVANVWPTKYGLLFERSASSHEVPPGSPREPLPTMFSMLHPLDEITPLVCKSGSLFGSSRVQYVVDHAMKIVFLNTDPSIVMTYDAVQNVHSVWTLRRVKSEEENVVLKFSEQGGTPQNVATSSSLTAHLRSLSKGDSPVTSPFQNYSSIHSQSRSTSSPSLHSRSPSISNMAALSRAHSPALGVHSFSGVQRFNISSHNQSPKRHSISHSPNSNSNGSFLAPETEPIVPELCIDHLWTETITNIREKNSQASKVFITSDLCGQKFLCFLVESQLQLRCVKFQESNDKTQLIFGSVTNIPAKDAAPVEKIDTMLVLEGSGNLVLYTGVVRVGKVFIPGLPAPSLTMSNTMPRPSTPLDGVSTPKPLSKLLGSLDEVVLLSPVPELRDSSKLHDSLYNEDCTFQQLGTYIHSIRDPVHNRVTLELSNGSMVRITIPEIATSELVQTCLQAIKFILPKEIAVQMLVKWYNVHSAPGGPSYHSEWNLFVTCLMNMMGYNTDRLAWTRNFDFEGSLSPVIAPKKARPSETGSDDDWEYLLNSDYHQNVESHLLNRSLCLSPSEASQMKDEDFSQNLSLDSSTLLFTHIPAIFFVLHLVYEELKLNTLMGEGICSLVELLVQLARDLKLGPYVDHYYRDYPTLVRTTGQVCTIDPGQTGFMHHPSFFTSEPPSIYQWVSSCLKGEGMPPYPYLPGICERSRLVVLSIALYILGDESLVSDESSQYLTRITIAPQKLQVEQEENRFSFRHSTSVSSLAERLVVWMTNVGFTLRDLETLPFGIALPIRDAIYHCREQPASDWPEAVCLLIGRQDLSKQACEGNLPKGKSVLSSDVPSGTETEEEDDGMNDMNHEVMSLIWSEDLRVQDVRRLLQSAHPVRVNVVQYPELSDHEFIEEKENRLLQLCQRTMALPVGRGMFTLFSYHPVPTEPLPIPKLNLTGRAPPRNTTVDLNSGNIDVPPNMTSWASFHNGVAAGLKIAPASQIDSAWIVYNKPKHAELANEYAGFLMALGLNGHLTKLATLNIHDYLTKGHEMTSIGLLLGVSAAKLGTMDMSITRLLSIHIPALLPPTSTELDVPHNVQVAAVVGIGLVYQGTAHRHTAEVLLAEIGRPPGPEMEYCTDRESYSLAAGLALGMVCLGHGSNLIGMSDLNVPEQLYQYMVGGHRRFQTGMHREKHKSPSYQIKEGDTINVDVTCPGATLALAMIYLKTNNRSIADWLRAPDTMYLLDFVKPEFLLLRTLARCLILWDDILPNSKWVDSNVPQIIRENSISLSEIELPCSEDLNLETLSQAHVYIIAGACLSLGFRFAGSENLSAFNCLHKFAKDFMTYLSAPNASVTGPHNLETCLSVVLLSLAMVMAGSGNLKVLQLCRFLHMKTGGEMNYGFHLAHHMALGLLFLGGGRYSLSTSNSSIAALLCALYPHFPAHSTDNRYHLQALRHLYVLAAEPRLLVPVDVDTNTPCYALLEVTYKGTQWYEQTKEELMAPTLLPELHLLKQIKVKGPRYWELLIDLSKGTQHLKSILSKDGVLYVKLRAGQLSYKEDPMGWQSLLAQTVANRNSEARAFKPETISAFTSDPALLSFAEYFCKPTVNMGQKQEILDLFSSVLYECVTQETPEMLPAYIAMDQAIRRLGRREMSETSELWQIKLVLEFFSSRSHQERLQNHPKRGLFMNSEFLPVVKCTIDNTLDQWLQVGGDMCVHAYLSGQPLEESQLSMLACFLVYHSVPAPQHLPPIGLEGSTSFAELLFKFKQLKMPVRALLRLAPLLLGNPQPMVM

SEQ ID NO: 212830 - DNA, 5835 bp, Artificial Sequence
  derived and/or modified sequence
atgagcaacttctacgaggagagaaccaccatgatcgccgccagagacctgcaggagttcgtgcccttcggcagagaccactgcaagcaccaccccaacgccctgaacctgcagctgagacagctgcagcccgccagcgagctgtggagcagcgacggcgccgccggcctggtgggcagcctgcaggaggtgaccatccacgagaagcagaaggagagctggcagctgagaaagggcgtgagcgagatcggcgaggacgtggactacgacgaggagctgtacgtggccggcaacatggtgatctggagcaagggcagcaagagccaggccctggccgtgtacaaggccttcaccgtggacagccccgtgcagcaggccctgtggtgcgacttcatcatcagccaggacaagagcgagaaggcctacagcagcaacgaggtggagaagtgcatctgcatcctgcagagcagctgcatcaacatgcacagcatcgagggcaaggactacatcgccagcctgcccttccaggtggccaacgtgtggcccaccaagtacggcctgctgttcgagagaagcgccagcagccacgaggtgccccccggcagccccagagagcccctgcccaccatgttcagcatgctgcaccccctggacgagatcacccccctggtgtgcaagagcggcagcctgttcggcagcagcagagtgcagtacgtggtggaccacgccatgaagatcgtgttcctgaacaccgaccccagcatcgtgatgacctacgacgccgtgcagaacgtgcacagcgtgtggaccctgagaagagtgaagagcgaggaggagaacgtggtgctgaagttcagcgagcagggcggcaccccccagaacgtggccaccagcagcagcctgaccgcccacctgagaagcctgagcaagggcgacagccccgtgaccagccccttccagaactacagcagcatccacagccagagcagaagcaccagcagccccagcctgcacagcagaagccccagcatcagcaacatggccgccctgagcagagcccacagccccgccctgggcgtgcacagcttcagcggcgtgcagagattcaacatcagcagccacaaccagagccccaagagacacagcatcagccacagccccaacagcaacagcaacggcagcttcctggcccccgagaccgagcccatcgtgcccgagctgtgcatcgaccacctgtggaccgagaccatcaccaacatcagagagaagaacagccaggccagcaaggtgttcatcaccagcgacctgtgcggccagaagttcctgtgcttcctggtggagagccagctgcagctgagatgcgtgaagttccaggagagcaacgacaagacccagctgatcttcggcagcgtgaccaacatccccgccaaggacgccgcccccgtggagaagatcgacaccatgctggtgctggagggcagcggcaacctggtgctgtacaccggcgtggtgagagtgggcaaggtgttcatccccggcctgcccgcccccagcctgaccatgagcaacaccatgcccagacccagcacccccctggacggcgtgagcacccccaagcccctgagcaagctgctgggcagcctggacgaggtggtgctgctgagccccgtgcccgagctgagagacagcagcaagctgcacgacagcctgtacaacgaggactgcaccttccagcagctgggcacctacatccacagcatcagagaccccgtgcacaacagagtgaccctggagctgagcaacggcagcatggtgagaatcaccatccccgagatcgccaccagcgagctggtgcagacctgcctgcaggccatcaagttcatcctgcccaaggagatcgccgtgcagatgctggtgaagtggtacaacgtgcacagcgcccccggcggccccagctaccacagcgagtggaacctgttcgtgacctgcctgatgaacatgatgggctacaacaccgacagactggcctggaccagaaacttcgacttcgagggcagcctgagccccgtgatcgcccccaagaaggccagacccagcgagaccggcagcgacgacgactgggagtacctgctgaacagcgactaccaccagaacgtggagagccacctgctgaacagaagcctgtgcctgagccccagcgaggccagccagatgaaggacgaggacttcagccagaacctgagcctggacagcagcaccctgctgttcacccacatccccgccatcttcttcgtgctgcacctggtgtacgaggagctgaagctgaacaccctgatgggcgagggcatctgcagcctggtggagctgctggtgcagctggccagagacctgaagctgggcccctacgtggaccactactacagagactaccccaccctggtgagaaccaccggccaggtgtgcaccatcgaccccggccagaccggcttcatgcaccaccccagcttcttcaccagcgagccccccagcatctaccagtgggtgagcagctgcctgaagggcgagggcatgcccccctacccctacctgcccggcatctgcgagagaagcagactggtggtgctgagcatcgccctgtacatcctgggcgacgagagcctggtgagcgacgagagcagccagtacctgaccagaatcaccatcgccccccagaagctgcaggtggagcaggaggagaacagattcagcttcagacacagcaccagcgtgagcagcctggccgagagactggtggtgtggatgaccaacgtgggcttcaccctgagagacctggagaccctgcccttcggcatcgccctgcccatcagagacgccatctaccactgcagagagcagcccgccagcgactggcccgaggccgtgtgcctgctgatcggcagacaggacctgagcaagcaggcctgcgagggcaacctgcccaagggcaagagcgtgctgagcagcgacgtgcccagcggcaccgagaccgaggaggaggacgacggcatgaacgacatgaaccacgaggtgatgagcctgatctggagcgaggacctgagagtgcaggacgtgagaagactgctgcagagcgcccaccccgtgagagtgaacgtggtgcagtaccccgagctgagcgaccacgagttcatcgaggagaaggagaacagactgctgcagctgtgccagagaaccatggccctgcccgtgggcagaggcatgttcaccctgttcagctaccaccccgtgcccaccgagcccctgcccatccccaagctgaacctgaccggcagagccccccccagaaacaccaccgtggacctgaacagcggcaacatcgacgtgccccccaacatgaccagctgggccagcttccacaacggcgtggccgccggcctgaagatcgcccccgccagccagatcgacagcgcctggatcgtgtacaacaagcccaagcacgccgagctggccaacgagtacgccggcttcctgatggccctgggcctgaacggccacctgaccaagctggccaccctgaacatccacgactacctgaccaagggccacgagatgaccagcatcggcctgctgctgggcgtgagcgccgccaagctgggcaccatggacatgagcatcaccagactgctgagcatccacatccccgccctgctgccccccaccagcaccgagctggacgtgccccacaacgtgcaggtggccgccgtggtgggcatcggcctggtgtaccagggcaccgcccacagacacaccgccgaggtgctgctggccgagatcggcagaccccccggccccgagatggagtactgcaccgacagagagagctacagcctggccgccggcctggccctgggcatggtgtgcctgggccacggcagcaacctgatcggcatgagcgacctgaacgtgcccgagcagctgtaccagtacatggtgggcggccacagaagattccagaccggcatgcacagagagaagcacaagagccccagctaccagatcaaggagggcgacaccatcaacgtggacgtgacctgccccggcgccaccctggccctggccatgatctacctgaagaccaacaacagaagcatcgccgactggctgagagcccccgacaccatgtacctgctggacttcgtgaagcccgagttcctgctgctgagaaccctggccagatgcctgatcctgtgggacgacatcctgcccaacagcaagtgggtggacagcaacgtgccccagatcatcagagagaacagcatcagcctgagcgagatcgagctgccctgcagcgaggacctgaacctggagaccctgagccaggcccacgtgtacatcatcgccggcgcctgcctgagcctgggcttcagattcgccggcagcgagaacctgagcgccttcaactgcctgcacaagttcgccaaggacttcatgacctacctgagcgcccccaacgccagcgtgaccggcccccacaacctggagacctgcctgagcgtggtgctgctgagcctggccatggtgatggccggcagcggcaacctgaaggtgctgcagctgtgcagattcctgcacatgaagaccggcggcgagatgaactacggcttccacctggcccaccacatggccctgggcctgctgttcctgggcggcggcagatacagcctgagcaccagcaacagcagcatcgccgccctgctgtgcgccctgtacccccacttccccgcccacagcaccgacaacagataccacctgcaggccctgagacacctgtacgtgctggccgccgagcccagactgctggtgcccgtggacgtggacaccaacaccccctgctacgccctgctggaggtgacctacaagggcacccagtggtacgagcagaccaaggaggagctgatggcccccaccctgctgcccgagctgcacctgctgaagcagatcaaggtgaagggccccagatactgggagctgctgatcgacctgagcaagggcacccagcacctgaagagcatcctgagcaaggacggcgtgctgtacgtgaagctgagagccggccagctgagctacaaggaggaccccatgggctggcagagcctgctggcccagaccgtggccaacagaaacagcgaggccagagccttcaagcccgagaccatcagcgccttcaccagcgaccccgccctgctgagcttcgccgagtacttctgcaagcccaccgtgaacatgggccagaagcaggagatcctggacctgttcagcagcgtgctgtacgagtgcgtgacccaggagacccccgagatgctgcccgcctacatcgccatggaccaggccatcagaagactgggcagaagagagatgagcgagaccagcgagctgtggcagatcaagctggtgctggagttcttcagcagcagaagccaccaggagagactgcagaaccaccccaagagaggcctgttcatgaacagcgagttcctgcccgtggtgaagtgcaccatcgacaacaccctggaccagtggctgcaggtgggcggcgacatgtgcgtgcacgcctacctgagcggccagcccctggaggagagccagctgagcatgctggcctgcttcctggtgtaccacagcgtgcccgccccccagcacctgccccccatcggcctggagggcagcaccagcttcgccgagctgctgttcaagttcaagcagctgaagatgcccgtgagagccctgctgagactggcccccctgctgctgggcaacccccagcccatggtgatgtag

SEQ ID NO: 212831 - DNA, 8259 bp, Artificial Sequence
  derived and/or modified sequence
tcccaaagtgctgggattacaggcgcgagtggccgctggggttcttaacttgggtctttgaatcgccttaagaagtgtctctgaatctgggaattgcaagcaacgtttctgtgaggaccttcacacagttcatccactcttcgaagagtatggaccgaaaaaggcatagagcattcactgcacgtagagaaaatcagcaacccctgctccccaccctcagcctgaggtgcctacctccacgtggggtcaggaggcggaagcgaaaccagaagaaaaaaccctgagatctataaggcagttcaggtccctagtgacatgagctaaagagaacttggacgccaggactgtagcagacagagtccggcttcggggttcgcatcagtcgcacggaaggtggaaatagcccccaagttgtaacccgccgcggtcttccctcaacagcgcaggcgccaggactgctaggacgccgcgcacctcccgcgatgccccgccccggcgcgaggcaagacgggaaagtcaagatggacgcgtccatttgaacgtctcgcacgccttcctgccattagcactcgagcccgctgctgttgcccgttcttcctccagaataggggagggagagggaatgagaagctgctgcggcccaagagtcactgtgaaggaccccgccgctgccctcgggcctcctcggcccctgcgcctccggggagcagccggggctcgccgcgcctgacgcgtcccgagttatacagaaataatgttgatatttggaacccatgtcgaacttctatgaagaaaggacaacgatgattgcagcaagggatttgcaggaatttgttccttttggtcgagaccactgcaagcaccaccctaatgctttgaaccttcaacttcgccagctgcagccagcttctgaattatggtcttctgatggtgctgctggcttggtgggatcccttcaggaggttacaatccacgagaaacagaaggaaagctggcagttaaggaaaggagtaagtgaaattggagaagatgtggactatgatgaggaactctatgttgctggaaatatggtgatatggagcaaaggaagtaaaagccaggcattggcagtttataaagcatttacagttgacagtcctgttcagcaggcattgtggtgtgacttcattatatcacaggataagtctgaaaaggcctacagtagcaatgaagtagaaaaatgcatatgtatattgcaaagctcatgtattaacatgcatagcatagaaggaaaggattacatagcttcattaccatttcaggttgcaaatgtttggcccactaaatatggattgctgtttgaacgaagcgcttcttcacatgaagtacctccaggttcacccagagaacctttacctactatgttcagcatgctgcacccactagatgaaataactccacttgtttgtaaatctggaagtctttttggttcatcacgggtgcaatatgttgtagatcatgcaatgaaaattgttttcctcaatactgacccctctattgtaatgacttatgatgctgttcaaaatgtgcattctgtgtggactctccggagagtcaaatcagaggaagagaatgttgttttaaagttctctgaacaggggggaaccccacagaatgtggccactagcagctccctcacagcacatctcagaagcctctccaaaggagattcccctgtgacttcacctttccagaattactcctccattcacagccagagtcgctcaacctcatcacccagtctacattctcgctcaccttctatttccaacatggcagctctaagtcgtgctcattctcctgcgttaggagtgcactctttttcaggggtgcaaaggttcaacatttcaagccataatcagtctccaaagagacatagtatttctcattctccaaatagtaattctaatggctcctttcttgcaccagaaacggagccaattgttcctgaactgtgtattgaccatttgtggacagaaacgattactaatataagagagaaaaattcacaagcctcaaaagtgtttattacatctgacctatgtgggcaaaagttcctgtgctttttagtagagtcccagctccagttacgctgtgtaaagtttcaagagagtaatgataaaacccagctcatctttggttcagtgaccaacataccagcaaaggatgcagcaccagtggagaaaatagacaccatgctggtcttggaaggcagtggaaacctggtgctatacacaggagtggttcgggtgggaaaggtttttattcctggactgccagctccctctctgacgatgtccaacacaatgcctcggcccagtactccactagatggcgttagtactccaaagcctcttagtaaactccttggatcattggacgaggttgttctgttgtccccagttccagaactgagggattcttcaaaacttcatgattctctctataatgaggattgtactttccaacagcttggaacttacattcattctatcagagatcctgtccataacagagtcaccctggaactgagtaatggctccatggttaggatcactattcctgaaattgccacctctgagttagtacaaacgtgtttgcaagcaattaagtttatcctgccaaaagaaatagcagttcagatgcttgtcaagtggtacaatgtccacagtgctccaggaggacccagttatcactcagagtggaatttatttgtgacttgtctcatgaacatgatgggttataacacagaccgcttagcatggactagaaattttgactttgaaggatcactttctcctgtcattgcgcccaaaaaagcaaggccttccgagactggatctgatgatgactgggaatatttactaaattcagactaccaccagaatgttgagtctcatcttttgaacagatctttatgtctgagtccttcagaagcttcacagatgaaggatgaggatttttcacagaatctcagtctggattcttctacacttctctttactcacatacctgcaatttttttcgttcttcaccttgtgtatgaggagcttaagttgaatactctaatgggagaaggaatttgttcacttgttgaacttctcgttcagttggcaagggacttaaaattggggccttatgtagatcattactatagagactacccaacgcttgtcagaactactggacaagtgtgcacaattgatccaggtcaaacaggatttatgcatcatccatcattttttacgtctgagccaccaagtatttatcagtgggtgagttcttgtctgaagggtgaaggaatgccaccttatccttacctccctggaatctgtgaaagaagcagacttgtagtcttgagtattgcactgtacatacttggtgatgagagcttggtttctgatgaatcctcacagtatttaaccagaataactatagccccccagaagttgcaagtagaacaagaggaaaacaggtttagtttcaggcattctacatctgtttctagtctagctgaaagattggttgtctggatgactaatgtaggattcactttaagagatttggaaactcttccctttggaattgctcttcccatcagagatgcaatttatcactgtcgtgagcagcctgcctcagactggccagaagctgtctgtctcttgattggacgtcaggatctttccaagcaggcctgcgaaggaaacttacccaaagggaagtctgtgctctcatcagatgttccttcaggaacagaaactgaggaggaagatgacggcatgaatgacatgaatcacgaggtcatgtcattaatatggagtgaagatttaagggtgcaggatgtgcgaaggcttcttcagagtgcgcatcctgtccgtgtcaacgtagtgcagtacccagagctcagtgaccacgagttcatcgaggaaaaggaaaacagattgctccaattgtgtcagcgaactatggctcttcctgtaggacgaggaatgtttaccttgttttcgtaccatcctgttccaacagagccattgcctattcctaaattgaatctgactgggcgtgcccctcctcggaacacaacagtagaccttaatagtggaaacatcgatgtgcctcccaacatgacaagctgggccagctttcataatggtgtggctgctggcctgaagatagctcctgcctcccagatcgactcagcttggattgtttacaataagcccaagcatgctgagttggccaatgagtatgctggctttctcatggctctgggtttgaatgggcaccttaccaagctggcgactctcaatatccatgactacttgaccaagggccatgaaatgacaagcattggactgctacttggtgtttctgctgcaaaactaggcaccatggatatgtctattactcggcttcttagcattcacattcctgctctcttacccccaacgtccacagagctggatgttcctcacaatgtccaagtggctgcagtggttggcattggccttgtatatcaagggacagctcacagacatactgcagaagtcctgttggctgagataggacggcctcctggtcctgaaatggaatactgcactgacagagagtcatactccttagctgctggcttggccctgggcatggtctgcttggggcatggcagcaatttgataggtatgtctgatctcaatgtgcctgagcagctctatcagtacatggttggaggacataggcgctttcaaacaggaatgcatagggagaaacataaatcaccaagttatcaaatcaaagaaggagataccataaatgtggatgtgacttgtccaggtgctactctagctttggctatgatctacttaaaaaccaataacagatctattgcagattggctccgagcccctgacaccatgtatttgttggactttgtgaagccagaatttctcttgcttaggacacttgctcgatgcctgattttgtgggatgatattttaccaaattccaagtgggttgacagcaatgttcctcaaattataagagaaaatagtatctctctcagtgaaatcgaattgccgtgctcagaggatttgaatttggaaactttgtcccaagcacatgtctacataattgcaggagcctgcttgtctctgggttttcgatttgctggctcagaaaacttatcagcatttaactgtttgcataaatttgccaaagattttatgacttatttgtccgcacctaatgcttctgttacaggtcctcataacctagaaacttgtctgagcgtggtgctgctgtctctcgccatggtcatggctggctcaggaaacctaaaggttttgcagctttgtcgcttcttacacatgaaaacgggtggtgaaatgaactatggttttcacttagcccaccacatggcccttggacttctatttttgggaggaggaaggtactctttgagcacatcaaattcttccattgccgctcttctctgtgccctttatccgcacttcccagctcacagcactgacaaccggtatcatctccaggctctccggcacctctatgtgctggccgcggagcccaggcttctagtgcctgtggatgtggacacaaacacgccctgctatgccctcttagaagttacctacaagggcactcagtggtatgaacaaaccaaagaagaattgatggctcctacccttcttccagaactccatcttttaaagcagattaaagtaaaaggcccaagatactgggaactgctcatagatttaagcaaaggaacacaacacttgaagtccatcctttccaaggatggggttttatatgttaaactccgggcgggtcagctctcctacaaagaagatccaatgggatggcaaagtttgttggctcagactgttgctaacaggaactctgaagcccgggctttcaagccagaaacaatctcagcattcacttctgatccagcacttctgtcatttgctgaatatttctgcaagccaactgtgaacatgggtcagaaacaggaaattctggatctcttttcttcagtactctatgaatgtgttacccaggagaccccagagatgttgcctgcatacatcgcaatggatcaggctataagaagacttgggagaagagaaatgtctgagacttctgaactttggcagataaagttggtgttagagtttttcagctcccgaagccatcaggagcggctgcagaaccaccctaagcgggggctctttatgaactcggaattcctccctgttgtgaagtgcaccattgataataccctggaccagtggctacaagtcgggggtgatatgtgtgtgcacgcctacctcagcgggcagcccttggaggaatcacagctgagcatgctggcctgcttcctcgtctaccactctgtgccagctccacagcacctgccacctataggactagaagggagcacaagctttgctgaactgctcttcaaatttaagcagctaaaaatgccagtgcgagctttgctgagattggctcctttgcttcttggaaatccacagccaatggtgatgtgaccgtgtctggcggtgaacctaccctgaaacgtgacttctgcacaacaaacgtgaccaaacatcaaagctaaagcaatgtttataaagttttatggtataactagggggaaatgagctgcacaaacctcaatgtattttaaatctgttgctgtcatcattaacggtatatgacatataaaagcaagttaaaatttacttttgtaaataaagtttttggtttgtttccaaaactcttgatgattgctttagttttggacttagagaatagagcaggggttgctggagtgaatattgatttttaaagtctttgaactgtggtggtataggtgaagtgactatgcccaaaaatgccaagttttaaaagaagctatgtcataaagttttactttctgtggcaaaagagcgctttagcatttcctcagatgtcacagttgtcctgtctaaaataagtttgtacttctggtgacaatgccagacactcttatgatgtgatcaccttaaacaggagaaggagatttttgccctcagttgctcaacatgaagtactgtggactgaattgtgtcctcccagaattatatattgaggccctaatccctgtgtgactgtattaggcaatagggcatataggagattactaaggttaagtgaggtcatcataagggtggggccttaattcagtagaattggtggcctcctaagcagaggaagagagatttttctttctctctctgccatgtgaagacagtgaggagtcggccgtctgcaagccaagaagagcccttatcaggaacagacttggctagcaccttcatcgtggacctccagcctccagaattgcaagaaaatacatttccgtcgttgaaaccacccagtctgtggtattttgttatggcagcccaggcagactaatacgtgaagcctgctctaaatagataaaataagaaattactacagagggctctttagaaattgtatttaaaaacaagacaatccatatttacctaagatttacagaatgtatgtctataaaaggagggatttctggactagatgatgatgaaaaatgttcatataaaggcacctccagcttcgagttgccaacacaggaggaagaatgctccctgctgttcagatgctgatatgtgtcctgtgcttcctggatggccagtgggatcataagctggtagaagcaagaccttcatccactgacttcatatttcttccacatcctgaactgtggtgtttgactttaaaaataaattaaagcaaatagaaatgtttccattgagattttggcaaaaacccacatgacatttgcgtctgcagagtagacttggaaggcatgcacctggaggccaagtggtattctctggactctctgtccttgcatttgcgtggctgccccgaggactcgcttcttcctggatgtgaagcagaggcacgatggggctgactgagaggctgaaatgtgcttctcttcacagttacatagttttcttctaattaaaaataaattttaagtggtagattatgaaaattccatttgaatcaagattttaaaaattcaatatcaaaccagttgttactgtcttcactctccgttgtttacgattgtgtgcttttcctgaataaagaatgactggagagaca

SEQ ID NO: 212832 - DNA, 5835 bp, Artificial Sequence
  derived and/or modified sequence
atgtcaaacttctacgaggaacgtacaacgatgattgcggctcgtgatctgcaggagtttgttccctttgggcgcgaccactgtaagcaccacccaaacgctctgaatctacaattacggcagttacagccagcctctgagctctggagcagcgacggcgctgcaggattagtcggctccctccaggaagtgaccatccacgaaaagcagaaggaaagctggcagctgcgcaagggggtaagtgaaattggcgaagatgtcgattacgatgaggagttgtacgttgcaggcaatatggtgatttggagcaaagggagtaagagccaggctttagctgtctacaaagcctttacagtagattcccctgtgcagcaagctctgtggtgtgattttattatatctcaggataagtccgaaaaggcctattcgtctaacgaggtggaaaaatgcatttgtattttgcagtcctcttgcatcaatatgcactctatcgagggaaaagactacattgcctcacttccctttcaggtcgcaaatgtatggcccaccaaatatggcctgctgttcgaaagatccgcaagttcacacgaggtgccaccggggtcccctagagagccgttgcccactatgttcagcatgcttcatcctctcgacgaaattacccccctcgtatgtaagagcgggtccctcttcggcagctcccgcgtgcagtacgtggtcgaccatgctatgaagattgtgtttctgaataccgacccaagcattgtcatgacctacgatgctgtgcagaatgtgcactccgtgtggacattgcggcgcgttaagtctgaagaagagaatgttgtccttaagtttagcgaacaggggggcacacctcagaacgtggctacgagctcctcgttgaccgcccacctgagatctctcagcaaaggggattctcccgtaactagtccattccagaattattccagcatccactctcagagtagatcaacatcgtcccccagtctgcacagtcgatcacctagcatcagcaatatggcagctctgtcccgcgctcattcgccggcattaggcgtccattccttctccggagttcaacggtttaacatctcaagccacaaccagagccctaaacgacacagcatttctcatagtcctaactccaattcaaacggaagcttcctggcgccggagacggaacctattgtccctgagttgtgtatagaccacttatggaccgagacaatcaccaatatcagagaaaaaaactctcaggccagcaaagtcttcattacgtccgacttgtgtggacaaaagttcttgtgcttccttgtcgagagtcagttacaattgagatgcgttaagttccaggaaagcaacgataagactcagcttatatttggcagtgttaccaacataccagctaaagacgctgcacccgtcgagaagatcgatacaatgctggtgctggaggggtccggcaatttagtgctgtacacaggtgtggtgcgagtcggtaaggtgtttatcccgggactgccagcaccctccttgaccatgagcaatacaatgccacgcccaagcacccccctggacggagttagtacgcccaaaccactttccaagctgctgggctccctggatgaggtggtcctgctcagccccgtgccagaactacgcgatagttctaaattacatgacagcctctacaacgaggattgcaccttccaacagctgggaacctatatccattcaatcagagatcctgtacataatcgggtgacgctggagcttagtaatggcagcatggtaaggatcactatccccgagattgccactagcgagttagtccagacttgtttacaggcgatcaagtttatcctccccaaggaaatcgccgtgcagatgctggtcaagtggtataatgttcatagcgcaccaggcggcccctcataccactcagagtggaatttatttgttacatgcctcatgaacatgatgggatataatactgaccgactcgcttggacccggaatttcgacttcgaaggcagcctgtccccagttatcgcccccaaaaaggcgcggccttccgagacaggatccgatgacgactgggagtatcttctgaactctgactatcatcagaatgttgagtcccacctgttgaacaggtcattgtgtctgtccccgagcgaggcctcccagatgaaggatgaggacttcagtcagaacctgagcctggactcctccactttactgttcacccacatcccggcaatcttctttgtgctgcatttagtgtacgaggagttaaagctgaacaccttgatgggtgaggggatatgttctcttgtggaactgttagtgcagctggcgcgggacctcaagctgggaccctacgtggaccattactaccgggactatcccaccttagtccgcacaaccggccaggtgtgtaccattgaccctggtcaaacaggattcatgcaccacccgagcttctttacctctgaacctccttcaatctatcagtgggtcagttcatgtcttaaaggcgaaggcatgcctccctacccgtatctgccgggcatttgcgaacggtcacggttagtggtgctgtctattgccttgtacattctcggagatgagtcgctggtctctgatgagagctctcagtatctgacgcgcattacaatcgcgccgcagaaactacaggtggagcaagaggagaataggttttcctttcggcatagcacatcagtttcctccctggctgaaaggctcgtggtgtggatgactaacgtgggctttacactgcgcgatctcgagacattacccttcggtatagcattgcccatcagagacgccatttaccattgtcgcgaacagcctgcctcggactggccagaagcagtttgcctgttaatcggcagacaggatttgtcaaagcaggcctgcgagggcaacttgcccaaagggaagagcgttttatcgtctgacgtgccttcggggactgagaccgaggaggaggacgatgggatgaacgacatgaaccatgaggtgatgtctctaatttggagcgaggacctaagggtgcaggatgttcggcgcctgctccaatctgcacaccctgtgagggtcaacgtagtacagtaccctgagctgtcagaccacgaatttatagaggaaaaagagaatcgcttgttgcaactgtgtcaacgaacgatggcactacctgtaggaagaggtatgtttactcttttctcgtatcatcccgtgcctactgagcccctgccaataccaaagctgaacctcaccggtagagctcctccaagaaatactactgtcgacctcaactccggaaacatcgatgtgcctcctaatatgacaagctgggcatcattccacaacggggtagcagccggcctgaagattgcgccagcatcccagattgacagtgcctggatcgtctataataaacccaaacacgctgaactggccaacgaatatgcaggtttccttatggcgcttggcctgaacgggcatctgacgaagttggcaacccttaatatccacgattatctgaccaaagggcacgagatgacgagcattgggttactgctgggtgttagcgcggcgaaactggggacgatggatatgtccattactcgtttgctgtcaattcatattccggcattgctgcctcccacctccacagagttggacgtcccccataacgtccaggtggccgctgtcgtcggtataggtctcgtttatcagggcactgctcatcgtcataccgctgaggttctgctcgccgaaattgggcgcccacccgggccagagatggagtattgcaccgaccgggagtcctacagtctggctgccggacttgctctcggaatggtgtgtctgggccatgggagcaatctgatcggaatgagcgatctgaacgttcccgaacaactataccaatacatggtcggaggccacaggaggttccagaccggcatgcacagagagaaacacaaaagtcccagctaccagatcaaggagggagacactatcaatgtcgatgtaacttgccctggtgccactcttgcactagccatgatctatctaaaaacaaacaatagaagcatcgccgactggctgcgggcccctgacaccatgtatctcttggactttgtgaagccagaatttctcttattgcgaactctcgcgcgatgcttaatcctctgggatgatatccttcccaactcaaagtgggtcgacagcaacgtgccgcagattattcgggagaatagcattagcctgagcgaaatcgagctcccctgtagcgaggatctgaacttggagacattgtcacaagcccatgtgtatattattgccggtgcttgtttgtccctaggcttccggttcgccggtagtgagaacctcagtgcattcaattgcctgcataagtttgctaaggatttcatgacctacttaagcgcacctaacgcgtcggttactgggccacacaatctggagacctgtttgagcgtcgtcctgctatctttagctatggtgatggctggtagcgggaacctgaaggttctacagctgtgccgattcctgcacatgaagaccgggggggaaatgaactacggattccacttagcccatcacatggcattgggtttgctgtttttgggcggcggcagatatagtctgtcaacatcgaactcgtctattgcagctctgctgtgcgccttatatccacatttccccgcccactcgaccgacaacaggtaccacctccaggccctgaggcacctctacgttctggccgccgaacctcgtttactggtgccagtggatgtcgacactaacactccatgctatgcactcctcgaggttacctacaaaggaacccagtggtatgagcaaacgaaagaagaactaatggctcccaccctcttgcccgaactgcacctgctcaaacagattaaggttaaaggacccaggtattgggaactccttatcgatttgagcaaagggacacagcaccttaagagtatcttgagtaaggatggtgtcttgtacgtcaagctgagggccgggcagttatcatataaggaagacccgatgggatggcaatctttactggctcaaacagtagccaatcgtaatagtgaggcgagggcttttaagccagaaacgattagcgcgttcactagcgatcccgccctgctgtcattcgccgagtacttttgtaagcccactgttaacatgggacaaaaacaggagattctagatctcttttctagtgtgctgtatgagtgcgtgactcaggagactcctgagatgctcccagcatacatcgccatggatcaggccataagacgactgggcaggcgcgagatgtccgaaacaagtgaactctggcaaataaagctggtgctggaattcttctcgtccagatcgcaccaggaaagactgcagaatcatccgaaaagaggactctttatgaacagtgaatttctgcccgtagtcaaatgcactatcgataacaccctggatcaatggctgcaagtaggaggggatatgtgtgtgcacgcatacctgagcggccagccactggaggaaagtcaactgtcaatgctggcctgtttcctggtgtatcacagcgtgccagccccccagcatctgcccccgataggacttgagggctcaacaagtttcgctgagctgctgttcaagttcaagcagctgaagatgccagtcagagcattgttgagactggctccactgttgttggggaacccccaaccaatggtcatgtag

SEQ ID NO: 212833 - DNA, 5835 bp, Artificial Sequence
  derived and/or modified sequence
atgagcaacttctatgaggagaggaccaccatgattgctgcccgggacctgcaggagtttgtgcccttcggccgggaccactgcaagcaccaccccaatgccctgaacctgcagctgcggcagctgcagcctgccagcgagctgtggagcagtgatggagctgctggcctggtgggcagcctgcaggaggtgaccatccacgagaagcagaaggagagctggcagctgaggaagggcgtgtctgaaattggagaagatgtggactatgatgaggagctgtatgtggccggcaacatggtgatctggagcaagggcagcaagagccaggccctggccgtgtacaaggccttcaccgtggacagccctgtgcagcaggccctgtggtgtgacttcatcatcagccaggacaagtctgagaaggcctacagcagcaatgaggtggagaagtgcatctgcatcctgcagagcagctgcatcaacatgcacagcattgagggcaaggactacatcgccagcctgcccttccaggtggccaacgtgtggcccaccaagtatggcctgctgtttgagaggtctgccagcagccatgaggtgcccccaggcagcccccgggagcccctgcccaccatgttctccatgctgcaccccctggatgagatcacccccctggtgtgcaagagcggcagcctgtttggcagcagccgggtgcagtatgtggtggaccacgccatgaagatcgtgttcctgaacacagaccccagcatcgtgatgacctatgatgctgtgcagaatgtgcacagcgtgtggaccctgcggcgggtgaagtctgaggaggagaatgtggtgctgaagttcagcgagcagggcggcaccccccagaatgtggccaccagcagcagcctgacagcccacctgcggagcctgagcaagggggacagccctgtgaccagccccttccagaactacagcagcatccacagccagagccgcagcaccagcagccccagcctgcacagccgcagccccagcatcagcaacatggccgccctgagccgggcccacagccctgccctgggcgtgcacagcttcagcggcgtgcagcgcttcaacatcagcagccacaaccagagccccaagaggcacagcatcagccacagccccaacagcaacagcaatggcagcttcctggcccctgagacagagcccatcgtgcctgagctgtgcatcgaccacctgtggacagagaccatcaccaacatccgggagaagaacagccaggccagcaaggtgttcatcaccagtgacctgtgtggccagaagttcctgtgcttcctggtggagagccagctgcagctgcgctgtgtgaagttccaggagagcaatgacaagacccagctgatcttcggctctgtgaccaacatcccagccaaggatgctgcccctgtggagaagattgacaccatgctggtgctggagggcagcggcaacctggtgctgtacacaggagtggtgcgggtgggcaaggtgttcatccctggcctgcctgcccccagcctgaccatgagcaacaccatgccccggcccagcacccccctggatggagtgtccacccccaagcccctgagcaagctgctgggcagcctggatgaggtggtgctgctgagccctgtgcctgagctgcgggacagcagcaagctgcatgacagcctgtacaatgaagactgcaccttccagcagctgggcacctacatccacagcatccgggaccctgtgcacaacagagtgaccctggagctgagcaatggctccatggtgcgcatcaccatccctgagatcgccaccagcgagctggtgcagacctgcctgcaggccatcaagttcatcctgcccaaggagattgctgtgcagatgctggtgaagtggtacaacgtgcacagcgcccctgggggccccagctaccacagcgagtggaacctgtttgtgacctgcctgatgaacatgatgggctacaacacagaccggctggcctggaccaggaactttgattttgagggcagcctgagccctgtgattgcccccaagaaggcccggcccagcgagactggaagtgatgatgactgggagtacctgctgaacagcgactaccaccagaatgtggagagccacctgctgaacagaagcctgtgcctgagccccagcgaggccagccagatgaaggatgaggacttcagccagaacctgagcctggacagcagcaccctgctcttcacccacatcccagccatcttctttgtgctgcacctggtgtatgaggagctgaagctgaacaccctgatgggagagggcatctgcagcctggtggagctgctggtgcagctggcccgggacctgaagctgggcccctacgtggaccactactacagagactaccccaccctggtgaggaccaccggccaggtgtgcaccattgatcctggccagacaggcttcatgcaccaccccagcttcttcaccagcgagcccccatccatctaccagtgggtgagcagctgcctgaagggggagggcatgccaccctacccctacctgcccggcatctgtgagaggagccggctggtggtgctgagcatcgccctgtacatcctgggagatgagagcctggtgtctgatgagagcagccagtacctgacccgcatcaccatcgccccccagaagctgcaggtggagcaggaggagaaccgcttctccttccgccacagcacctctgtgagcagcctggccgagcggctggtggtgtggatgaccaacgtgggcttcaccctgcgggacctggagaccctgccctttggaattgccctgcccatcagagatgccatctaccactgccgggagcagcctgccagtgactggccagaggccgtgtgcctgctgattggccggcaggacctgagcaagcaggcctgtgagggcaacctgcccaagggcaagtctgtgctgagcagtgatgtgcccagcggcacagaaacagaggaggaggatgatggcatgaatgacatgaaccacgaggtgatgagcctcatctggagcgaggacctgcgggtgcaggatgtgcggcggctgctgcagagcgcccaccctgtgcgggtgaatgtggtgcagtacccagagctgagtgaccacgagttcatcgaggagaaggaaaatcggctgctgcagctgtgccagaggaccatggccctgcctgtgggccggggcatgttcaccctcttctcctaccaccctgtgcccacagagcccctgcccatccccaagctgaacctgaccggccgggccccacccaggaacaccaccgtggacctgaacagcggcaacattgatgtgccccccaacatgacctcctgggccagcttccacaatggagtggccgccggcctgaagatcgccccagccagccagattgattctgcctggatcgtgtacaacaagcccaagcacgccgagctggccaatgaatatgccggcttcctgatggccctgggcctgaatggccacctgaccaagctggccaccctgaacatccatgactacctgaccaagggccacgagatgaccagcatcggcctgctgctgggcgtgtctgctgccaagctgggcaccatggacatgagcatcacccggctgctgagcatccacatcccagccctgctgccccccaccagcacagagctggatgtgccccacaacgtgcaggtggccgctgtggtgggcatcggcctggtgtaccagggcacagcccaccgccacacagctgaggtgctgctggccgagatcggccggcccccaggccctgagatggagtactgcacagaccgggagagctacagcctggccgccggcctggccctgggcatggtgtgcctgggccacggcagcaacctgattggcatgtctgacctgaatgtgcctgagcagctgtaccagtacatggtgggcggccaccggcgcttccagacaggcatgcaccgggagaagcacaagagccccagctaccagatcaaggagggggacaccatcaacgtggatgtgacctgccctggggccaccctggccctggccatgatctacctgaagaccaacaacagaagcattgctgactggctgcgggccccagacaccatgtacctgctggactttgtgaagccagagttcctgctgctgcggaccctggcccgctgcctgatcctgtgggatgacatcctgcccaacagcaagtgggtggacagcaatgtgccccagatcatccgggagaacagcatcagcctgtctgaaattgagctgccctgcagcgaggacctgaacctggagaccctgagccaggcccacgtgtacatcatcgccggggcctgcctgagcctgggcttccgctttgctggcagcgagaacctgagcgccttcaactgcctgcacaagtttgccaaggacttcatgacctacctgagcgccccaaatgcctctgtgacaggcccccacaacctggagacctgcctgtctgtggtgctgctgagcctggccatggtgatggccggcagcggcaacctgaaggtgctgcagctgtgccgcttcctgcacatgaagacaggaggagagatgaactacggcttccacctggcccaccacatggccctgggcctgctcttcctgggcggcggccgctacagcctgagcaccagcaacagcagcattgctgccctgctgtgtgccctgtacccccacttccctgcccacagcacagacaaccgctaccacctgcaggccctgcggcacctgtatgtgctggccgctgagccccggctgctggtgcctgtggatgtggacaccaacaccccctgctacgccctgctggaggtgacctacaagggcacccagtggtatgagcagaccaaggaggagctgatggcccccaccctgctgcctgagctgcacctgctgaagcagatcaaggtgaagggcccccgctactgggagctgctgattgacctgagcaagggcacccagcacctgaagagcatcctgagcaaggatggagtgctgtatgtgaagctgcgggccggccagctgagctacaaggaggaccccatgggctggcagagcctgctggcccagacagtggccaacagaaacagcgaggcccgggccttcaagccagagaccatcagcgccttcaccagtgaccctgccctgctgagctttgctgagtacttctgcaagcccaccgtgaacatgggccagaagcaggagatcctggacctcttcagctctgtgctgtatgaatgtgtgacccaggagaccccagagatgctgcctgcctacatcgccatggaccaggccatccggcggctgggccggcgggagatgtctgagaccagcgagctgtggcagatcaagctggtgctggagttcttcagcagccgcagccaccaggagcggctgcagaaccaccccaagaggggcctcttcatgaacagcgagttcctgcctgtggtgaagtgcaccatcgacaacaccctggaccagtggctgcaggtgggcggggacatgtgtgtgcacgcctacctgagcggccagcccctggaggagagccagctgtccatgctggcctgcttcctggtgtaccacagcgtgcctgccccccagcacctgccccccatcggcctggagggcagcaccagctttgctgagctgctcttcaagttcaagcagctgaagatgcctgtgcgggccctgctgcggctggcccccctgctgctgggcaacccccagcccatggtgatgtag

SEQ ID NO: 212834 - DNA, 5835 bp, Artificial Sequence
  derived and/or modified sequence
atgagcaacttctacgaggagcggaccaccatgatcgccgcccgggatctgcaagagttcgtcccctttggtcgggatcattgcaaacaccatcccaacgcactgaatcttcagctgaggcagctacagcctgcttctgagttgtggtcaagcgacggggccgccggcttagtcggctcactgcaggaggtgaccatccatgagaagcagaaggaatcttggcagctgcggaagggcgtcagtgagattggagaagacgtagattatgatgaagagctgtacgtggctggcaatatggtcatttggagcaaaggcagtaaatcacaggctttggccgtctataaggcctttacagtggattcacccgtgcagcaagctctatggtgtgatttcattatttctcaggataaatccgaaaaggcttatagcagtaacgaggtggagaaatgtatctgcattctccagtccagttgcataaatatgcattcaatcgagggaaaagactatattgcttctctgccttttcaggtggcaaacgtgtggccaactaagtatggcctgctgtttgagagaagtgcctctagccacgaggtgccacccgggtcccctcgtgagcccctccccacgatgttctctatgttacatccactggatgaaattactccgctcgtttgtaagtcaggaagtttattcggttcctcgcgcgtgcagtatgtggtagaccatgccatgaaaatcgttttcctgaacacggacccctcgattgtgatgacatacgacgcagtgcagaacgtgcattcagtatggacactgaggagagtgaaatcagaggaggagaacgtcgtgctgaaattctccgaacaggggggaactccgcaaaatgtggctactagtagctcactgacagctcatcttagatctctctccaaaggcgacagtcctgttacttcgccgttccagaattatagcagcatccacagccagagccgcagcactagcagtccatccctccacagccggagtcccagcatttcaaacatggcggcactgtcgagggcgcactcccccgctcttggtgtgcactcctttagtggcgtccagcggtttaacatttcatctcataaccagtctccgaaaaggcactcaatctctcacagcccaaattcaaatagcaacggctccttcctggcccccgaaactgagcccatcgttcccgagttgtgtatagaccacctctggaccgaaactataacgaacatccgagagaagaacagccaggcatctaaggtctttataacttccgacctgtgtggccaaaagtttctttgtttcttggtcgaatctcagcttcagttgcgctgcgtcaaatttcaggaatccaacgataaaacacagttgatattcggtagcgtcacgaatattcctgccaaagatgctgcccccgtggagaaaatagatacaatgctagtgctggagggctcagggaatctggtcttatatacaggcgttgtcagagtggggaaggtgttcattcccggcttgcctgcacctagtctgaccatgtccaatacaatgccacggccttcgacgcctttggacggggtgtccacccctaaaccgttgtccaaactgctgggaagcttggatgaagtggtgctactctcacccgtacccgagctaagggacagttccaaactgcatgactccctttacaatgaagactgcacctttcagcagctcggaacatacatccattctatcagagacccagttcacaatcgagtcaccctggagctatccaacgggagtatggtgcgcatcactatccccgagattgcgacttcagagctggtccaaacgtgcctgcaggctatcaagtttatcctgccaaaagagattgcagtacagatgctggtcaagtggtataacgtgcactccgctccagggggaccctcctaccactcggagtggaatctgttcgttacctgcttgatgaacatgatgggatataatacagatagattggcttggaccagaaactttgactttgagggctccttgagtccagtcatagccccgaagaaagctagaccctccgaaactgggtcagacgacgactgggagtatctgctgaattcggattatcaccagaacgtcgagtcccatttacttaatcggtccctgtgtctttctcctagcgaggccagccagatgaaggacgaggatttctctcagaatctgtctctggacagctcgaccttactatttacgcatataccagctatcttcttcgtactacatcttgtgtacgaagagttgaagctgaataccctaatgggagaagggatttgtagtttggtggagttgctggtgcaactggccagggaccttaaactcgggccatacgtcgaccactactaccgggactacccgacactggtgcgcactacaggtcaggtttgcacaatcgaccctggacagacaggattcatgcaccaccctagtttctttacaagcgagcctcccagcatttaccagtgggtttcaagttgtctaaagggggaaggcatgccaccttacccttacctgccgggcatctgtgagcgctcaagactggtcgtgctgagcattgccctttatatcttgggcgacgaatccttggtaagcgatgaatcatctcagtatctgacccggattaccatcgccccccagaagctccaggtcgaacaggaggaaaaccgattctccttcagacattcaacttctgtatccagtcttgccgagcgactcgtggtatggatgacaaacgtaggcttcacccttcgcgacttggagactcttcccttcgggattgcattacctattcgtgatgccatctatcactgcagggaacaaccagcttctgactggccggaggccgtctgcttactcattggccggcaggacctctctaagcaggcctgcgaaggcaatttaccaaaaggaaagtccgtgctgagctctgacgtaccgtccggcactgagactgaagaggaagatgacggcatgaacgacatgaaccacgaggtaatgtcactcatctggtccgaggatttacgggtacaggacgtccgaaggcttctccagagcgcacaccccgtgagggttaacgtcgttcagtaccctgagttgtcagatcatgagttcatcgaagaaaaagaaaacagactcctgcagctgtgccagaggaccatggccctacccgtaggtcgaggaatgtttaccctgttcagctaccaccccgtcccaactgagccactgccaatacctaagctcaatctcaccggtcgggccccacctcgaaataccacggtcgatttgaatagtggaaacattgacgtgcctccaaatatgacatcttgggccagttttcacaatggtgtggccgctgggttaaagatagcccccgcttcccagatagatagtgcgtggatcgtatacaacaagcctaaacacgccgagctggcaaatgagtacgctgggttcttaatggcacttggtctgaacggccacctgaccaagcttgccaccctcaatattcatgattacctgacaaagggccacgagatgactagtatcggcctgctgctaggtgttagcgctgccaaacttggcacaatggacatgagcattaccaggctgctgagtattcatatccctgcgctgctgcctccaacgagtactgagttggatgtgccacataatgtgcaggttgccgcggtcgttggaatcggactggtataccagggcaccgcccatcggcacacagctgaggtcctcctggctgaaataggcaggccaccgggccccgaaatggaatactgcactgatagagaatcctatagcctggcagcgggactggcactgggcatggtatgcctagggcatgggtccaacttaatcgggatgtctgatctgaatgtgcccgaacagttgtaccagtacatggtcgggggtcaccgcagattccagacagggatgcatcgagagaaacataagtctccctcctatcagatcaaggagggggatacaataaatgtagacgtgacatgtcctggcgccacacttgccctggccatgatttatctgaagaccaacaacagaagtatagctgattggcttcgagcacctgacaccatgtatttgttggactttgtgaaaccggagttcttattgctgagaacgctggctcgctgtctcatcctatgggatgatatcttgcctaactcaaagtgggttgactctaatgtgcctcagatcatccgcgagaactctatctcattgagcgaaatagagctgccatgcagcgaagatctgaatttggagacccttagccaggcccatgtgtatatcattgccggagcttgcctgtctctggggtttcggttcgccgggagcgagaacctctccgcgttcaactgcttacataagttcgcgaaggattttatgacttatctgtcagcccctaatgcaagcgtgactggcccacataatctagagacctgcctttctgttgtactgctctctctcgcgatggtgatggctggaagcggcaacctaaaagtcctccagctctgcaggtttctgcacatgaagactggcggcgagatgaattacgggtttcatctcgcccaccacatggctctcggcttgctgttcctcggcggcggacgttactctctgagcacttcgaattcttcaatcgccgccctgttgtgcgccttatatccccatttccccgctcactcaaccgataataggtatcacctgcaggctctgagacacctgtacgtgctggctgccgagccccgactgctggtccctgtggacgtcgacaccaacacgccatgctacgcattactagaggtcacctacaaggggacacagtggtacgagcagaccaaggaagagctgatggctcctacgctgctccctgagctccacctcctgaaacaaataaaagtcaaaggccctagatattgggaactcctgatcgacctttcaaaggggacccagcacctgaagagcatcctgagtaaggacggtgtcctgtacgttaaactcagagccggacaactgtcttataaggaagatcctatgggctggcagtcactgttagctcagactgttgctaatcgaaactctgaagcacgtgcattcaaacccgaaaccattagcgcctttacatctgatccagctctgctgtcgtttgccgagtatttttgcaagccaacagtaaacatgggccagaaacaggagatcttggacctgttttcgtcggtactctacgaatgtgtgactcaggaaactcccgaaatgctgcctgcgtacatagccatggatcaagccatccggcggctaggcagacgtgagatgtctgagacctccgagctctggcagatcaagttagtgctcgaattttttagtagtaggagtcaccaggagagattgcagaaccatccaaagcgcggtttatttatgaatagcgagtttctgcccgtggttaagtgtacgatcgacaacacactagatcagtggctgcaagtgggaggggatatgtgtgttcacgcatatttatctggccaaccattggaggaatctcagctctcaatgctcgcctgttttctcgtgtaccatagtgtacctgcgccccaacacctaccccctatcgggctggaaggctctacgagtttcgctgaactgctgttcaaattcaagcagctgaaaatgccagtacgcgctttgttacggctggctccactcttgctgggcaacccccagcctatggtcatgtag

SEQ ID NO: 212835 - DNA, 5834 bp, Artificial Sequence
  derived and/or modified sequence
atgtccaacttttacgaggaaaggaccaccatgatcgctgctagggacttgcaggaatttgttccttttggcagggaccactgcaagcatcaccctaacgccctgaacctccagctcagacagctgcagccagcgagcgagctgtggagtagcgatggcgcagccggactggttgggagtttgcaggaggtcacaatccatgaaaagcagaaggaatcctggcagctccggaaaggcgtgagcgagataggtgaggatgtcgattatgatgaggagctgtatgtggccggtaatatggtgatctggagcaaaggctccaagtctcaagccctcgccgtctacaaggctttcactgtggactcccccgtgcagcaggccctgtggtgcgatttcataataagccaagataaatctgaaaaggcctatagcagcaacgaggttgaaaaatgtatttgcattcttcaatcctcttgcatcaacatgcactctatcgaagggaaagattatatcgcatcattgccgttccaggtggcaaacgtctggcccaccaaatacggcctgctgtttgagcgatcagcgtcttctcacgaggtccccccagggtcacctagagagcctctgcccacaatgttttccatgctgcacccattggatgaaattacacccctggtttgcaagtccggtagtctgtttgggtcatcccgagtacagtacgtcgtggaccacgctatgaaaatagtcttcttgaacactgatcctagcatcgtcatgacctatgatgctgtccagaacgtgcactcggtgtggactttgcggagggttaagagcgaagaagaaaacgtggtcctgaagttctccgaacagggtgggacaccccagaacgtggccaccagctcctcacttactgcccatctgcggtcactttccaaaggagacagccctgtgacaagccccttccagaactactcaagtatccattcccagtctcgatctacttccagcccttctctgcattcccggtcgccaagcattagcaacatggccgcactgagtcgggctcactccccggctctaggtgttcattctttcagcggtgtgcagcggttcaacatctccagtcacaaccagtcaccaaagcgtcattccatcagtcattctccaaatagcaatagcaatggcagcttcctggctcctgaaaccgaacccatagttccagaattgtgcatcgaccacctctggaccgagaccattaccaatatccgcgagaaaaacagccaggcctccaaagtgttcataactagtgatctgtgcggacagaagtttctctgcttcctggtggagtcgcagctgcagttgcggtgcgttaagttccaagagtcaaatgataaaactcaactcattttcggctctgtcactaatatccccgcaaaagacgcagccccagttgaaaaaatcgacacgatgctcgtactggaaggatcaggaaacttagtcctgtatacgggagttgtgagggttggaaaggtgttcatcccaggccttccagccccatcactcacaatgagcaacactatgcccaggcccagcaccccgctggatggagtttcaactccaaagcccctgtcgaagctccttggaagccttgacgaggtggtactgctgagccctgtgcccgaattacgagattcaagcaaattgcacgactccctgtataacgaggattgtacctttcagcaactggggacttacattcattccattagagatccagtgcacaatcgggtcaccctggaactctcgaacggctctatggtgagaataaccattcctgagatcgctacatccgaactagttcagacctgtttgcaggcaataaaatttatattaccaaaggaaattgccgtgcagatgttagtcaaatggtataacgtccactcagcaccaggaggtccttcataccattcagagtggaacctgttcgtaacatgtctgatgaacatgatgggctacaacaccgataggctagcctggaccagaaactttgacttcgagggttcgctttcacctgtcattgcccctaagaaggctaggccatcggaaacagggagcgacgacgactgggagtatttgctgaatagtgattatcaccagaatgtcgaaagccatctgctgaatcgctctctttgccttagcccttcagaagcgtcccagatgaaggatgaggacttcagtcagaatctttccctggacagctctacactgctgttcacgcatatccctgctatattctttgtgctacacttagtgtacgaagagctaaaactgaatacccttatgggagagggaatctgctccctagttgagctactggttcaattggccagggacctgaagctgggaccttacgtggaccattactatagggactacccaactctggtgcgcaccaccggacaggtctgtaccattgaccccggtcagaccggcttcatgcaccatcctagtttcttcacatccgaacctccatccatatatcaatgggtttcctcctgcctgaaaggcgaggggatgcccccatatccctacctgcctggcatctgtgaacgcagccggcttgtcgtgctgtccattgctctgtacattctcggcgatgaaagtctggttagcgatgaatccagccagtacttgacaagaataaccattgctcctcagaagctccaggttgagcaggaggagaacagattcagtttccgccactcgacttcagtgtcctccctggccgaacgcttggttgtgtggatgaccaacgttgggttcacactgagagacctggagacattgccttttggcatcgcactacctattcgagatgccatttatcattgcagagaacagccagcaagcgattggcctgaggccgtttgtctgctcattgggaggcaggatctcagcaaacaggcctgtgagggcaatctccccaaagggaaatccgtactgtcaagcgatgtccccagtggaactgaaaccgaagaagaagatgatgggatgaacgacatgaatcacgaagtgatgtcccttatttggtccgaagatctgcgagtacaggacgtgcgcaggcttctgcagagtgctcacccagtgagagtcaatgtcgtccagtatcctgagctaagcgaccatgaatttatagaggagaaggagaaccggctgctgcagttatgccagcgaacgatggcacttcctgtcgggaggggtatgttcacactgttcagttaccatccggtgcccaccgaacccctccccatccccaagctgaatctgaccggacgagcaccaccgaggaatactaccgtggacctcaactccggcaatatcgacgtgcctcccaatatgacctcctgggctagctttcataacggcgtggcagcgggactgaagatcgccccagcaagtcagatagactcggcctggattgtgtacaataaaccaaagcatgccgaactggcaaatgagtacgcagggttcctgatggcactgggtttaaatgggcacctcacaaagctcgcaactcttaatattcacgattaccttaccaagggccatgaaatgacctcaatcggtcttctgcttggagtaagcgcagccaagctcgggaccatggacatgtccattacgcggttgcttagcattcacatccctgccttactgcctccaacctctaccgagcttgacgtcccccataacgtacaggttgccgcagtagtcgggatcggcttggtttaccagggcacggctcacagacatacagcggaagtcttgcttgcggagatcggaaggccccctggcccagaaatggagtactgcaccgacagagagagctactcacttgccgcaggtttagctctcgggatggtctgcttagggcatgggtccaatctgatcggtatgtctgatctcaacgtccctgagcagctgtaccaatacatggtaggcggacatcggcgtttccagaccggtatgcatagggaaaagcataagtcaccaagttaccagattaaagagggagatacaatcaatgtagatgtgacttgccctggcgctacactagctttggcaatgatttacctgaaaacaaacaaccggtccatcgccgactggctcagagcgcctgatacaatgtatcttctggatttcgtcaaacctgagttccttctgctgaggacgctcgctcgctgtttgatcctctgggacgacatcttacccaactcgaagtgggtggattcaaacgtgcctcagattattcgcgaaaacagcatatcactttctgagatcgaactgccgtgtagtgaggatctgaacctggaaaccctcagtcaggcccacgtgtacatcattgcaggcgcttgcttatctttgggcttcagattcgccggatccgaaaacttgtctgcctttaactgcctccataaatttgccaaggattttatgacgtatctttctgcccctaacgcatccgtgactggtcctcacaacctggaaacctgtctgtcagttgttttgcttagcctcgccatggtgatggcaggttccggcaatctcaaggtgctgcagctgtgccgcttcctgcatatgaagaccggaggggaaatgaactacggtttccatctggcacaccacatggcgctgggcctgctttttcttggaggaggtcggtatagtctgtcaacatccaattcttccatagctgccctgctctgcgcactgtatccgcatttcccggctcactccacggataaccggtaccacctgcaggctctccggcacctctatgtactggctgccgagcccaggctgctagtccccgtagacgtggacaccaacacgccctgctatgctctgctggaggtcacatacaagggtactcaatggtacgagcagactaaagaggagctgatggctcctacactcttgcccgagttacacctgttgaagcaaattaaagtaaagggaccaaggtattgggagctccttattgacctatccaaaggtacacagcatctgaagtccatactgtctaaagacggggtcctgtatgtcaagctccgtgccggtcagctgagttataaagaggacccgatggggtggcagagtctactcgcccagacagtggcgaacaggaatagcgaagccagagctttcaagccagagaccataagcgccttcacctctgatcctgccctgttaagctttgccgagtatttttgcaagcccactgtgaatatgggccaaaaacaagagatcttggacctcttttcgtctgtgctgtacgagtgcgttacccaagagactcccgaaatgttgccagcttacattgccatggatcaggctataagacgtcttggccgtcgagagatgagcgaaacttcagagctctggcagattaaactagtgctggaattttttagcagcaggtcccaccaggaaaggctccagaaccatcccaagagaggtctctttatgaattctgagtttctccccgtcgtaaagtgtacaattgacaatactctcgatcaatggctccaggtggggggtgacatgtgcgtgcacgcatacttgtccgggcaacccctggaggagagccagttatccatgcttgcttgtttcttagtctaccatagtgtcccagcacctcagcatctcccacctattggccttgaaggcagcaccagctttgctgaacttctttttaaatttaaacaactaaagatgcctgtgcgggctttgctccggctggctcccttgctccttggaaatcctcagcctatggtgatgta

SEQ ID NO: 212836 - protein, 245 aa, Artificial Sequence
  derived and/or modified sequence
MTSSYGHVLERQPALGGRLDSPGNLDTLQAKKNFSVSHLLDLEEAGDMVAAQADENVGEAGRSLLESPGLTSGSDTPQQDNDQLNSEEKKKRKQRRNRTTFNSSQLQALERVFERTHYPDAFVREDLARRVNLTEARVQVWFQNRRAKFRRNERAMLANKNASLLKSYSGDVTAVEQPIVPRPAPRPTDYLSWGTASPYSAMATYSATCANNSPAQGINMANSIANLRLKAKEYSLQRNQVPTVN

SEQ ID NO: 212837 - DNA, 4071 bp, Artificial Sequence
  derived and/or modified sequence
tgattcgagcgggaagaggggggtgggtgggatcggtgggggagaccatgacctccagctacgggcacgttctggagcggcaaccggcgctgggcggccgcttggacagcccgggcaacctcgacaccctgcaggcgaaaaagaacttctccgtcagtcacctgctagacctggaggaagccggggacatggtggcggcacaggcggatgagaacgtgggcgaggctggccggagcctgctggagtcgccgggactcaccagcggcagcgacaccccgcagcaggacaatgaccagctgaactcagaagaaaaaaagaagagaaagcagcgaaggaataggacaaccttcaatagcagccagctgcaggctttggagcgtgtctttgagcggacacactatcctgatgcttttgtgcgagaagaccttgcccgccgggtgaacctcaccgaggcgagagtgcaggtgtggtttcagaaccgaagagccaagttccgcaggaatgagagagccatgctagccaataaaaacgcttccctcctcaaatcctactcaggagacgtgactgctgtggagcagcccatcgtacctcgtcctgctccgagacccaccgattatctctcctgggggacagcgtctccgtacagatcctcgtccctcccaagatgttgtttacacgaggggcttcataacggattctaacggaagacactgaaaagcgccatggctacttattctgccacatgtgccaacaatagccctgcacagggcatcaacatggccaacagcattgccaacctgagactgaaggccaaggaatatagtttacagaggaaccaggtgccaacagtcaactgaggaaaaaaaataattaaacaggcctaagaagaaatcaaaaaccataagacacctatcctgctctgttatttcttcatctgctggggggaaaaagtaaattacaaacaaacaaacaaagcagaactaaaatattgggaccatggcagagaaaagcaggagaggagcaaaatgaaaattagttaacaaatgttcctcctccctctgggataccaccaccacttgtttctgtgtgtgtttattttgtttttctttcattcatgctttgcttaatgtactccaggcttcttcagataggttcagcccacccacccccatgattgtatgaagttttaaaaaaaactacagcagccaaagaaactatatatatatatatatatatatatatccagaatgattgcctctactgtcctcattgacttgtttgaaccttagtgccttaccctgtcctcttcccagttctctttatagaagctctaggagctttcgaaaagccaaagtctttctgaagaatctgtgctggacagacataattccctttctcattgtctccatctttgttggtcatggtaaggtttttccatcagcctctgaaaaaatagttgtgcacaacatctgctcactggactgtctgatccaatgtaattggctgcgtctggctaattctaagcactaaagtctacatctaagctatagatttaagcttgaagctacagattatatcactatcaccaccacccctcaccctatgcaatcaatcaatcaatcatcttaagttaaagatatttgttgtctttgaatgatttgctgtcacagactatttggtagaagaaatatttttcacctgagagaggaagagaaatttctctagtaacacaaagagtgagttctaaaaggcatgcccacatctctttcgtgccttaaggatagtgagatgcacacttatatatatactgtatatatttatatatttatatatatatttcatatatatatataatattgcaagcttaagtttgcaatttcccaaacaatacaaaaagcaaattacacaccctcaccactgttcttatctctatagtgatgaaacattaattagggatcttgctgcttttctttttctacacgaagttttcattaaagccacagaataattgatagggcagctgtttgagaacaggtcccattttcacattagggctttaaatgaattagaaactatttgaggctataaaaatgtccttgagtttggagcctgagctctggtgaaatgctgatacatctgatctatcatgggaattgcagttagagagagtaaggaataccatttagtcatctatccgttcttcacttagcaggaatatgaaagaaaggcacatgtttaagaggaatacctaaaggtttttctaaattccaacatttaaaaggcaattgtgggctatttttattttttaatattttgaaataaagtttagtgtctagggctgggagccaggactgatcttccatttctttttctttgttcccagccatgcttttgtaacttgccaggtggacttgaccaactacattaccatgctgtgcctcagtttacccatttgtaaaatgggattaataatacttacctacctcacaggggtgttgtgaggctctattcatttgctcctttattctttcctgtattctctgtatgtccagcactttgtagccatgggaggaaagggactataaaagtgtacaatgttaatggaatgatacggtacctgaaagccttgttttctagtaagaaaatgctaccttgctgtacatacttataaccttgtatttggaaatgagaaataggtttatattttcagatctctcaaaaatcacatcatttgaccaaagaataatttaagacacatagaacagatttttttaatttatattttcatcctgaccagcttagttctaataatttttagttgtgagtgattaaaaaactttggatcaattttggtcaaacatgccaactttgtagtctgagtgacaggcaaggatttttgggtttaagatgcacttttagcacacatttgtatttcccttggcatatcagattgagctaatggtgatgttatttcaatctaacagccaccaatctgaaattgtatttcaaatgttgattctgtagttctttaaataataatgaagctcatcttatacattttgctttcaccaattgattccttcttcttttagcccactattaaaacatttcttactgaatggttcatgtaggcttgctgaacagcacgcattacttgcttcctgaagagttcccccattcatccatttgtcccattagttgctgtggattatcaagttttgaaggaactgtacatcccaacagactgaaacattctaagtgaaatgagtataatccaagtaactggtgaactttggaggtttggagcttgaagagaatggctaagaagatttgaattatagggagggaacagaaatcatacatgaaaaggttttactgagaaggggaaaaccttagatagagggacatgtgaaacaaaatcatttgaaattttgattcagacatccatttccagtggcaaacagcaaagcctgaacccataaacccaaatgataggtgaagttgggtggttttatccaatgtctcaagcaagcaatgtctgggaatatcatagagtaacaagtgctggtcagccaaagaaacattcactgctggtgaaccaataccataagcatgtattatctaagcacttgatcaagaaatatacatgttgtacaagctctcaattttgttcatttattatcaaatttttaaaatacaagtttggtatgtgatttggaaaagatgccttctggatcttaagccagttgtcagtggaggtcctcagggctgcaaatgtcaagacataaccctgttcctcaccatcatgataccagatacaggtgaatacataggaactatctgcctgtgtcctcaatctcccttcaaacaagatgctgatttgtagggtacttggcaggttaaattaaaccagaagaggtgacttaataaaaaagggaatgacatttagggtataaagatctcataagaaatgtaatatgtaaattatatcttgctttatgttgtaaaatatacattgtttgcgctagaatagaaatgatttcttttcaataaaaagaaagaaggactcta

SEQ ID NO: 212838 - DNA, 738 bp, Artificial Sequence
  derived and/or modified sequence
atgacctcttcatacggccacgtgctggagagacagccagcgctgggtggacgcttagactcacccggtaatctggatacactgcaggctaaaaaaaatttcagcgtgagccatctgctggatttggaagaagcgggcgatatggtcgccgcccaggctgacgaaaatgttggcgaggccggtaggagcttgctagagtccccgggcttaacaagcgggtccgacacaccgcagcaggacaatgatcagctcaactcagaagaaaagaaaaaaaggaagcaacgaagaaaccgtacaacattcaatagtagccagctgcaagccctcgagcgcgttttcgagcggacccactatcccgatgcattcgtgcgcgaggacttagcccgacgcgtgaatctaacagaggcacgcgtgcaggtctggtttcaaaatagacgcgctaaatttcggaggaacgaacgcgccatgctggctaataaaaatgccagtttgttgaaaagctatagcggggatgttacagctgttgagcagccaatcgtgcctaggcccgcacctcggcccaccgattacctctcttggggcactgccagtccatatagcgcaatggccacatactcagcgacatgtgccaataacagcccagcccagggcatcaatatggcgaattctatcgcgaatttgcgtttaaaagcaaaagaatattcattgcaaaggaaccaggtgcctaccgtgaactag

SEQ ID NO: 212839 - DNA, 738 bp, Artificial Sequence
  derived and/or modified sequence
atgaccagcagctatggccacgtgctggagcggcagcctgccctgggcggccgcctggacagccctggcaacctggacaccctgcaggccaagaagaacttctctgtgagccacctgctggacctggaggaggccggggacatggtggccgcccaggctgatgaaaatgtgggggaggccggccgcagcctgctggagagccctggcctgaccagcggcagtgacaccccccagcaggacaatgaccagctgaacagcgaggagaagaagaagaggaagcagaggaggaacagaaccaccttcaacagcagccagctgcaggccctggagcgggtgtttgagaggacccactacccagatgcctttgtgcgggaggacctggccaggagagtgaacctgacagaggcccgggtgcaggtgtggttccagaacagaagagccaagttcagaagaaatgaaagagccatgctggccaacaagaatgccagcctgctgaagagctacagcggagatgtgacagctgtggagcagcccatcgtgcccaggcctgccccccggcccacagactacctgtcctggggcacagccagcccctacagcgccatggccacctacagcgccacctgtgccaacaacagccctgcccagggcatcaacatggccaacagcatcgccaacctgcggctgaaggccaaggagtacagcctgcagaggaaccaggtgcccaccgtgaactag

SEQ ID NO: 212840 - DNA, 738 bp, Artificial Sequence
  derived and/or modified sequence
atgaccagcagctacggccacgtgctggagcggcagcccgccctgggcggccgactggattccccaggaaacctggataccctgcaggcaaagaagaatttcagcgtgtctcatcttctcgacttggaagaggccggcgacatggttgccgctcaggcagatgaaaatgtcggggaagctggccgaagccttctggaatcaccaggtctgacatctgggtccgacacccctcagcaagacaacgatcagctgaattcggaagagaagaagaagaggaagcagcggaggaaccgaactacctttaattcaagccaactacaagccttagagcgggtcttcgagaggacccattatcccgacgcatttgtccgggaagacctggctcgtcgggtgaatttgaccgaagctcgcgtgcaggtgtggtttcaaaatcgccgcgccaagttcagacggaacgaacgcgccatgctggctaacaaaaatgcttcgcttttgaagagttatagcggggatgtgactgctgtggaacaacccattgttccaaggccagctccaagaccaacagactatctcagttggggcacagcctccccgtactcagcaatggccacatattctgcaacttgcgccaataatagccctgcccagggcataaacatggcgaattcaatagccaatttgcgactcaaagcgaaagaatactccctgcagcgtaatcaggtgcctactgtcaattag

SEQ ID NO: 212841 - DNA, 4284 bp, Artificial Sequence
  derived and/or modified sequence
tttttaatattgtattttactgtggattatctctttggaccgcgccggacttggcctcaggaaatcaaccaatgctgcggaaggcggctggtgcacaacgctctgctctacagaagggggtcccccaccctcttttccaattttttttttttggccttcctctccttccctccctcttcctccctctctctctctctctctccactacccccctctttcttccccactcggctcctctcccccctcgcgcccacagcgtttggtgttgattcgagcgggaagaggggggtgggtgggatcggtgggggagaccatgacctccagctacgggcacgttctggagcggcaaccggcgctgggcggccgcttggacagcccgggcaacctcgacaccctgcaggcgaaaaagaacttctccgtcagtcacctgctagacctggaggaagccggggacatggtggcggcacaggcggatgagaacgtgggcgaggctggccggagcctgctggagtcgccgggactcaccagcggcagcgacaccccgcagcaggacaatgaccagctgaactcagaagaaaaaaagaagagaaagcagcgaaggaataggacaaccttcaatagcagccagctgcaggctttggagcgtgtctttgagcggacacactatcctgatgcttttgtgcgagaagaccttgcccgccgggtgaacctcaccgaggcgagagtgcaggtgtggtttcagaaccgaagagccaagttccgcaggaatgagagagccatgctagccaataaaaacgcttccctcctcaaatcctactcaggagacgtgactgctgtggagcagcccatcgtacctcgtcctgctccgagacccaccgattatctctcctgggggacagcgtctccgtacagcgccatggctacttattctgccacatgtgccaacaatagccctgcacagggcatcaacatggccaacagcattgccaacctgagactgaaggccaaggaatatagtttacagaggaaccaggtgccaacagtcaactgaggaaaaaaaataattaaacaggcctaagaagaaatcaaaaaccataagacacctatcctgctctgttatttcttcatctgctggggggaaaaagtaaattacaaacaaacaaacaaagcagaactaaaatattgggaccatggcagagaaaagcaggagaggagcaaaatgaaaattagttaacaaatgttcctcctccctctgggataccaccaccacttgtttctgtgtgtgtttattttgtttttctttcattcatgctttgcttaatgtactccaggcttcttcagataggttcagcccacccacccccatgattgtatgaagttttaaaaaaaactacagcagccaaagaaactatatatatatatatatatatatatatccagaatgattgcctctactgtcctcattgacttgtttgaaccttagtgccttaccctgtcctcttcccagttctctttatagaagctctaggagctttcgaaaagccaaagtctttctgaagaatctgtgctggacagacataattccctttctcattgtctccatctttgttggtcatggtaaggtttttccatcagcctctgaaaaaatagttgtgcacaacatctgctcactggactgtctgatccaatgtaattggctgcgtctggctaattctaagcactaaagtctacatctaagctatagatttaagcttgaagctacagattatatcactatcaccaccacccctcaccctatgcaatcaatcaatcaatcatcttaagttaaagatatttgttgtctttgaatgatttgctgtcacagactatttggtagaagaaatatttttcacctgagagaggaagagaaatttctctagtaacacaaagagtgagttctaaaaggcatgcccacatctctttcgtgccttaaggatagtgagatgcacacttatatatatactgtatatatttatatatttatatatatatttcatatatatatataatattgcaagcttaagtttgcaatttcccaaacaatacaaaaagcaaattacacaccctcaccactgttcttatctctatagtgatgaaacattaattagggatcttgctgcttttctttttctacacgaagttttcattaaagccacagaataattgatagggcagctgtttgagaacaggtcccattttcacattagggctttaaatgaattagaaactatttgaggctataaaaatgtccttgagtttggagcctgagctctggtgaaatgctgatacatctgatctatcatgggaattgcagttagagagagtaaggaataccatttagtcatctatccgttcttcacttagcaggaatatgaaagaaaggcacatgtttaagaggaatacctaaaggtttttctaaattccaacatttaaaaggcaattgtgggctatttttattttttaatattttgaaataaagtttagtgtctagggctgggagccaggactgatcttccatttctttttctttgttcccagccatgcttttgtaacttgccaggtggacttgaccaactacattaccatgctgtgcctcagtttacccatttgtaaaatgggattaataatacttacctacctcacaggggtgttgtgaggctctattcatttgctcctttattctttcctgtattctctgtatgtccagcactttgtagccatgggaggaaagggactataaaagtgtacaatgttaatggaatgatacggtacctgaaagccttgttttctagtaagaaaatgctaccttgctgtacatacttataaccttgtatttggaaatgagaaataggtttatattttcagatctctcaaaaatcacatcatttgaccaaagaataatttaagacacatagaacagatttttttaatttatattttcatcctgaccagcttagttctaataatttttagttgtgagtgattaaaaaactttggatcaattttggtcaaacatgccaactttgtagtctgagtgacaggcaaggatttttgggtttaagatgcacttttagcacacatttgtatttcccttggcatatcagattgagctaatggtgatgttatttcaatctaacagccaccaatctgaaattgtatttcaaatgttgattctgtagttctttaaataataatgaagctcatcttatacattttgctttcaccaattgattccttcttcttttagcccactattaaaacatttcttactgaatggttcatgtaggcttgctgaacagcacgcattacttgcttcctgaagagttcccccattcatccatttgtcccattagttgctgtggattatcaagttttgaaggaactgtacatcccaacagactgaaacattctaagtgaaatgagtataatccaagtaactggtgaactttggaggtttggagcttgaagagaatggctaagaagatttgaattatagggagggaacagaaatcatacatgaaaaggttttactgagaaggggaaaaccttagatagagggacatgtgaaacaaaatcatttgaaattttgattcagacatccatttccagtggcaaacagcaaagcctgaacccataaacccaaatgataggtgaagttgggtggttttatccaatgtctcaagcaagcaatgtctgggaatatcatagagtaacaagtgctggtcagccaaagaaacattcactgctggtgaaccaataccataagcatgtattatctaagcacttgatcaagaaatatacatgttgtacaagctctcaattttgttcatttattatcaaatttttaaaatacaagtttggtatgtgatttggaaaagatgccttctggatcttaagccagttgtcagtggaggtcctcagggctgcaaatgtcaagacataaccctgttcctcaccatcatgataccagatacaggtgaatacataggaactatctgcctgtgtcctcaatctcccttcaaacaagatgctgatttgtagggtacttggcaggttaaattaaaccagaagaggtgacttaataaaaaagggaatgacatttagggtataaagatctcataagaaatgtaatatgtaaattatatcttgctttatgttgtaaaatatacattgtttgcgctagaatagaaatgatttcttttcaataaaaagaaagaaggactctaccatgtcttttgttatata

SEQ ID NO: 212842 - DNA, 2217 bp, Artificial Sequence
  derived and/or modified sequence
gatgttggcaaagggggttttcttaatcagactgttttttggtcccagggaaaggaggaagaaggagattgtgatggagaaagggggtctgtgaaacgtcaggcacagcacaaaggctttgccacgtaattacaggctcctattaagtcgagatctgccctcccaggggtctccaattttcttgtattccctacaaagcctcctctgcatgccagtttgtgccttttgaagtgccagagagcttcttgatccaactgagaaggaaaaaggagcccagcaagaagagggggagagagagaaggggaaaggggggaacccaccagcaccctccgtcggactcttgaagccttttttttttaattcttaatttttttttttactctttacaaaaagtaaagtgagaatcctgctctctaatacatctgcaagacatcaccctctcctcctgaaactttagtcactcctgagaatccacaggagtgcagagaggggggaacacgttttcttgaagatgttttaaagctggaacaagccttcttctgttggtgcttgaactcttgcctgggaataacttttttaacctttaaaaaaaccattcactttgattcttctctcccaccccttcttctctcttcttctgtttgcctaactcccccgccctgctggcctccgctttcctctctcccccttgttattatttttagtctgtgcgtgtggacacttttggagagttggaagggatttttttctcctgacttgaacatagggtgactttttaatattgtattttactgtggattatctctttggaccgcgccggacttggcctcaggaaatcaaccaatgctgcggaaggcggctggtgcacaacgctctgctctacagaagggggtcccccaccctcttttccaattttttttttttggccttcctctccttccctccctcttcctccctctctctctctctctctccactacccccctctttcttccccactcggctcctctcccccctcgcgcccacagcgtttggtgttgattcgagcgggaagaggggggtgggtgggatcggtgggggagaccatgacctccagctacgggcacgttctggagcggcaaccggcgctgggcggccgcttggacagcccgggcaacctcgacaccctgcaggcgaaaaagaacttctccgtcagtcacctgctagacctggaggaagccggggacatggtggcggcacaggcggatgagaacgtgggcgaggctggccggagcctgctggagtcgccgggactcaccagcggcagcgacaccccgcagcaggacaatgaccagctgaactcagaagaaaaaaagaagagaaagcagcgaaggaataggacaaccttcaatagcagccagctgcaggctttggagcgtgtctttgagcggacacactatcctgatgcttttgtgcgagaagaccttgcccgccgggtgaacctcaccgaggcgagagtgcaggtgtggtttcagaaccgaagagccaagttccgcaggaatgagagagccatgctagccaataaaaacgcttccctcctcaaatcctactcaggagacgtgactgctgtggagcagcccatcgtacctcgtcctgctccgagacccaccgattatctctcctgggggacagcgtctccgtacagatcctcgtccctcccaagatgttgtttacacgaggggcttcataacggattctaacggaagacactgaaaagcgccatggctacttattctgccacatgtgccaacaatagccctgcacagggcatcaacatggccaacagcattgccaacctgagactgaaggccaaggaatatagtttacagaggaaccaggtgccaacagtcaactgaggaaaaaaaataattaaacaggcctaagaagaaatcaaaaaccataagacacctatcctgctctgttatttcttcatctgctggggggaaaaagtaaattacaaacaaacaaacaaagcagaactaaaatattgggaccatggcagagaaaagcaggagaggagcaaaatgaaaattagttaacaaatgttcctcctccctctgggataccaccaccacttgtttctgtgtgtgtttattttgtttttctttcattcatgctttgcttaatgtactccaggcttcttcagataggttcagcccacccacccccatgattgta

SEQ ID NO: 212843 - DNA, 738 bp, Artificial Sequence
  derived and/or modified sequence
atgacctcgtcatatggccatgtattagaacgccagccagccctagggggtcgtctcgactccccaggcaacttagacacactgcaggctaaaaaaaatttctccgtttcacacttacttgacctagaagaagctggtgacatggtcgccgctcaggccgacgagaatgtcggagaggccggacgctccctgctcgaatctcctgggcttacatccggatcggatactcctcagcaggacaatgaccagcttaatagtgaggagaaaaagaaaaggaaacaaaggaggaataggacaacgtttaatagcagtcagctgcaagccctcgaaagagtgttcgagcgcacccattatcccgacgcctttgtccgggaggacctggctcggcgtgtgaaccttacagaggctcgcgttcaagtatggttccagaatcgacgcgctaagttccgacggaacgagagggcaatgctcgccaacaagaacgccagcttgctcaagtcatactcaggcgatgtaacagccgttgaacaacctattgtacctagacccgcaccaaggccaactgattaccttagctgggggactgcatctccttactcagctatggccacatacagcgcaacatgtgcgaacaatagccccgctcagggcatcaatatggctaatagtatcgccaacctgcggctgaaggctaaagaatactctctgcagagaaaccaagtgcctactgtgaattag

SEQ ID NO: 212844 - DNA, 738 bp, Artificial Sequence
  derived and/or modified sequence
atgaccagcagctacggccacgtgctggagagacagcccgccctgggcggcagactggacagccccggcaacctggacaccctgcaggccaagaagaacttcagcgtgagccacctgctggacctggaggaggccggcgacatggtggccgcccaggccgacgagaacgtgggcgaggccggcagaagcctgctggagagccccggcctgaccagcggcagcgacaccccccagcaggacaacgaccagctgaacagcgaggagaagaagaagagaaagcagagaagaaacagaaccaccttcaacagcagccagctgcaggccctggagagagtgttcgagagaacccactaccccgacgccttcgtgagagaggacctggccagaagagtgaacctgaccgaggccagagtgcaggtgtggttccagaacagaagagccaagttcagaagaaacgagagagccatgctggccaacaagaacgccagcctgctgaagagctacagcggcgacgtgaccgccgtggagcagcccatcgtgcccagacccgcccccagacccaccgactacctgagctggggcaccgccagcccctacagcgccatggccacctacagcgccacctgcgccaacaacagccccgcccagggcatcaacatggccaacagcatcgccaacctgagactgaaggccaaggagtacagcctgcagagaaaccaggtgcccaccgtgaactag

SEQ ID NO: 212845 - protein, 773 aa, Artificial Sequence
  derived and/or modified sequence
METDESPSPLPCGPAGEAVMESRARPFQALPREQSPPPPLQTSSGAEVMDVGSGGDGQSELPAEDPFNFYGASLLSKGSFSKGRLLIDPNCSGHSPRTARHAPAVRKFSPDLKLLKDVKISVSFTESCRSKDRKVLYTGAERDVRAECGLLLSPVSGDVHACPFGGSVGDGVGIGGESADKKDEENELDQEKRVEYAVLDELEDFTDNLELDEEGAGGFTAKAIVQRDRVDEEALNFPYEDDFDNDVDALLEEGLCAPKKRRTEEKYGGDSDHPSDGETSVQPMMTKIKTVLKSRGRPPTEPLPDGWIMTFHNSGVPVYLHRESRVVTWSRPYFLGTGSIRKHDPPLSSIPCLHYKKMKDNEEREQSSDLTPSGDVSPVKPLSRSAELEFPLDEPDSMGADPGPPDEKDPLGAEAAPGALGQVKAKVEVCKDESVDLEEFRSYLEKRFDFEQVTVKKFRTWAERRQFNREMKRKQAESERPILPANQKLITLSVQDAPTKKEFVINPNGKSEVCILHEYMQRVLKVRPVYNFFECENPSEPFGASVTIDGVTYGSGTASSKKLAKNKAARATLEILIPDFVKQTSEEKPKDSEELEYFNHISIEDSRVYELTSKAGLLSPYQILHECLKRNHGMGDTSIKFEVVPGKNQKSEYVMACGKHTVRGWCKNKRVGKQLASQKILQLLHPHVKNWGSLLRMYGRESSKMVKQETSDKSVIELQQYAKKNKPNLHILSKLQEEMKRLAEEREETRKKPKMSIVASAQPGGEPLCTVDV

SEQ ID NO: 212846 - protein, 125 aa, Artificial Sequence
  derived and/or modified sequence
METDESPSPLPCGPAGEAVMESRARPFQALPREQSPPPPLQTSSGAEVMDVGSGGDGQSELPAEDPFNFYGASLLSKGSFSKGRLLIDPNCSGHSPRTARHAPAVRKFSPDLKLLKDVKISVSFT

SEQ ID NO: 212847 - DNA, 2322 bp, Artificial Sequence
  derived and/or modified sequence
atggagaccgacgagagtccgtcccctcttccttgcgggcctgctggagaagccgtcatggaatctcgagcaaggccttttcaggcactgccgcgggagcagtcgccacctcctcctctgcagacttcatccggcgccgaggtcatggacgtgggatcaggcggagatggacagtccgaattacctgccgaggaccccttcaacttttatggcgcctccctgctatccaaaggttccttctcaaaagggcgcctgttgattgacccgaattgttccggccattcaccaaggaccgcgagacacgcgccggccgtccgcaagttcagcccggatttgaagcttttgaaagatgtgaaaatttcagtgagcttcacggaatcatgccggagtaaagataggaaagtgctatataccggggccgagagggatgtgcgagccgagtgcggcctgctactgtctcctgtttccggcgatgtgcacgcttgtcctttcggagggagcgtcggcgacggtgttggtatcgggggtgaaagtgccgataagaaggacgaagagaatgaactcgaccaagagaagcgtgtggagtacgccgtccttgatgagctcgaggactttacggacaatttagaactggatgaagagggagccggcggatttactgccaaggcgatagtccagcgcgaccgtgtggacgaggaggctctaaatttcccctatgaagatgatttcgacaacgatgtcgacgcactgctggaggagggcctgtgtgcaccaaagaaaagacggaccgaagaaaaatacggtggcgactcagaccatccctccgatggcgagaccagtgtgcagcctatgatgaccaagatcaaaactgtcctaaagtcgcggggcaggccacctacagagcccctgccagacggctggatcatgacctttcacaattccggagtccccgtgtacctccatagggaaagtagggtggtgacatggagcaggccttactttctcggcacgggatccattcgaaaacacgaccctccattatccagcatcccatgcctccattacaaaaagatgaaggataatgaggagagggagcagtcgagcgatctcacaccaagtggcgacgtatctcctgtgaagcctctgtcccggtctgctgagctagagtttccactggatgaacccgatagcatgggcgccgaccctggcccccccgacgaaaaggatccactcggagcagaagccgcgcctggcgcactagggcaggtaaaagccaaggtggaagtgtgtaaggatgaaagcgtggacctggaggagttcagatcctatctggaaaaaagattcgatttcgagcaggttacagttaaaaagttccgcacttgggcagagcggaggcagtttaacagagaaatgaaacgcaagcaggctgaaagcgagagaccaatcctgcccgctaatcaaaagctcattaccctctctgtccaagatgctccaaccaagaaggagtttgtgatcaatcctaatgggaaatcagaagtctgtattctgcacgagtatatgcaaagggtgctgaaagtccggccggtgtacaacttcttcgagtgtgagaacccctcggaacctttcggggcatcagtcaccattgatggggtgacgtacgggtctggtaccgcgagttcaaagaagctggccaaaaataaggcagcgcgggctactctggagattctcatcccagattttgtaaagcagactagtgaagagaaacccaaggatagtgaggagctggagtacttcaatcacatcagtattgaagatagtagggtatacgagctcacatctaaagctggcctgctgagtccctatcagatcttacatgaatgcctgaaaaggaaccacggaatgggggatacaagcatcaaattcgaagtggtgccaggcaagaaccagaaaagtgaatacgttatggcctgcggcaagcacaccgtgaggggttggtgtaagaacaaacgggtgggcaagcagttggcttcccaaaaaattctgcagctcctgcaccctcatgtgaagaactggggatctctgttaaggatgtatggtagggagagctcgaagatggtgaagcaggaaacctccgataaaagcgtaatcgaactgcagcagtatgctaaaaagaataaacctaatctgcatatcctcagtaaattgcaagaggagatgaaacgtttggctgaggaacgtgaggagacccgcaaaaaaccgaagatgagcatcgtggccagtgcccagcccggcggcgagcctctatgcaccgtcgacgtgtag

SEQ ID NO: 212848 - DNA, 2322 bp, Artificial Sequence
  derived and/or modified sequence
atggagacagatgagagccccagccccctgccctgtggccctgctggggaggccgtgatggagagccgggcccggcccttccaggccctgccccgggagcagagccccccaccacccctgcagaccagcagcggggctgaggtgatggatgtgggcagcggaggagatggccagagcgagctgcctgctgaggaccccttcaacttctacggggccagcctgctgagcaagggcagcttcagcaagggccgcctgctgattgaccccaactgcagcggccacagccccaggacagcccggcatgccccagctgtgaggaagttctccccagacctgaagctgctgaaggatgtgaagatctctgtgtccttcacagagagctgccgcagcaaggacaggaaggtgctgtacaccggggctgagagagatgtgcgggcagaatgtggcctgctgctgagccctgtgtctggagatgtgcacgcctgcccctttggaggctctgtgggagatggagtgggcatcggcggggagagcgctgacaagaaggatgaagaaaatgagctggaccaggagaagagggtggagtatgctgtgctggatgagctggaggacttcacagacaacctggagctggatgaggagggcgctgggggcttcaccgccaaggccatcgtgcagagggacagagtggatgaggaggccctgaacttcccctatgaagatgactttgacaatgatgtggatgccctgctggaggagggcctgtgtgcccccaagaagagaagaacagaggagaagtatggaggagacagcgaccaccccagtgatggagagacctctgtgcagcccatgatgaccaagatcaagacagtgctgaagagccggggccggcccccaacagagcccctgcctgatggctggatcatgaccttccacaacagcggcgtgcctgtgtacctgcaccgggagagccgggtggtgacctggagccggccctacttcctgggcaccggcagcatcaggaagcatgacccccccctgagcagcatcccctgcctgcactacaagaagatgaaggacaatgaggagcgggagcagagcagtgacctgaccccatctggagatgtgtcccctgtgaagcccctgagccgctctgctgagctggagttccccctggatgagccagacagcatgggcgctgaccccggccccccagatgagaaggaccccctgggcgctgaggccgcccctggggccctgggccaggtgaaggccaaggtggaggtgtgcaaggatgagagcgtggacctggaggagttccgcagctacctggagaagagatttgattttgagcaggtgacagtgaagaagttccgcacctgggccgagcggcggcagttcaaccgggagatgaagaggaagcaggccgagagcgagcggcccatcctgcctgccaaccagaagctgatcaccctgtctgtgcaggatgcccccaccaagaaggagtttgtgatcaaccccaacgggaagtctgaggtgtgcatcctgcacgagtacatgcagagggtgctgaaggtgcggcctgtgtacaacttctttgaatgtgagaaccccagcgagccctttggagcctctgtgaccattgatggagtgacctacggcagcggcacagccagcagcaagaagctggccaagaacaaggccgcccgggccaccctggagatcctgatcccagactttgtgaagcagaccagcgaggagaagcccaaggacagcgaggagctggagtacttcaaccacatcagcattgaggacagccgggtgtatgagctgaccagcaaggccggcctgctgagcccctaccagatcctgcacgagtgcctgaagaggaaccacggcatgggagacaccagcatcaagtttgaggtggtgcctgggaagaaccagaagtcagaatatgtgatggcctgtgggaagcacacagtgcggggctggtgcaagaacaagagggtgggcaagcagctggccagccagaagatcctgcagctgctgcacccccacgtgaagaactggggcagcctgctgaggatgtatggccgggagagcagcaagatggtgaagcaggagaccagtgacaagagcgtcatcgagctgcagcagtatgccaagaagaacaagcccaacctgcacatcctgagcaagctgcaggaggagatgaagaggctggccgaggagcgggaggagaccaggaagaagcccaagatgagcatcgtggccagcgcccagcctggaggagagcccctgtgcaccgtggatgtgtag

SEQ ID NO: 212849 - DNA, 2322 bp, Artificial Sequence
  derived and/or modified sequence
atggagaccgacgagagccccagccccctgccctgcggccccgccggcgaggctgttatggagtcacgcgcccgacctttccaagcgttaccgcgcgagcagtcccctccgcccccactacaaacgagctctggcgccgaggtgatggacgtgggctctggaggagacggccagtccgagctgcctgccgaagatccttttaatttctacggcgcttctctcctgtcgaaggggtccttcagcaaaggccgtctactgatagaccccaattgtagcggccattccccaagaacagcccgccatgcccctgctgttcgcaaattctcgccagaccttaagctgcttaaggatgtaaaaatctcagtgagtttcacggaaagctgccgaagcaaagacagaaaggttctgtatacgggcgccgaaagggacgttcgcgctgagtgcggactccttctgagtccggtgtctggtgacgtgcacgcatgcccgttcgggggctcagttggcgatggtgtgggaatcggcggagagagcgccgacaagaaagacgaggaaaacgagctcgaccaagagaaaagggtggagtatgcagtgttggacgaactcgaggatttcacggacaacttagagttagatgaagaaggcgcgggagggttcacggctaaggccatagtgcagagagaccgggtggacgaggaagccttgaattttccctatgaagacgatttcgataacgacgttgacgctctgctggaagagggcttgtgtgcaccaaagaaacgccgcacggaagagaagtacggcggggattccgatcacccaagcgacggggaaactagcgtccagcctatgatgactaaaatcaaaactgttctgaagtcgaggggaagacccccaaccgagccccttcccgacggttggataatgacattccataactctggggttcctgtgtacctgcatagagagagccgcgtggtgacatggagcagaccttacttcttgggaactggctcgataagaaagcatgatccccctctcagctccataccgtgcctacactacaagaaaatgaaggacaatgaagagcgagaacaatctagtgacctcacgccatccggcgatgtctctcctgtgaagcctctgagcaggtccgctgaacttgagtttcctctcgacgagccggacagtatgggggcagaccccgggcctccggacgaaaaagatcctctcggcgcagaagcggctcctggtgcactgggtcaagtcaaggcaaaggtcgaggtgtgtaaagatgaatctgtggaccttgaggaatttaggagttatctcgagaaacgttttgacttcgagcaagtgactgtgaagaaattcaggacatgggctgagagacgccagttcaacagagaaatgaagagaaagcaagcagaaagcgagcggcctatccttcctgcaaaccagaagctaatcaccctttcagtccaagacgcccccaccaaaaaagagtttgtcattaatcctaacggaaaatccgaagtgtgcattctgcacgagtatatgcagcgggtgctcaaagtgcgcccagtgtacaatttcttcgagtgtgagaacccctcagagccgtttggggcgtcagttaccatcgacggagtcacctatgggagcggcaccgcaagttctaagaaacttgcaaagaacaaggccgccagagctactctggaaattttgattcccgattttgtgaagcagaccagcgaggagaagcccaaggattccgaagaattggagtacttcaaccacatcagcatcgaggatagtagggtttacgagttgacaagcaaagcagggctccttagcccgtaccagatcctccacgaatgcttaaaaaggaaccacgggatgggggataccagcatcaaatttgaggtggttcccgggaagaaccagaagagtgaatacgtgatggcttgtggcaaacatactgtgagaggttggtgcaaaaataagagggtcggaaaacagctagccagccagaaaatcctccaattgttgcatccccatgtgaagaattggggctctctccttagaatgtacggtcgggagtcctcaaagatggtgaagcaagagaccagtgacaagtcagtcattgagctacagcagtacgcaaaaaagaataaacccaacttgcacatactctccaaactccaggaggaaatgaaaaggctcgctgaggagagagaagagacgcgaaagaagcctaaaatgtccatcgttgcttctgcacagccaggcggggagccactctgcaccgtggacgtatag

SEQ ID NO: 212850 - DNA, 2322 bp, Artificial Sequence
  derived and/or modified sequence
atggagaccgacgaatcaccaagtcccctgccatgcggcccagccggtgaggcagttatggagagtagagctcgccctttccaggccctaccacgcgagcagagccctcctccccctctgcagacatcatcaggcgctgaggtcatggacgttggatcaggcggagatggccagtcagagttaccggcagaagacccgttcaatttttatggggcttcactcctgtccaaaggaagcttctcaaagggtaggctgctgatcgacccgaattgctctggtcactctcctaggaccgctaggcacgcacctgccgtgagaaagttctcgcctgacctgaagctgttgaaggatgtcaaaatatccgtatctttcaccgagtcatgtaggagcaaagatagaaaggttttgtacactggcgctgagcgagacgttagggccgaatgcgggctcctcctctcccctgtctcgggcgatgtccatgcctgcccatttggtggaagtgttggggacggggttggcattggaggcgaaagcgctgacaaaaaggatgaggagaatgaactggaccaggaaaaaagggttgagtacgctgtgctagatgagctggaagacttcacagataacctggaactcgatgaagagggagcgggtggcttcacagctaaagcaatagtccagcgggacagggtggacgaggaggctctgaatttcccatacgaagacgactttgataacgacgtcgatgcgctcttagaggagggcctctgtgcaccaaagaagaggcggacggaggaaaagtacggcggagactcagaccaccccagcgatggagaaacgtcagtgcagcccatgatgaccaaaatcaaaacagttctaaaatccaggggaagacccccaacagaacccttgcccgatggctggatcatgacattccataactcgggcgtgcccgtatacctgcaccgggagtcccgcgtagttacctggtcccgtccctattttttgggtaccgggtctattaggaagcatgacccgccactatccagtatcccatgcttacattacaaaaagatgaaggacaacgaagagagagagcagagtagtgacctcaccccgtccggcgatgtgtcacctgtaaagcctttaagtcgcagtgccgaactggagtttccactcgatgaacccgactcgatgggcgcagatcccggacccccagatgagaaggatcccctgggagcggaagctgctcccggtgccctaggtcaggttaaagctaaggtggaagtatgcaaagacgagagcgtggatctcgaggagttcagatcttaccttgagaaacgcttcgactttgaacaggtcactgtcaagaagtttcgaacatgggctgagcgacggcagttcaaccgagaaatgaagagaaagcaggccgagagtgagagacccatcctccccgctaaccaaaagcttataactctgtctgtgcaggacgccccaacaaagaaggaatttgtgattaatcctaacgggaaaagcgaagtttgtatactacacgaatacatgcaacgggtgttgaaagtcagaccggtatataacttcttcgaatgtgaaaatccatccgagccttttggcgcatctgtgacaattgacggcgttacctacgggagcgggaccgccagtagcaaaaagctcgccaaaaataaagccgcaagagctaccctggaaatacttatcccagatttcgtgaaacaaactagtgaggaaaaacctaaagatagtgaggagctggagtattttaaccacatttctatcgaagattctagggtgtatgaactcacaagcaaagccggactactcagcccatatcagattctccacgaatgcctgaagagaaatcacggaatgggtgatacttccattaaatttgaggtggtcccaggaaagaaccaaaagtccgagtatgttatggcatgcgggaaacatactgtaagaggttggtgcaaaaataagcgcgtgggcaagcagttggcttctcagaaaatcctgcagctgctgcatccgcacgtgaaaaactggggaagcctgctgcgcatgtacggccgtgaatcttccaagatggtgaagcaggagacctctgacaagagcgtgatcgaacttcaacagtatgctaagaagaataagcccaacctccacatattgtcaaagttgcaagaagagatgaaacgtctggccgaggagcgcgaagaaacacggaagaagccgaaaatgagtattgtcgccagcgcccagccaggtggtgaacctctttgcacagtagacgtgtag

SEQ ID NO: 212851 - DNA, 2322 bp, Artificial Sequence
  derived and/or modified sequence
atggagaccgacgagagccccagccccctgccctgcggccccgccggcgaggccgtgatggagagcagagccagacccttccaggccctgcccagagagcagagcccccccccccccctgcagaccagcagcggcgccgaggtgatggacgtgggcagcggcggcgacggccagagcgagctgcccgccgaggaccccttcaacttctacggcgccagcctgctgagcaagggcagcttcagcaagggcagactgctgatcgaccccaactgcagcggccacagccccagaaccgccagacacgcccccgccgtgagaaagttcagccccgacctgaagctgctgaaggacgtgaagatcagcgtgagcttcaccgagagctgcagaagcaaggacagaaaggtgctgtacaccggcgccgagagagacgtgagagccgagtgcggcctgctgctgagccccgtgagcggcgacgtgcacgcctgccccttcggcggcagcgtgggcgacggcgtgggcatcggcggcgagagcgccgacaagaaggacgaggagaacgagctggaccaggagaagagagtggagtacgccgtgctggacgagctggaggacttcaccgacaacctggagctggacgaggagggcgccggcggcttcaccgccaaggccatcgtgcagagagacagagtggacgaggaggccctgaacttcccctacgaggacgacttcgacaacgacgtggacgccctgctggaggagggcctgtgcgcccccaagaagagaagaaccgaggagaagtacggcggcgacagcgaccaccccagcgacggcgagaccagcgtgcagcccatgatgaccaagatcaagaccgtgctgaagagcagaggcagaccccccaccgagcccctgcccgacggctggatcatgaccttccacaacagcggcgtgcccgtgtacctgcacagagagagcagagtggtgacctggagcagaccctacttcctgggcaccggcagcatcagaaagcacgacccccccctgagcagcatcccctgcctgcactacaagaagatgaaggacaacgaggagagagagcagagcagcgacctgacccccagcggcgacgtgagccccgtgaagcccctgagcagaagcgccgagctggagttccccctggacgagcccgacagcatgggcgccgaccccggcccccccgacgagaaggaccccctgggcgccgaggccgcccccggcgccctgggccaggtgaaggccaaggtggaggtgtgcaaggacgagagcgtggacctggaggagttcagaagctacctggagaagagattcgacttcgagcaggtgaccgtgaagaagttcagaacctgggccgagagaagacagttcaacagagagatgaagagaaagcaggccgagagcgagagacccatcctgcccgccaaccagaagctgatcaccctgagcgtgcaggacgcccccaccaagaaggagttcgtgatcaaccccaacggcaagagcgaggtgtgcatcctgcacgagtacatgcagagagtgctgaaggtgagacccgtgtacaacttcttcgagtgcgagaaccccagcgagcccttcggcgccagcgtgaccatcgacggcgtgacctacggcagcggcaccgccagcagcaagaagctggccaagaacaaggccgccagagccaccctggagatcctgatccccgacttcgtgaagcagaccagcgaggagaagcccaaggacagcgaggagctggagtacttcaaccacatcagcatcgaggacagcagagtgtacgagctgaccagcaaggccggcctgctgagcccctaccagatcctgcacgagtgcctgaagagaaaccacggcatgggcgacaccagcatcaagttcgaggtggtgcccggcaagaaccagaagagcgagtacgtgatggcctgcggcaagcacaccgtgagaggctggtgcaagaacaagagagtgggcaagcagctggccagccagaagatcctgcagctgctgcacccccacgtgaagaactggggcagcctgctgagaatgtacggcagagagagcagcaagatggtgaagcaggagaccagcgacaagagcgtgatcgagctgcagcagtacgccaagaagaacaagcccaacctgcacatcctgagcaagctgcaggaggagatgaagagactggccgaggagagagaggagaccagaaagaagcccaagatgagcatcgtggccagcgcccagcccggcggcgagcccctgtgcaccgtggacgtgtag

SEQ ID NO: 212852 - DNA, 4514 bp, Artificial Sequence
  derived and/or modified sequence
aggcccgccctccgctcgcccggcgcggcaggcgggtgccggcgaccggagagcctggacaggctttccagatggctgcggcggtcggtcggtgaggctttcccggctgtggtttggctgcgggcggcttgggcagcccgcgggcgcctcaggtagaagaagaaaggtgccactccggcatgaagacagactcgcttagtcgccagtcacttaagctgagtgcattgtgatttccaataattgaggcagtggttctaaaagctgtctacattaatgaaaagagcaatgtggccagcttgactaagccgccagcgcacagcgcggcaggacgcgcccgggtctcagcggacttgtgcatgttagctgtgtagatttatgtgagggcttgtaaaactctggtcttgtaaactagtcttaagcgcttttaatatggagacagatgagagcccctctccgctcccgtgtgggcccgcaggagaagcggtgatggagagccgagctcgccccttccaagcgctgccccgtgagcagtctccaccacctcccctgcaaacgtccagtggtgcagaggtaatggacgttggctctggtggtgatggacagtccgaactccctgctgaggaccccttcaacttctacggagcttctcttctctccaaaggatccttctctaagggccgcctcctcatagacccgaactgtagtggccacagcccgcgcaccgcccggcacgcacctgcggtccggaagttctcccctgaccttaagttgcttaaggatgtaaagattagcgtgagctttaccgagagctgcaggagtaaggacaggaaggtgctgtacacaggagcagagcgcgacgtgcgggcggagtgcggtctgctccttagccctgtcagtggggacgtgcatgcttgtccctttggcgggagtgttggtgacggggtaggcatagggggtgagagtgctgataagaaggatgaggagaatgagctggatcaggaaaagagagtggagtatgcagtgctcgatgagttagaagattttactgacaatttggagctagatgaagaaggagcaggcgggttcacggctaaagcaatcgttcagagagacagagtggatgaagaggccttgaatttcccctacgaggatgactttgacaacgatgtggatgctctgctggaagaaggcctttgtgcccccaaaaagaggcgaacagaggaaaaatatggcggagacagcgaccatccgtccgatggagagacaagtgtgcagccgatgatgaccaagattaaaacagtgctcaaaagtcgtggccgcccacctacagagccgctgcccgacgggtggatcatgacattccataactctggagtcccggtgtacctacacagagagtctcgggtggtcacctggtccaggccatacttcttgggaacgggaagcatacggaaacacgaccctcctctgagtagcatcccttgtctgcattataagaaaatgaaggacaacgaggaacgggagcaaagcagtgacctcacccctagtggggatgtgtcccccgtcaagcccctgagccgatctgcagagctggagtttcccctggatgagcctgactctatgggtgctgacccggggcccccggacgagaaagacccactaggggctgaggcagcccctggggccctggggcaggtgaaggccaaagtcgaggtgtgcaaagatgaatccgttgatctcgaggaatttcgaagctacctggagaagcgttttgactttgagcaagttactgtgaaaaaattcaggacttgggctgagcggcggcaattcaatcgggaaatgaagcggaagcaggcggagtccgagaggcccatcttgccagccaatcagaagctcattactttatcagtgcaagatgcacccacaaagaaagagtttgttattaaccccaacgggaaatccgaggtctgcatcctgcacgagtacatgcagcgtgtcctcaaggtccgccctgtctataatttctttgaatgtgagaacccaagtgagccttttggtgcctcggtgaccattgatggtgtgacttacggatctggaactgcaagcagcaaaaaacttgcgaagaataaagctgcccgagctacactggaaatcctcatccctgactttgttaaacagacctctgaagagaagcccaaagacagtgaagaactcgagtattttaaccacatcagcatcgaggactcgcgggtctacgagctgaccagcaaggctgggctgttgtctccatatcagatcctccacgagtgccttaaaagaaaccatgggatgggtgacacgtctatcaagtttgaagtggttcctgggaaaaaccagaagagtgaatacgtcatggcgtgtggcaagcacacagtgcgcgggtggtgtaagaacaagagagttggaaagcagttagcctcacagaagatccttcagctgctgcacccacatgtcaagaactgggggtctttactgcgcatgtatggccgtgagagcagcaagatggtcaagcaggagacatcggacaagagtgtgattgagctgcagcagtatgccaagaagaacaagcccaacctgcacatcctcagcaagctccaagaggagatgaagaggctagctgaggaaagggaggagactcgaaagaagcccaagatgtccattgtggcgtccgcccagcctggcggtgagcccctgtgcaccgtggacgtgtgagggaggtggcacgggccagggcgcgggggccgccagccgcacttctgaggagaccagcagtcatgcatcgtgcaccacagtgtcaggcctccaacccacgctccttccctgtggccaacctgtgggcccggccttagggtggaggctttagtgtacagggacagccatggccacacagcacacatgtggagcagcggctctccctggaaagctccaggcctgaatggatggactcagcgactgcaccagtggcagctggtgactgtggacagtggtggaccctgcttctgtgcacctgctgcaggctctttttatgaaggctttcatgaattttagtatgtaatacgcactgacgacacatgatgcttggatgacagatgagaggggatggctgagtcctgtggctggcccgtgatgccaggtggcccatgtgcccagggcgcctgcagggctgctacagggacctggtcaggaggtgcacatggtgccctgccctcacccaccctctgtgtttccccttctttgaaaaggtagaagagaaaggaatattttaaacctttttggcttaaacagaattttagcatcagaactagctttctgggattggaggcaaaccatcaaggtggtccctctccagtctggacacgatgccagcaaggatgacgtcctgccacctcctggagttaccctggcctcctagggtccctttttctgatgaagtcttaattccctaaaagcgcctctttggacactgaggccctctctgcctttcctggcctccggcaacagttttttacaaagattttttgcagtcgagtccatatgtccacccattgatttttaaagcttttgtgatattttagcattttgaaagactttcacagtgagagtagaaggtagatttggaatcatgcattttagcaagtggacttgttgaaacaggaagcaagggccttcagtgtagcccattcttgatccagagctgttgcctgtgacagcggtttctctggatgtcaaaggcagctgcctggtgcccagcttgcttctcgactggtggcccctatgggtgggtgtgcgatggaaatgtgttcctgccggagtctgaggcaccagggtgtgctcaaaggctggccctggtggtggactggcacctgtgcagagtgccgtgtgcttgtggtgcgccatctgaagcaagagtccagcgttctgccgtgtctgtcccccaccatgccccctacaggcggtactgatggcgcttttttttttttttctgtcaggaaaacaatgttggcctgtgggccgcccacaacatatccttccctcactacctgtgtgaccaaggttggcttctgttgacctttaaaaaagaaaccctcaactcaaattgctataattagacacttgcttctgtcttgcctcctgtctgcagctgtgaatagtcatttgactgtgactgttgcccttagccagccagatgcgcctgtgaaccaaagcttcgtgcacatgtgttcccctaaaggttggggagcctcgctgtgtcttgctgttcccaggcaccaccacagcaggtgctgccatactcttgtggtctctgtgcgccccccccccccccccacccgtctgccaagcatgggtatgaatcgtgcacacagccatgcttcaaggccggggcaggggagcctgtgctgatgccatccagggcactgggctgtgcctggaaggcgagccttgattgtctgaacacataaagcaaactgtccaga

SEQ ID NO: 212853 - protein, 374 aa, Artificial Sequence
  derived and/or modified sequence
MESLLQHLDRFSELLAVSSTTYVSTWDPATVRRALQWARYLRHIHRRFGRHGPIRTALERRLHNQWRQEGGFGRGPVPGLANFQALGHCDVLLSLRLLENRALGDAARYHLVQQLFPGPGVRDADEETLQESLARLARRRSAVHMLRFNGYRENPNLQEDSLMKTQAELLLERLQEVGKAEAERPARFLSSLWERLPQNNFLKVIAVALLQPPLSRRPQEELEPGIHKSPGEGSQVLVHWLLGNSEVFAAFCRALPAGLLTLVTSRHPALSPVYLGLLTDWGQRLHYDLQKGIWVGTESQDVPWEELHNRFQSLCQAPPPLKDKVLTALETCKAQDGDFEVPGLSIWTDLLLALRSGAFRKRQVLGLSAGLSSV

SEQ ID NO: 212854 - DNA, 3309 bp, Artificial Sequence
  derived and/or modified sequence
tgaaagcggaagtagggccttcgcgcacctcatggaatcccttctgcagcacctggatcgcttttccgagcttctggcggtctcaagcactacctacgtcagcacctgggaccccgccaccgtgcgccgggccttgcagtgggcgcgctacctgcgccacatccatcggcgctttggtcggcatggccccattcgcacggctctggagcggcggctgcacaaccagtggaggcaagagggcggctttgggcggggtccagttccgggattagcgaacttccaggccctcggtcactgtgacgtcctgctctctctgcgcctgctggagaaccgggccctcggggatgcagctcgttaccacctggtgcagcaactctttcccggcccgggcgtccgggacgccgatgaggagacactccaagagagcctggcccgccttgcccgccggcggtctgcggtgcacatgctgcgcttcaatggctatagagagaacccaaatctccaggaggactctctgatgaagacccaggcggagctgctgctggagcgtctgcaggaggtggggaaggccgaagcggagcgtcccgccaggtttctcagcagcctgtgggagcgcttgcctcagaacaacttcctgaaggtgatagcggtggcgctgttgcagccgcctttgtctcgtcggccccaagaagagttggaacccggcatccacaaatcacctggagaggggagccaagtgctagtccactggcttctggggaattcggaagtctttgctgccttttgtcgcgccctcccagccgggcttttgactttagtgactagccgccacccagcgctgtctcctgtctatctgggtctgctaacagactggggtcaacgtttgcactatgaccttcagaaaggcatttgggttggaactgagtcccaagatgtgccctgggaggagttgcacaataggtttcaaagcctctgtcaggcccctccacctctgaaagataaagttctaactgccctggagacctgtaaagcgcaggatggagattttgaagtacctggtcttagcatctggacagacctcttattagctcttcgtagtggtgcatttaggaaaagacaagttttgggtctcagcgcaggcctcagttctgtataggcaatgctgtgttattacttgaatatagaatatatagtttacaaaatgaaaattacaatgttctcaccaaatatatgccttcgtgtgtccaaagtataattattttagatgctaattttgaatagtttattaaacagttataaatatgcaaagtagctggcatgtagtgtcacggattttctggatagaggaagtgattggaagtactccacttaaagccatggaattagcaatagtttgctttttaatagaaggcccatttgtaagaatgttgaaaatatgtgtaccgtttaaagaaaaagcagctttaaagtgacaaacaaaataccctttttcttttagtatggtttatttttctaggttttctgtccctccctcagtagtgaagagttttctttattcctggcagtgtcaggaatattggtttgaaaagctgttggcctatctggagtttggccttgttaacctagtattctaaccagttaaccagccttagtatgcattaaaattgtattgttcagaaagtttgtttctcattttctgcaaattcttactttgaaaatgaatcaccacatagtatgtccctttaaagcattgacgcacagacaaatgtttaaagcacagtaaatacgaatatatgcctttggatattaaattaatgcttgatgataaaagaatcaaacttttttttttttgagatggagtctcgctctgtcacccagactggagtgcagtggtgtgatcactgctcagtgcaacctctgcctcccaggatcaagcaattctgactcagcctcccaagtagctgggattacaggcgcaggccaccatgcccggctaattttttgtatttttagtagagacggggtttcaccatgctggccaggctggtctcaaacacctgaccttgtgatccgtccgccttggcctcccaaagtgctgggattacaggcgtgagccaccgcgcctggccaaaacaacattttaagtagaagatccaggttttagtgcagcttctgccgttaactaggttaataaatcacaaccttggggccacagttgccttatatgtaaatgaagtgtttagaataaaatagttaaatttccttatttttcccttggtggctgccctgtggaaacagtttagaatatttgttttgtgtgtaggaacctagttgtgttagtttacctgggtgttccacagctgatagtgattgccttgaataaattcaagggcaatttattcatttttactagggagatagacctttacagcaatcaagatatttttgtccatatccaggttagctggtaagaggatttttttggagaaaaaaatgatatttagaaagttaatttctaattccggaatggaataaaaacaatatgagtagtgtaatcttgtagaaaaagagttgtataatcttgtagaatttctcattctgtggtacaacccaggggtaaactattattccagtagtcagtacacttttctagataaatcttgagtgaaaaccagcaatttctttttccttgtggtctgattcctttttctaatccatgaaggccatcttgtagattacatttatcattaatgcaagaataaagacaattcctcctgtcagttgcgtgaattttttttaagaaacaacccagtgaagagttctaccatagcaaggcctaatgttagctttagctttagaaaataacagtttgtgaacttacttccctatatttgcagctgtatctcacactatgatttacaataaaattgtaaagattgacaatagacttaagaaataacattttaaaatctattttatacttaccatttattattctgttattttagtctccatatgttcattacatacataatcttatttaatcttcacaccaaaactgtattcttatgaatatacgctaaaagattaagtaaaatgcccaagggtataaacaaaagcaacatgaaagtggaagccgtatctgtcatttattttatttccagaagcctagcacagtgtccagcatatggtagatacttgtagtgtttgaataaatgaaaccagcattagagctttatatactttctcttaaggacttgaaaagattaggaatctacgcatacactgagagagaaaaaagtgagagga

SEQ ID NO: 212855 - DNA, 1125 bp, Artificial Sequence
  derived and/or modified sequence
atggagtccttgctccaacaccttgatcgattctctgagcttttggccgtttccagcacaacatatgtatctacctgggaccccgccaccgtccggagggccctgcagtgggctaggtatttgaggcatatccacagaagatttggtcggcacggtcccatcagaacagccctggagagacggctgcataaccagtggcgccaggaagggggttttggtcggggccctgtgccaggcctggcgaatttccaggccctcgggcattgcgacgtactgctctctctgcggctgcttgaaaatagggccctgggtgatgcagcccgctaccacctggtgcagcagttatttccaggcccaggggttagagatgcggacgaagagactctgcaagaaagtctggctagactggcgcggaggcgatccgctgtgcatatgctgcgctttaacggatatagggagaatccgaatctgcaggaggacagtctgatgaaaacacaggccgaacttctcctcgaacggttgcaagaggtggggaaagctgaggccgagcggcccgccagattcttatcgagcctctgggaaagacttcctcaaaacaattttctgaaagtgatagccgtggccttattgcaaccccctctgtcccggaggccacaagaagaactggagcccggcattcataaaagccccggggagggttcccaggttctggtgcactggctgctgggaaacagcgaggtctttgccgccttttgtagagccttgccagcaggattgctcacactggtgacaagccgtcaccctgctctcagtccggtgtacttgggactgttgactgattggggacagcggttgcattatgacctgcagaaaggaatatgggtaggcaccgaatcacaggatgtgccctgggaagagctgcataaccgatttcaatcgctgtgccaagcccctcctcctctcaaagacaaggtactgaccgcgcttgaaacgtgtaaggcccaggatggtgacttcgaggttcctggactttccatctggacagatctccttctcgcactacgctctggcgccttcaggaaacggcaggtactcgggctctccgccgggctgagtagtgtttag

SEQ ID NO: 212856 - DNA, 1125 bp, Artificial Sequence
  derived and/or modified sequence
atggagagcctgctgcagcacctggaccgcttcagcgagctgctggccgtgagcagcaccacctacgtgtccacctgggaccctgccaccgtgcggcgggccctgcagtgggcccgctacctgcggcacatccaccggcgcttcggcagacatggccccatcagaacagccctggagcggcggctgcacaaccagtggaggcaggagggcggcttcggccggggccctgtgcccggcctggccaacttccaggccctgggccactgtgatgtgctgctgagcctgcggctgctggagaacagagccctgggagatgctgcccgctaccacctggtgcagcagctgtttcctggccctggggtgagagatgctgatgaggagaccctgcaggagagcctggcccggctggccaggagaagatctgctgtgcacatgctgcgcttcaacggctaccgggagaaccccaacctgcaggaggacagcctgatgaagacccaggccgagctgctgctggagcggctgcaggaggtgggcaaggccgaggccgagaggcctgcccgcttcctgagcagcctgtgggagcggctgccccagaacaacttcctgaaggtgattgctgtggccctgctgcagccccccctgagccggcggccccaggaggagctggagcccggcatccacaagagccctggagagggcagccaggtgctggtgcactggctgctgggcaacagcgaggtgtttgctgccttctgccgggccctgcctgctggcctgctgaccctggtgaccagccgccacccagccctgagccctgtgtacctgggcctgctgacagactggggccagaggctgcactatgacctgcagaagggcatctgggtgggcacagagagccaggatgtgccctgggaggagctgcacaaccgcttccagagcctgtgccaggcccccccacccctgaaggacaaggtgctgacagccctggagacctgcaaggcccaggatggagactttgaggtgcccggcctgagcatctggacagacctgctgctggccctgcggagcggggccttcaggaagaggcaggtgctgggcctgtctgctggcctgagctctgtgtag

SEQ ID NO: 212857 - DNA, 1125 bp, Artificial Sequence
  derived and/or modified sequence
atggagagcctgctgcagcacctggaccggttcagcgagctgctggctgtttcgagcaccacatatgtttcaacttgggatccggcaactgtgcgccgggccctgcagtgggcgcggtacctgcggcatatccaccgaagatttgggaggcacggtcctattcggacagcactggaacgacgtctacacaaccagtggagacaggagggagggttcggccgtggaccagtgccgggcctggccaacttccaggccctgggacactgcgatgtcctgctatcactccgactgctggaaaacagagcactgggcgatgcggcccggtaccatctggtccagcaattattccccgggcccggagtgcgggacgccgatgaggagacattgcaagaatcccttgctcgacttgctcgccgtcggtcagccgtgcacatgttgagatttaacggctaccgggagaaccccaatctgcaggaagattcacttatgaagacacaagccgagctgcttctcgagcgcctgcaggaggtcggcaaggctgaggctgaaagacccgccaggttcttgagttccctatgggagaggctgccccagaataacttcctcaaggttatcgcggtggccctcttgcagcctcccctctcaagacgcccacaagaggaactggagccggggattcataaaagccccggcgaaggttctcaggtcctggtccattggctgctcgggaattcggaagttttcgccgctttctgcagggccctgccggcagggttgctcaccttggtcactagcagacaccctgccttgagcccagtctacctcggcctacttactgattgggggcagcggttacattacgacctgcaaaaagggatctgggtgggaaccgagtctcaagacgttccatgggaagagctccataatcgcttccagtccctgtgccaagcacctccccctctgaaggacaaggtgctaaccgccctggaaacttgcaaagcacaagacggcgactttgaggtgccgggcctctcaatttggacggatctccttctggcgctgagatccggcgccttccggaaaagacaagtcctgggattgagtgcaggcttaagcagcgtgtag

SEQ ID NO: 212858 - DNA, 1125 bp, Artificial Sequence
  derived and/or modified sequence
atggaaagccttctacagcacctcgaccgcttcagtgagttgttggccgtaagcagcaccacatacgtgtcgacttgggaccctgccactgtgagacgagccctgcaatgggctcgctacttaagacatatccacagacgctttggcaggcacggacctatccgcactgcgctggaaaggcgtctgcataaccaatggagacaggagggtggcttcggacgcggaccagtcccaggcctagcaaatttccaggcactggggcactgtgacgtgctgctgagcctccggttactcgagaatagagcactaggagacgctgctaggtatcacttggtgcagcagctatttccgggacccggagtacgggacgcagacgaagagaccctgcaggaatcacttgcacgccttgctcgcaggcggagcgcggtgcatatgcttagattcaatggctatcgagaaaaccctaatctgcaagaggactctctcatgaaaacccaggccgagctcctgctggagagactacaagaagtgggtaaggcggaggccgaaagaccggcacgctttctgtcctccctgtgggaacgactgccacagaacaatttcctgaaagtgatcgccgtagcgctgttacaaccccctctgtccaggcggccacaggaggagttggaacccggtattcataagagtcctggagagggatcccaggtgcttgtccattggctgctgggcaattccgaggtcttcgccgctttctgcagggctctgccggcaggattgctgacactggttacatcaagacacccagccctgagccccgtgtacttgggactgcttactgactggggacaacgcctccattacgatctccaaaagggaatttgggtcggaaccgaaagccaggatgtaccatgggaagagctgcataataggtttcagtctctgtgtcaggcaccaccccctcttaaagataaggtactaacggcactggagacatgcaaggctcaggatggggacttcgaggtgccaggactgagcatctggaccgacctgctcctcgcattacgcagtggcgctttcaggaagaggcaggtgctgggcctgagcgccggactgtcttccgtttag

SEQ ID NO: 212859 - DNA, 1125 bp, Artificial Sequence
  derived and/or modified sequence
atggagagcctgctgcagcacctggacagattcagcgagctgctggccgtgagcagcaccacctacgtgagcacctgggaccccgccaccgtgagaagagccctgcagtgggccagatacctgagacacatccacagaagattcggcagacacggccccatcagaaccgccctggagagaagactgcacaaccagtggagacaggagggcggcttcggcagaggccccgtgcccggcctggccaacttccaggccctgggccactgcgacgtgctgctgagcctgagactgctggagaacagagccctgggcgacgccgccagataccacctggtgcagcagctgttccccggccccggcgtgagagacgccgacgaggagaccctgcaggagagcctggccagactggccagaagaagaagcgccgtgcacatgctgagattcaacggctacagagagaaccccaacctgcaggaggacagcctgatgaagacccaggccgagctgctgctggagagactgcaggaggtgggcaaggccgaggccgagagacccgccagattcctgagcagcctgtgggagagactgccccagaacaacttcctgaaggtgatcgccgtggccctgctgcagccccccctgagcagaagaccccaggaggagctggagcccggcatccacaagagccccggcgagggcagccaggtgctggtgcactggctgctgggcaacagcgaggtgttcgccgccttctgcagagccctgcccgccggcctgctgaccctggtgaccagcagacaccccgccctgagccccgtgtacctgggcctgctgaccgactggggccagagactgcactacgacctgcagaagggcatctgggtgggcaccgagagccaggacgtgccctgggaggagctgcacaacagattccagagcctgtgccaggcccccccccccctgaaggacaaggtgctgaccgccctggagacctgcaaggcccaggacggcgacttcgaggtgcccggcctgagcatctggaccgacctgctgctggccctgagaagcggcgccttcagaaagagacaggtgctgggcctgagcgccggcctgagcagcgtgtag

SEQ ID NO: 212860 - protein, 314 aa, Artificial Sequence
  derived and/or modified sequence
MGLLDSEPGSVLNVVSTALNDTVEFYRWTWSIADKRVENWPLMQSPWPTLSISTLYLLFVWLGPKWMKDREPFQMRLVLIIYNFGMVLLNLFIFRELFMGSYNAGYSYICQSVDYSNNVHEVRIAAALWWYFVSKGVEYLDTVFFILRKKNNQVSFLHVYHHCTMFTLWWIGIKWVAGGQAFFGAQLNSFIHVIMYSYYGLTAFGPWIQKYLWWKRYLTMLQLIQFHVTIGHTALSLYTDCPFPKWMHWALIAYAISFIFLFLNFYIRTYKEPKKPKAGKTAMNGISANGVSKSEKQLMIENGKKQKNGKAKGD

SEQ ID NO: 212861 - DNA, 945 bp, Artificial Sequence
  derived and/or modified sequence
atggggcttctcgattctgagcctggcagtgttctgaatgtggtatctacagcactgaacgataccgtggagttttatcgctggacctggagtatagccgataagcgggtcgagaattggccactgatgcaaagtccttggcctactctgagcattagtaccctttacttgctgttcgtgtggcttggacctaaatggatgaaggacagggagccttttcaaatgaggctcgtgctgattatttacaactttgggatggtcctgttgaatctattcatttttagagaactcttcatgggctcctacaacgccgggtacagctacatatgccaatccgtcgactattccaataatgtgcacgaggtgcgaattgcggctgccctgtggtggtattttgtaagcaagggagtggagtacctagatacagtgttctttatcctcagaaagaagaacaatcaggtaagtttcctccacgtctatcaccattgcacaatgttcaccctctggtggattggaatcaagtgggtcgcagggggacaggcattcttcggagctcagttgaactccttcatacacgtgatcatgtatagctactatggactgactgcctttgggccttggattcagaaatacctctggtggaagcgatatctgactatgctgcagctgatccagtttcacgtgacgattggtcacaccgctctgagcctgtacaccgattgcccattccccaaatggatgcactgggcgcttatcgcatacgccatctcttttatctttctgtttctcaacttctatattaggacctataaggagcccaaaaagccaaaggctggcaagaccgcaatgaacgggatttctgctaacggagtctcaaagtctgagaagcagctgatgatcgagaacggcaagaagcaaaaaaatggcaaggccaaaggtgattag

SEQ ID NO: 212862 - DNA, 945 bp, Artificial Sequence
  derived and/or modified sequence
atgggcctgctggacagcgagcccggctctgtgctgaatgtggtgtccacagccctgaatgacacagtggagttctaccgctggacctggagcattgctgacaagagggtggagaactggcccctgatgcagagcccctggcccaccctgagcatcagcaccctgtacctgctgtttgtgtggctgggccccaagtggatgaaggaccgggagcccttccagatgaggctggtgctgatcatctacaactttggcatggtgctgctgaacctcttcatcttccgggagctgttcatgggcagctacaatgccggctacagctacatctgccagagcgtggactacagcaacaacgtgcatgaggtgagaattgctgctgccctgtggtggtactttgtgtccaaaggagtggagtacctggacaccgtcttcttcatcctgaggaagaagaacaaccaggtgtccttcctgcacgtgtaccaccactgcaccatgttcaccctgtggtggattggcatcaagtgggtggccggcggccaggccttctttggagcccagctgaacagcttcatccacgtgatcatgtacagctactacggcctgacagccttcggcccctggatccagaagtacctgtggtggaagcgctacctgaccatgctgcagctgatccagttccacgtgaccatcggccacacagccctgagcctgtacacagactgccccttccccaagtggatgcactgggccctgattgcctatgccatctccttcatcttcctgttcctgaacttctacatccgcacctacaaggagcccaagaagcccaaggccggcaagacagccatgaatggcatcagcgccaatggagtgtccaagtctgagaagcagctgatgattgaaaatggcaagaagcagaagaatggcaaggccaagggggactag

SEQ ID NO: 212863 - DNA, 945 bp, Artificial Sequence
  derived and/or modified sequence
atgggcctgctggacagcgagcccggcagcgtgctgaacgtggtgtcgacagccttgaatgacacagtggaattctataggtggacctggtccattgcagacaagagagtagagaactggcctctgatgcaatccccatggccaacactgtctatcagcacattgtacctgctgttcgtctggctgggccccaagtggatgaaagaccgggaacccttccagatgcgcctggtccttatcatttacaatttcggaatggttcttctcaacttgtttattttccgggagctgtttatgggatcttacaacgccggatatagctacatctgtcagtctgtggattattcgaataatgtccacgaggtgagaattgctgccgccctatggtggtacttcgtcagcaaaggggtggaatatctagacaccgtttttttcatcctccgaaagaagaataatcaggtgtcctttctgcatgtgtaccaccactgcactatgtttaccctgtggtggattggtatcaagtgggtggccggaggacaagccttctttggggcgcagctaaacagctttatccatgtgattatgtattcctattatgggctaactgcttttggtccttggatacagaaatacctctggtggaaaagatacctcactatgctgcagctgatccagtttcacgttaccatcggtcacacagccctttcactgtataccgactgtccattcccaaagtggatgcactgggcattgatcgcctatgcgatatcctttatctttctgttcttgaacttttacattaggacctacaaggagcccaaaaagccgaaagcgggaaagactgccatgaacggcataagcgcaaatggcgtaagcaagagcgaaaaacagctgatgattgagaatggcaaaaaacagaaaaacggaaaagccaaaggggattag

SEQ ID NO: 212864 - DNA, 945 bp, Artificial Sequence
  derived and/or modified sequence
atgggacttctcgactcagagcctgggagtgtgttaaacgtcgtgtcaacagcattgaacgacactgtggagttctaccgctggacttggtccatagccgacaaacgggtcgagaactggccgctgatgcagtcaccctggcccaccctttctatatctacgctctatttgctgtttgtctggctgggccctaagtggatgaaagatcgggagcctttccagatgcggctggttctcataatatataactttggcatggtgctgctcaacctctttatattccgtgagctgttcatgggtagctacaacgccggttattcttatatttgccagtctgtggactatagcaacaatgtgcacgaagttcgcatcgccgcagctctctggtggtactttgtttccaagggggtcgagtatctggacacagtcttctttatattgcgtaagaagaataatcaggtgtctttcctccacgtgtatcaccactgcactatgtttactctgtggtggataggaattaagtgggttgcaggaggacaggcctttttcggtgcccagctgaacagtttcattcatgtgatcatgtatagctattacggcctgaccgcatttggcccttggatccagaagtacctgtggtggaaacgttatctgaccatgttgcaactcatacagttccatgtgaccatcggccacactgccctgagtttgtataccgactgtccctttcccaaatggatgcactgggccctcatagcctatgcaatatccttcatttttttatttcttaacttttacataaggacctacaaggaacctaagaaaccaaaggccggaaaaactgcaatgaatggtatctccgccaatggagtgagcaagagcgaaaaacagctgatgatcgagaacgggaaaaaacagaaaaacggcaaagcgaagggcgactag

SEQ ID NO: 212865 - DNA, 945 bp, Artificial Sequence
  derived and/or modified sequence
atgggcctgctggacagcgagcccggcagcgtgctgaacgtggtgagcaccgccctgaacgacaccgtggagttctacagatggacctggagcatcgccgacaagagagtggagaactggcccctgatgcagagcccctggcccaccctgagcatcagcaccctgtacctgctgttcgtgtggctgggccccaagtggatgaaggacagagagcccttccagatgagactggtgctgatcatctacaacttcggcatggtgctgctgaacctgttcatcttcagagagctgttcatgggcagctacaacgccggctacagctacatctgccagagcgtggactacagcaacaacgtgcacgaggtgagaatcgccgccgccctgtggtggtacttcgtgagcaagggcgtggagtacctggacaccgtgttcttcatcctgagaaagaagaacaaccaggtgagcttcctgcacgtgtaccaccactgcaccatgttcaccctgtggtggatcggcatcaagtgggtggccggcggccaggccttcttcggcgcccagctgaacagcttcatccacgtgatcatgtacagctactacggcctgaccgccttcggcccctggatccagaagtacctgtggtggaagagatacctgaccatgctgcagctgatccagttccacgtgaccatcggccacaccgccctgagcctgtacaccgactgccccttccccaagtggatgcactgggccctgatcgcctacgccatcagcttcatcttcctgttcctgaacttctacatcagaacctacaaggagcccaagaagcccaaggccggcaagaccgccatgaacggcatcagcgccaacggcgtgagcaagagcgagaagcagctgatgatcgagaacggcaagaagcagaagaacggcaaggccaagggcgactag

SEQ ID NO: 212866 - DNA, 3042 bp, Artificial Sequence
  derived and/or modified sequence
agattggaggggcggctgcgcgaggctgcagactggtgcagcgcactgtgctggcggctgggcctcctccacctcctcgtctttctcccgggaaccttgacgacgccttccgcttggccctgccttctgccgcatccccgccgccgcggcgccttgaggagcaggagaagacgcagccgggccgccgccgttagaggggttcccggccgccgctcgccccgtcggccgccaccgcctccggggtcagccctctctctgggtctccgctttctcctgccgccagcgcccgctcatcgccgcgatggggctcctggactcggagccgggtagtgtcctaaacgtagtgtccacggcactcaacgacacggtagagttctaccgctggacctggtccatcgcagataagcgtgtggaaaattggcctctgatgcagtctccttggcctacactaagtataagcactctttatctcctgtttgtgtggctgggtccaaaatggatgaaggaccgagaaccttttcagatgcgtctagtgctcattatctataattttgggatggttttgcttaacctctttatcttcagagagttattcatgggatcatataatgcgggatatagctatatttgccagagtgtggattattctaataatgttcatgaagtcaggatagctgctgctctgtggtggtactttgtatctaaaggagttgagtatttggacacagtgttttttattctgagaaagaaaaacaaccaagtttctttccttcatgtgtatcatcactgtacgatgtttaccttgtggtggattggaattaagtgggttgcaggaggacaagcattttttggagcccagttgaattcctttatccatgtgattatgtactcatactatgggttaactgcatttggcccatggattcagaaatatctttggtggaaacgatacctgactatgttgcaactgattcaattccatgtgaccattgggcacacggcactgtctctttacactgactgccccttccccaaatggatgcactgggctctaattgcctatgcaatcagcttcatatttctctttcttaacttctacattcggacatacaaagagcctaagaaaccaaaagctggaaaaacagccatgaatggtatttcagcaaatggtgtgagcaaatcagaaaaacaactcatgatagaaaatggaaaaaagcagaaaaatggaaaagcaaaaggagattaaattgaactgggccttaactgttgttgacagtgaggaaaaactcccatatcatataaaatttcagggaaaacagaagcaaaggagagcttgggggtggggagaaaagacaaatgtgctctatgtcctagtaactcttagactgagtaaagtgttaataccatacccagatgttttatttatgaagtttttattttaaacattttttttaaaaattagccttgatattctccagaccaaagcaatcattaagtgactttggggattctccccctgttcacatccagttgtctaaaggatgagatttttcatgtatcttatagtcactcattcttcggtctgaattttagacgatcacagaaacggtctttatgaattattttgataaattactaattatcttatctactgactgaaatcagtggtgttacattttcttgtccaaagctgaaaatgtgtatacacttaaacttgcacatttgaattcatttgctgaccggaatggtcaaatctctccacctctagtcagagtataattttggttgtaattaaatttttaaaatctgctgatctctgtagaatcttagaggcttgatgatgatggtgttggtgaaaataagaaagaattgcagtaaagtcttgtctggtgacccagagatcaccatgacttgaggcacaaatcactgtggggaaacaattttttgtgatgaaaaggcagcatttgaatactcctgttagtagcagaaatatattatgaaaattaagattattgtctgattgaaacatgaaacaactcatgtctttattagtaacatcataagatagttacatttatgtgctgttagaatatgttgatttttatcaggctttccttgttttgatttatggctgttcctgatttttcatatgtggaaatatacctacctcttccgttggaaagaacatttaaaattaaataaattttaattaaaaaatcaaggagtcttctaatgtaaattttaatgttaactttcaaatccactagtattttttttgcttttatgacaaatagcatacaccaaacatttctgtgaaactatccttctctttcaatgtgtttaattttggagtaacgttttccttgtgactaagttgcaagatcttatttattaactaggtatgaagtataaacccattttggtgcaatattcttgactccttggtgctaaagattgttaaattcaatgcttgatgttacaaggtgttgttaaaacacaaaatgaataaaagtgagagtagtcagaactataacattcaatttgctatttacaaatgaagtatttcatgtaatataagtgaacaactggaaataaagtaggaaagaatttgtatcatgttttactacataggttaattttttaagggatgttgcaaagggattactagagaaagacaaaatgtgaccaaaaaaaagcatgaatatttcttaagtatctcaacaacatgtcaaagctgcatgtgtaggatgtatgctgtttgtacaaactatttcagaatattttgtaagctataacatatttattgtgcattaaaattaaatactttttccccaaaggcatgcagtcatgagaattacagaaaatttgcaacatataaagtagtttgatctaagaggattcaacacctttgttttgttgctcagtgtgtaatgactgagatttgtaaatctttgtgaacattctgtactggttcccaagagctattcattccctgctacctgatttcagcacaataaatatacttctgctgtgggaaaaata

SEQ ID NO: 212867 - protein, 337 aa, Artificial Sequence
  derived and/or modified sequence
MLTLPFDESVVMPESQMCRKFSRECEDQKQIKKPESFSKQIVLRGKSIKRAPGEETEKEEEEEDREEEDENGLPRRRGLRKKKTTKLRLERVKFRRQEANARERNRMHGLNDALDNLRKVVPCYSKTQKLSKIETLRLAKNYIWALSEILRIGKRPDLLTFVQNLCKGLSQPTTNLVAGCLQLNARSFLMGQGGEAAHHTRSPYSTFYPPYHSPELTTPPGHGTLDNSKSMKPYNYCSAYESFYESTSPECASPQFEGPLSPPPINYNGIFSLKQEETLDYGKNYNYGMHYCAVPPRGPLGQGAMFRLPTDSHFPYDLHLRSQSLTMQDELNAVFHN

SEQ ID NO: 212868 - DNA, 2175 bp, Artificial Sequence
  derived and/or modified sequence
tgaaatgctggtgcagatttttttcctatcagtctaaccttctgtgttgatgcatgaaggctggtacccacttacagggatgccagatgatcagtgcagaatgaaggtcccaagagagaggatcacatggctctctctgccctgtgacgtcactagcagatggcatgggtaccagctctggcagttggcatcaatgtcactttttagagatcaatgagatagtgcagatatacacagatctagagactccaggagacgatgcgacactcagcctgaaaagatttggaagacccaaaatgaaaactgattattgaatgaaattaaaacctaaggtaatttaagattagagaaccatgttaacactaccgtttgatgagtctgttgtaatgccagaatcccagatgtgcagaaagttttctagagaatgcgaggaccagaagcaaattaagaagccagaaagcttttccaaacagattgtccttcgaggaaagagcatcaaaagggcccctggagaagaaaccgagaaagaagaagaggaggaagacagggaagaggaagatgaaaatgggttgcctagaaggaggggtcttaggaaaaaaaagacaacaaagctgcgattggaaagggtcaagttcaggagacaggaagcgaacgcgcgcgagaggaacaggatgcacggcctcaacgacgctctggacaacttaagaaaagtggtcccctgttattctaaaacccagaaactgtccaaaatagagactttacgactggccaaaaactacatctgggcactttctgaaattctgagaatcggcaagagaccagatctgctcacattcgtccaaaacttatgcaaaggtctttcccagccaactacaaacttggtggcaggctgcttgcagctcaacgccaggagtttcctgatgggtcagggtggggaggctgcacaccacacaaggtcaccctactctaccttctacccaccctaccacagccctgagctcaccactcccccagggcatgggactcttgataattccaagtccatgaaaccctacaattattgcagtgcgtatgaatccttctatgaaagtacttcccctgagtgtgccagccctcagtttgaaggtcccttaagtcctcccccaattaactataatgggatattttccctgaagcaagaagaaaccttggactatggtaaaaattacaattacggcatgcattactgtgcagtgccacccaggggtccccttgggcagggtgccatgttcaggttgcccaccgacagccacttcccttacgacttacatctgcgcagccaatctctcacaatgcaagatgaattaaatgcagtttttcataattaatgaggaaaatgaaaataaacagtggtcattcacctcccctgtctaattaagacaaagcagatgcttgtgggctgagtaattggcacaactctatctaaggtgtttactagtttctgaagtgtgtttcaactattgtgagaattttctatgtaataataaatctcttttcgtatgagaacttcttttcctttccttttgtctgtgaagcactgtgattctgtttctactggaaagatttttttctttttaattttcttttaaacttatttaatttgtttgaacaaggtgtctaagaatatactgttgaataaagacatgcacacagcataattcaatgtctattttggttgtacagtaattataaaatgcatgttattaaaaccagatgagtaaaatgatgtgtttataattattaggaattatatattatgtatcttttaaaaattgaaattttaaaatatggagaatatcactaagctgacaatgatattgggagatgaatttgcaacaatataaaaagctatgcaattttctttttattaaggatgaatctaaatgcattcaattggtaactattcctcttcaagtatttgcagatggggcaacatgatatttgggtagctgatgtcataattcggggacaattatctcaatcatcaagaaaaaaatttcagcacttgttttgtattattcagaaattaactgtacaggtttgttatcacaatgtataattgtgtttttccaccccacatttttaaggcaattaaatatagatatttccactcgtaaaaaaaaaaaaaaaaaaaaa

SEQ ID NO: 212869 - DNA, 1014 bp, Artificial Sequence
  derived and/or modified sequence
atgctaacccttcccttcgatgagtcagtcgtgatgccagagtctcagatgtgtcggaagttcagcagagagtgcgaagatcagaaacagattaagaagcccgagtccttttctaagcagattgttttgcgggggaaatccataaagcgagctcccggcgaagaaacagagaaagaggaggaggaagaagacagagaggaagaggacgagaatggtctgccaaggagacggggactgcgcaaaaagaagactactaagcttcgattggaacgagtgaagttccgtcgtcaggaggctaacgcccgtgaacgaaatagaatgcacggacttaatgatgcccttgacaacttgcgaaaggtcgtgccctgttattctaaaacacagaaattgtccaaaatagaaaccctcagactggccaagaactacatttgggcactgtctgagattctacgcattggaaagaggccagacctgcttactttcgtgcagaatttatgtaaggggctcagtcagcctactacaaatctggtggcaggttgcctccaactgaatgctcggtcgttcctgatgggtcaggggggagaggccgcccaccatactaggtcgccttactccaccttttaccccccctatcattctcccgaactgaccacccctcctggtcacgggactttagacaatagtaagtcaatgaaaccatacaactattgcagcgcttacgaatccttttacgagtccacttcgcctgagtgcgcctcgccccaattcgaaggacccctgtcaccccctcctatcaattacaacggcattttttctctgaagcaggaggagacattggattacggcaagaattataactacggaatgcactactgcgccgtgccccctagaggccccctggggcagggcgccatgttcagattaccgactgatagtcattttccctatgatctgcacctgaggtctcagtccctgactatgcaagatgaactcaatgcagtgttccataattag

SEQ ID NO: 212870 - DNA, 1014 bp, Artificial Sequence
  derived and/or modified sequence
atgctgaccctgccctttgatgaatctgtggtgatgcctgagagccagatgtgcaggaagttcagccgggagtgtgaggaccagaagcagatcaagaagccagagagcttcagcaagcagatcgtgctgcggggcaagagcatcaagagggcccctggagaggagacagagaaggaggaggaggaggaggaccgggaggaggaggatgaaaatggcctgccccggcggcggggcctgaggaagaagaagaccaccaagctgcggctggagcgggtgaagttccggcggcaggaggccaatgcccgggagaggaacaggatgcacggcctgaatgatgccctggacaacctgaggaaggtggtgccctgctacagcaagacccagaagctgagcaagattgagaccctgcggctggccaagaactacatctgggccctgtctgagatcctgcgcatcggcaagaggccagacctgctgacctttgtgcagaacctgtgcaagggcctgagccagcccaccaccaacctggtggccggctgcctgcagctgaatgcccgctccttcctgatgggccagggcggggaggccgcccaccacaccaggagcccctacagcaccttctacccaccctaccacagccctgagctgaccaccccacctggccacggcaccctggacaacagcaagtccatgaagccctacaactactgcagcgcctatgagagcttctatgagagcaccagcccagaatgtgccagcccccagtttgagggccccctgagccccccacccatcaactacaacggcatcttcagcctgaagcaggaggagaccctggactatggcaagaactacaactacggcatgcactactgtgctgtgcccccccggggccccctgggccagggcgccatgttccggctgcccacagacagccacttcccctatgacctgcacctgcggagccagagcctgaccatgcaggatgagctgaatgctgtgttccacaactag

SEQ ID NO: 212871 - DNA, 1014 bp, Artificial Sequence
  derived and/or modified sequence
atgctgaccctgcccttcgacgagagcgtggtgatgcccgagagccagatgtgcaggaagttctctagggagtgcgaagaccaaaagcagatcaaaaagccggaatcgttttcaaagcagatagtcctgagaggtaagtccatcaaaagggcacctggcgaggaaacagaaaaggaggaggaagaggaggatagggaagaggaagatgagaacgggcttcctagaaggcgaggactccggaagaaaaagacaaccaagctgaggttagaaagggtgaagtttaggagacaagaggctaatgctcgagaaaggaacagaatgcacggactgaacgatgccctggacaacctgagaaaagtggttccatgctattccaagactcagaagctgtcaaaaatagaaaccctcagactggcaaagaattacatctgggccttgagcgaaatactgaggatcggcaagcggccggacttgcttacctttgtccagaacctctgtaagggactgtcacagcctactactaatctcgtggcgggatgcctccaattgaatgctcggagctttcttatgggtcaagggggggaggccgcccatcatacacgttcaccctattccacattctaccctccctatcacagccccgagctgaccaccccccccggccatgggaccctggacaattccaagtctatgaaaccgtacaactattgctccgcatatgagtctttttacgagtcgacttcaccagaatgcgcttcaccccagttcgaaggtcctctgtcccctccacctatcaactataacgggattttctccctgaagcaggaagagacacttgactacggaaagaactataactacggcatgcattattgcgctgtgccgcccagaggccctctcggacagggggctatgttcagactaccaactgattcacactttccctatgatctacacttgcgcagccagagtctgaccatgcaagatgagttgaacgctgttttccataactag

SEQ ID NO: 212872 - DNA, 2131 bp, Artificial Sequence
  derived and/or modified sequence
agtctaaccttctgtgttgatgcatgaaggctggtacccacttacagggatgccagatgatcagtgcagaatgaaggtcccaagagagaggatcacatggctctctctgccctgtgacgtcactagcagatggcatgggtaccagctctggcagttggcatcaatgtcactttttagagatcaatgagatagtgcagatatacacagatctagagactccaggagacgatgcgacactcagcctgaaaagatttggaagacccaaaatgaaaactgattattgaatgaaattaaaacctaaggtaatttaagattagagaaccatgttaacactaccgtttgatgagtctgttgtaatgccagaatcccagatgtgcagaaagttttctagagaatgcgaggaccagaagcaaattaagaagccagaaagcttttccaaacagattgtccttcgaggaaagagcatcaaaagggcccctggagaagaaaccgagaaagaagaagaggaggaagacagggaagaggaagatgaaaatgggttgcctagaaggaggggtcttaggaaaaaaaagacaacaaagctgcgattggaaagggtcaagttcaggagacaggaagcgaacgcgcgcgagaggaacaggatgcacggcctcaacgacgctctggacaacttaagaaaagtggtcccctgttattctaaaacccagaaactgtccaaaatagagactttacgactggccaaaaactacatctgggcactttctgaaattctgagaatcggcaagagaccagatctgctcacattcgtccaaaacttatgcaaaggtctttcccagccaactacaaacttggtggcaggctgcttgcagctcaacgccaggagtttcctgatgggtcagggtggggaggctgcacaccacacaaggtcaccctactctaccttctacccaccctaccacagccctgagctcaccactcccccagggcatgggactcttgataattccaagtccatgaaaccctacaattattgcagtgcgtatgaatccttctatgaaagtacttcccctgagtgtgccagccctcagtttgaaggtcccttaagtcctcccccaattaactataatgggatattttccctgaagcaagaagaaaccttggactatggtaaaaattacaattacggcatgcattactgtgcagtgccacccaggggtccccttgggcagggtgccatgttcaggttgcccaccgacagccacttcccttacgacttacatctgcgcagccaatctctcacaatgcaagatgaattaaatgcagtttttcataattaatgaggaaaatgaaaataaacagtggtcattcacctcccctgtctaattaagacaaagcagatgcttgtgggctgagtaattggcacaactctatctaaggtgtttactagtttctgaagtgtgtttcaactattgtgagaattttctatgtaataataaatctcttttcgtatgagaacttcttttcctttccttttgtctgtgaagcactgtgattctgtttctactggaaagatttttttctttttaattttcttttaaacttatttaatttgtttgaacaaggtgtctaagaatatactgttgaataaagacatgcacacagcataattcaatgtctattttggttgtacagtaattataaaatgcatgttattaaaaccagatgagtaaaatgatgtgtttataattattaggaattatatattatgtatcttttaaaaattgaaattttaaaatatggagaatatcactaagctgacaatgatattgggagatgaatttgcaacaatataaaaagctatgcaattttctttttattaaggatgaatctaaatgcattcaattggtaactattcctcttcaagtatttgcagatggggcaacatgatatttgggtagctgatgtcataattcggggacaattatctcaatcatcaagaaaaaaatttcagcacttgttttgtattattcagaaattaactgtacaggtttgttatcacaatgtataattgtgtttttccaccccacatttttaaggcaattaaatatagatatttccactcgtaaaggac

SEQ ID NO: 212873 - DNA, 1014 bp, Artificial Sequence
  derived and/or modified sequence
atgttgacattgccatttgatgaatctgtggtcatgcccgagtctcaaatgtgccgcaagttcagcagagagtgtgaggatcaaaaacaaattaagaaaccggaatccttctcaaagcagatcgttttgcggggaaagtccatcaagcgtgccccaggagaggagactgaaaaagaggaggaggaagaggatagggaggaagaggatgaaaatggcctgcctcgaaggaggggacttcgaaaaaaaaaaacaacaaagcttagactagaacgcgtaaagttcaggcgacaggaggccaatgccagggaaagaaacaggatgcacggcttgaacgacgccttagacaatctgaggaaggtggttccgtgctactctaagactcagaaactcagcaagatcgaaacccttagattagccaagaactatatctgggcattatcggaaattctccggatcggcaaaaggccggacctactgacctttgtgcaaaacctgtgcaagggtttgtcgcagcctaccaccaacttggtggctggctgtctccagctgaacgccaggagtttcctgatgggccagggaggggaggctgcccaccatacacgaagcccttactccactttttatcctccttaccatagtccagagctcaccactccacctgggcacggcaccctggataactcaaagtccatgaaaccatacaactattgctctgcttatgagtcattctatgagagcacctcaccagaatgcgcctccccacaatttgagggacctctgagtccccctcctattaactacaacggcatcttttctctcaaacaggaggaaacccttgactacgggaaaaattacaattacgggatgcactattgcgctgtgcctcctcggggtcctttagggcaaggggctatgttccggctgccgacggactcacactttccctacgatctccacctccggtcccagtcattaaccatgcaggatgagcttaacgccgtctttcataactag

SEQ ID NO: 212874 - DNA, 1014 bp, Artificial Sequence
  derived and/or modified sequence
atgctgaccctgcccttcgacgagagcgtggtgatgcccgagagccagatgtgcagaaagttcagcagagagtgcgaggaccagaagcagatcaagaagcccgagagcttcagcaagcagatcgtgctgagaggcaagagcatcaagagagcccccggcgaggagaccgagaaggaggaggaggaggaggacagagaggaggaggacgagaacggcctgcccagaagaagaggcctgagaaagaagaagaccaccaagctgagactggagagagtgaagttcagaagacaggaggccaacgccagagagagaaacagaatgcacggcctgaacgacgccctggacaacctgagaaaggtggtgccctgctacagcaagacccagaagctgagcaagatcgagaccctgagactggccaagaactacatctgggccctgagcgagatcctgagaatcggcaagagacccgacctgctgaccttcgtgcagaacctgtgcaagggcctgagccagcccaccaccaacctggtggccggctgcctgcagctgaacgccagaagcttcctgatgggccagggcggcgaggccgcccaccacaccagaagcccctacagcaccttctaccccccctaccacagccccgagctgaccaccccccccggccacggcaccctggacaacagcaagagcatgaagccctacaactactgcagcgcctacgagagcttctacgagagcaccagccccgagtgcgccagcccccagttcgagggccccctgagccccccccccatcaactacaacggcatcttcagcctgaagcaggaggagaccctggactacggcaagaactacaactacggcatgcactactgcgccgtgccccccagaggccccctgggccagggcgccatgttcagactgcccaccgacagccacttcccctacgacctgcacctgagaagccagagcctgaccatgcaggacgagctgaacgccgtgttccacaactag

SEQ ID NO: 212875 - protein, 114 aa, Artificial Sequence
  derived and/or modified sequence
LASRLGPVSTANMSRPVRNRKVVDYSQFQESDDADFESEDSEDKDVKTKKDDSHSAEDSEDEKEDHKNVRQQRQAASKAASKQREMLMEDVGSEEEQEEEDEAPFQERKDSFSQ

SEQ ID NO: 212876 - protein, 243 aa, Artificial Sequence
  derived and/or modified sequence
MSRPVRNRKVVDYSQFQESDDADEDYGRDSGPPTKKIRSSPREAKNKRRSGKNSQEDSEDSEDKDVKTKKDDSHSAEDSEDEKEDHKNVRQQRQAASKAASKQREMLMEDVGSEEEQEEEDEAPFQEKDSGSDEDFLMEDDDDSDYGSSKKKNKKMVKKSKPERKEKKMPKPRLKATVTPSPVKGKGKVGRPTASKASKEKTPSPKEEDEEPESPPEKKTSTSPPPEKSGDEGSEDEAPSGED

SEQ ID NO: 212877 - DNA, 732 bp, Artificial Sequence
  derived and/or modified sequence
atgtccagaccagtgcgaaaccgtaaggtggttgactactcccagttccaggagtcggatgatgccgatgaggattacggaagggattctggccccccaacaaaaaagatcagaagttctccccgggaggcgaaaaataagaggcgcagtggcaagaactctcaagaggacagcgaagattctgaggacaaagacgtcaagactaagaaagacgacagtcactccgcagaggactctgaagatgagaaggaggaccataagaacgtgaggcagcagcgtcaggcagcgtcaaaagctgctagtaagcagagagagatgctaatggaggacgtgggttctgaggaggaacaggaagaggaggatgaagccccgtttcaggagaaggattctggatctgatgaggattttctgatggaggacgacgatgattcagactacgggagttctaagaagaagaataaaaagatggtgaaaaaatcaaagccagaaaggaaggagaaaaagatgcctaagcctagactgaaagccaccgtaacacccagccccgtcaagggcaagggcaaagttggaaggcccacagcatccaaagcctccaaagaaaagaccccttcgcccaaggaggaagatgaagaacccgagtcgcctcccgagaaaaagacctctacttcccctccacctgaaaaatccggcgacgaggggtcggaagacgaggctccctccggggaggactag

SEQ ID NO: 212878 - DNA, 732 bp, Artificial Sequence
  derived and/or modified sequence
atgagcaggcctgtgaggaacaggaaggtggtggactacagccagttccaggagagtgatgatgctgatgaggactatggccgggacagcggcccccccaccaagaagatccgcagcagcccccgggaggccaagaacaagagaagaagtggcaagaacagccaggaggacagtgaagattctgaggacaaggatgtgaagaccaagaaggatgacagccacagcgcagaagattctgaagatgagaaggaggaccacaagaatgtgcggcagcagaggcaggccgccagcaaggccgccagcaagcagcgggagatgctgatggaggatgtgggcagcgaggaggagcaggaggaggaggatgaggcccccttccaggagaaggacagcggcagtgatgaggacttcctgatggaggatgatgatgacagcgactatggcagcagcaagaagaagaacaagaagatggtgaagaagagcaagccagagaggaaggagaagaagatgcccaagccccggctgaaggccaccgtgacccccagccctgtgaagggcaagggcaaggtgggccggcccacagccagcaaggccagcaaggagaagacccccagccccaaggaggaggatgaggagcctgagagccccccagagaagaagaccagcaccagccccccacctgagaagtctggagatgagggctctgaagatgaggcccccagcggggaggactag

SEQ ID NO: 212879 - DNA, 732 bp, Artificial Sequence
  derived and/or modified sequence
atgagccggcccgtgcggaaccggaaggtggtggactacagccagttccaagagagcgatgacgctgacgaggattacggccgcgactctggcccccctacaaaaaagatccggtccagtcctcgcgaggcaaagaacaaacggcgctccggcaagaacagccaggaggattccgaggactcagaggataaggatgtcaaaactaaaaaggatgacagccactccgccgaggacagtgaggatgagaaagaagatcacaaaaacgtgagacaacagcgtcaggccgcctccaaagccgcctcaaagcagagggaaatgctgatggaagacgtgggcagcgaagaggagcaagaagaggaggacgaagcgcctttccaggaaaaggattctggctccgacgaggatttcctaatggaggatgatgatgacagcgactacggcagctctaaaaagaagaacaagaaaatggtaaaaaagagtaaaccagagcgaaaagagaaaaagatgcctaagcccaggctgaaggccacagttacacccagccctgtaaaaggtaagggcaaagtcggacgaccgaccgcatctaaagcctccaaagaaaaaacccccagtcctaaagaagaagacgaggagccagagtcccccccagaaaaaaaaactagtacgtcaccaccaccagaaaagtccggggacgagggctctgaagacgaagctcccagcggagaggattag

SEQ ID NO: 212880 - DNA, 6496 bp, Artificial Sequence
  derived and/or modified sequence
gtctccaatgagcaggcgtgttggggaggagcgcacaaaccctagtgggtttggttgcacggcggctttggcgcattttcggctggtttgattcatccattttgaagagacgggggagcggggggctcgtctgttccaggagccctgaaccaaagagcagcggagtttgagaagccagcagctcggggttcggcagcagcggtcccatcggctgaagttcggggggggtggggcgccgagcgcgcggggtggggggggtcctggtctttggcttctcgactcggtcctgtttcgacagcgaacatgtcgcggcctgtcagaaataggaaggttgttgattactcacagtttcaggaatctgatgatgcagatgaagattatggaagagattcgggccctcccactaagaaaattcgatcatctccccgagaagctaaaaataagaggcgatctggaaagaattcacaggaagatagtgaggactcagaagacaaagatgtgaagaccaagaaggatgattctcactcagcagaggatagtgaagatgaaaaagaagatcataaaaatgtgcgccaacaacggcaggcggcatctaaagcagcttctaaacagagagagatgctcatggaagatgtgggcagtgaggaagaacaagaagaggaggatgaggcaccattccaggagaaagattccggcagcgatgaagatttcctaatggaagatgatgacgatagtgactatggcagttcgaaaaagaaaaacaaaaagatggttaagaagtccaaacctgaaagaaaagaaaagaaaatgcccaaacccagactaaaggctacagtgacgccaagtccagtgaaaggcaaagggaaagtgggtcgccccacagcttcaaaggcatcaaaggaaaagactccttctcccaaagaagaagatgaggaaccggaaagcccgccagaaaagaaaacatctacaagccccccacccgagaaatctggggatgaagggtctgaagatgaagccccttctggggaggattaaaagtgatgatggtctggggagagattttattaaaaaaaaaaagaaaaaaaaagaaaaaagagggaggaaaaaaaagaacctacttaagatagaacatggttttggctatggcttgactcatgggctttcagtgcttttttccatttgttgaaagtaacatttctctctctctctctttttttttttttttttttaaagcaaaccattgtatgtgtaagtgtttaagttacctttttgtctattggtctctttgccagccctcccctttcccaatgaaagccatgtcaaattaatcactggattgactgcttcatctttttatttttaatgaaaggtgtaccacggttgtaaagcaataagatttgagatgaacactattgaaacttcgctttttgctaaaaaatagcaagttgaatagtaatcaaaaaacatagaaagattttagttcaaaatgattgctcctttctctacctggacttttaaaaaatcaattgtcatctaatatgagtttatttgtctatagacacaagtatcaatgtctaaaaaaaatcatgactttaaacttccaccgatgaggcaggtaggagataaagatgaattctgaactgttactaaaagtactcattttttaccttgtagggagggtgggcaatggggttacctgaccttatttgagggtatgggctttcttttttatttcatcacttgttatctcaaagagactcggagccagtgatccttttatcctgctacagtctttagggagctaaaaaaaaaaaaaaagcaggggctgccaaaactcttgatttcatatttccttctctaaatatatatgtatcctgttttttggataaaattttaccaagaatccaaaaaaaaaaaaaccctagaatttaatcaacaagatcagtctacaggtcacagtggatttcttttcaaactgacaatgtttaggttttaagcaaataaagttccagttaatgtgaaactcagtcacaaagagttgagatttttcctttatgaaatagaattgacattcttttatgctataaatgtgcattcaggtcccattaaccatgctctgcttttatttggggatagaacattttctttttcatatcccgatcttcccatttcttcatagaaatgtgataagaagtacatccctgtgatcctgctgcttcgtagagcaccactgcacaccctaccccgagtgccaaccacctctgctataggacactattttcctggccctattcttcacttacttcccatcctgtccttgactaggaatatgttaaatgctgctcccatacaattcagttagctcttgtctttttatttggtccaacccctgctttactgctcatgctgcttaaagcaggagggactagagaaacaaggcattttaggaggcctgtgtgcagttgaaaaccgacttttacacgccttataaaagcagtcaggagatagatccgtaggtttgatccttcacatctaataccaggcgctaatgggaacaaggtttaaagggtcctggtatgctaataaattgaaaaattagtgaaatttaaacttctgcctttttttcctgccttttaatctagatttgcttcctcaatatcctactttgtggtttactaggaacatgcttactctgatctttttttaaaaaacacacagtggcagagtcatttcactattgcactgtgtgttaaagaatgaataaggagttttcagttacatggccaaaaatacaggacttgaacataaatagcagttggatcattctctttcatgacggttaaattcagaggtgtgaactttgtaatgagggtgttaaagattaatctatttgcctaaatgggtttgttcaggtatccatttttaacaaagaagtttgtgttcatatagtaaaagacctatcagtgtttccaccatgcacttctattttttaggagtttataattttaagtcttacattcctagtaacatttgggcttttcttaggttatgtttcgtgaagatttggggggagggctcttttaaaacttcagcctcagttgtttaacagtctctttaatatattaatctgcactaacatctctgtgatatatgcacatattttagaggtaatcatgtcttctagattacttgtgtgcatttgattgggcttcttgtttagggtcccttttaaaattaattcattagattgaaaaatgtattctatatttctgatagactggacagaaggatctgtgtccccaagtgagacaggctctgaataacctttgttttctccactttttattgatgatttaaaacactctagtcttcccctcaaatcatgcatgcaaataggaggacagtggtggtgactcaactggatacaggtgctcaatagtcaggcttgatagtgatgtcaggacgcattacaagctgtaagccgatactgactggccattggcaccatccttgactaaccttcctctttttctctagtgtgcctatggtgaaatggcaatagcattcactgtcgtattttgcagtgctcaggaagtgggacgttaactttgaaggtgcttgtttgtattagctctgctaggtttacctctacaacgtagatttcagcagctatgctgactgacactacattctagttcttaagattttttttccagatccccccttccccagctagacatacgtagcatactttcatcttattcagtctttctgtaacctgctgctgcttttagtcctcctcacctcagatcggaatcaatggagtgggcccagaggatacattttaattccagtaatggtaggtagatttgtcctgctttctaaaacatctcctcatttcatatttccactccatattgattccataagggaaaattaatgggtgtttcctcctttagggaggtaatgcaaagagtgtggacatcttctaatcttgaggaacagtagttgatttcccttgaaggagcttacatattgactgttttcacaataacctgtttgccccagttcaatcctcattttaatacttaatttggtactggctcaaatagcattttcttacagataacaaatcaagagtgaaatttgaggttatactccagtaaagtttttaacacttgtgaatatggtcagctagactaaacttgactcttttttttaatggcttttttatctgtgaacattcagataagtggattttcaagtactggttggggatgggaatcgtgcttttctttaaacttcagtttacgagatgctttgagagcgttaggcaaaagcagaaataaatatcaggagcaacggggaaagctttataaaagatcatggtggccactgttgcagctttgaagaatgagtgctggcttgaacagttctttgcctgcatcattggtagctgcactgaaaggaaaaaactttcaccttaagaatttgaaaaggaagaaacctgggctctggtcttcatggcatttagactgagatgcttaaacagaacagaagtaatacgcatttcctgccataggatagggaaaatgtaacaagctggttgctcttgaggttagaaaattgtctgtttctctgtggatgaagctggatttacttgaaaatggagagttggcttattgtttgaatattgggacatcaagctatctatagccaagtttcagtcgcaaccagttttccctttgtctggggtaaattcgatacaaaatgattctttttgaatcctgaatccataaattacacttttttttttcaaattcacaaaattcacagtggtgctgactgtgtaataaccactattgggaaacatcccgtaaacctgcctgttgccatgccaatggagtgactgaactggtgacatctgtttgagcatgctttgtgtggctggtagaatgccaccgttgtgcatacactttgtacatcaggggtgaagggagggttttctagattattgggggagggtaaaattgggatttttttgttgttccttttttgatggggtgtgggggtatagtactcagcttatgccctaaaataacatgtataaaaacccctgaagtattgtgtgggtgtgtacgtgtgagtgtgtgtttgtatacatctggcaattaaagctttgtcttctggaacttagtgaattcttttctctttttcctccagaagtatttgttacaagatttgtaaataagagctctacttagtttgtttaccatgaacatgttgcagcaaaccttatgcatctaattcctacaaggttaaagaaaggcttttagacttgccaggttaagcaacagccaagttctcagtaattgtttgccttgatttatcttttagacttcattttgccagctctaaaactcccagtcttccttgattttagtccttaatcttttatgttctgagcaggaagggtaaaagacaggaacctgcttcactgtattaactagtccatgggctgagaccggggcatctcttttcttcatactgcaatgttgctagatacatgatcagacaccagagggttgggcattcttgcaataccttaacagtgctgaaatctgcagcatggtactaaggaagttaaagtttgaatgtaaccactttatttaaaaggtttttttctttaatttaaatgaaatggggttgaagtgaacatgattttgttgaccatgttcgtgaattacagatgcaacatgcattggtagaatcgtgtgatggtcttttgtgatacttaatttttacatatcccagtctctgtatgtatctgcatagacaaagaaaaaacaaactcctgctttgcttttattgaagggtttccaggactgcgtgtctgctcctgagctctgttttaagtatgtgtatcctttgcttgtattttgtattaaaaaaataagaaaaagaagcctttattgttgagcatgttggcattgtcccctttatttttttctctttttgggacatatgaagcaagttattctttttctgtatctttttttcttttgtaaactttttttttgttttgtttaaaaatggctttataaaagggcttttataacccagatgtgtgctctgtgtacttcttgtaataccttaaagcaaacacactaacttacacagctttgttaatcagctcccagttcagcctgactttgtgggaacttatttccctaataaattatttagaaactttaacagtgaccatccctgttgttggtaaaagataaacatgtcttggttcaaaagttaatacctcaggatggaatcaagaagcagtagacttaccagtttgattaattaagggagcactggactgggtgcgtaaggattcttaattagcattttttctcatgtttacatccaaggttatgaagtgttgtggaaagcaaagtttaacaatcatatataataaaagataatgtttatactcacagaa

SEQ ID NO: 212881 - DNA, 732 bp, Artificial Sequence
  derived and/or modified sequence
atgtcacggcctgtaagaaacaggaaagtggtagactatagccagtttcaagagtcagatgacgccgacgaggactatgggagggacagcgggcctcctactaagaagattcggtcctcgccgagggaagccaagaacaaacgacggtccggtaagaacagccaggaggattccgaggactccgaagataaagacgtgaaaacaaagaaggatgattcccattcggcggaagattccgaggacgagaaagaggatcacaagaatgtcagacaacaaagacaggccgctagtaaagctgccagcaaacagagggagatgctgatggaggatgtcggctccgaagaagaacaagaggaggaggacgaggccccattccaggagaaggactctgggtcagacgaggatttcttaatggaggatgatgatgacagtgactatgggtctagcaagaagaaaaacaagaaaatggtcaaaaaatccaagcccgagagaaaggaaaagaagatgccgaaacccagacttaaagcaactgtgactccctcccccgtcaaagggaagggtaaagtaggtcgacccacggcttctaaggcatctaaggagaagacccctagcccaaaagaggaagatgaggagcctgagtctccccctgagaaaaaaactagcacatccccaccacctgagaagtcgggggatgaaggaagcgaagatgaggccccttccggcgaggattag

SEQ ID NO: 212882 - DNA, 732 bp, Artificial Sequence
  derived and/or modified sequence
atgagcagacccgtgagaaacagaaaggtggtggactacagccagttccaggagagcgacgacgccgacgaggactacggcagagacagcggcccccccaccaagaagatcagaagcagccccagagaggccaagaacaagagaagaagcggcaagaacagccaggaggacagcgaggacagcgaggacaaggacgtgaagaccaagaaggacgacagccacagcgccgaggacagcgaggacgagaaggaggaccacaagaacgtgagacagcagagacaggccgccagcaaggccgccagcaagcagagagagatgctgatggaggacgtgggcagcgaggaggagcaggaggaggaggacgaggcccccttccaggagaaggacagcggcagcgacgaggacttcctgatggaggacgacgacgacagcgactacggcagcagcaagaagaagaacaagaagatggtgaagaagagcaagcccgagagaaaggagaagaagatgcccaagcccagactgaaggccaccgtgacccccagccccgtgaagggcaagggcaaggtgggcagacccaccgccagcaaggccagcaaggagaagacccccagccccaaggaggaggacgaggagcccgagagcccccccgagaagaagaccagcaccagccccccccccgagaagagcggcgacgagggcagcgaggacgaggcccccagcggcgaggactag

SEQ ID NO: 212883 - protein, 456 aa, Artificial Sequence
  derived and/or modified sequence
MAAALKCLLTLGRWCPGLGVAPQARALAALVPGVTQVDNKSGFLQKRPHRQHPGILKLPHVRLPQALANGAQLLLLGSAGPTMENQVQTLTSYLWSRHLPVEPEELQRRARHLEKKFLENPDLSQTEEKLRGAVLHALRKTTYHWQELSYTEGLSLVYMAARLDGGFAAVSRAFHEIRARNPAFQPQTLMDFGSGTGSVTWAAHSIWGQSLREYMCVDRSAAMLVLAEKLLKGGSESGEPYIPGVFFRQFLPVSPKVQFDVVVSAFSLSELPSKADRTEVVQTLWRKTGHFLVLVENGTKAGHSLLMDARDLVLKGKEKSPLDPRPGFVFAPCPHELPCPQLTNLACSFSQAYHPIPFSWNKKPKEEKFSMVILARGSPEEAHRWPRITQPVLKRPRHVHCHLCCPDGHMQHAVLTARRHGRDLYRCARVSSWGDLLPVLTPSAFPPSTAQDPSES

SEQ ID NO: 212884 - DNA, 1371 bp, Artificial Sequence
  derived and/or modified sequence
atggccgccgccctgaagtgcctgctgaccctgggcagatggtgccccggcctgggcgtggccccccaggccagagccctggccgccctggtgcccggcgtgacccaggtggacaacaagagcggcttcctgcagaagagaccccacagacagcaccccggcatcctgaagctgccccacgtgagactgccccaggccctggccaacggcgcccagctgctgctgctgggcagcgccggccccaccatggagaaccaggtgcagaccctgaccagctacctgtggagcagacacctgcccgtggagcccgaggagctgcagagaagagccagacacctggagaagaagttcctggagaaccccgacctgagccagaccgaggagaagctgagaggcgccgtgctgcacgccctgagaaagaccacctaccactggcaggagctgagctacaccgagggcctgagcctggtgtacatggccgccagactggacggcggcttcgccgccgtgagcagagccttccacgagatcagagccagaaaccccgccttccagccccagaccctgatggacttcggcagcggcaccggcagcgtgacctgggccgcccacagcatctggggccagagcctgagagagtacatgtgcgtggacagaagcgccgccatgctggtgctggccgagaagctgctgaagggcggcagcgagagcggcgagccctacatccccggcgtgttcttcagacagttcctgcccgtgagccccaaggtgcagttcgacgtggtggtgagcgccttcagcctgagcgagctgcccagcaaggccgacagaaccgaggtggtgcagaccctgtggagaaagaccggccacttcctggtgctggtggagaacggcaccaaggccggccacagcctgctgatggacgccagagacctggtgctgaagggcaaggagaagagccccctggaccccagacccggcttcgtgttcgccccctgcccccacgagctgccctgcccccagctgaccaacctggcctgcagcttcagccaggcctaccaccccatccccttcagctggaacaagaagcccaaggaggagaagttcagcatggtgatcctggccagaggcagccccgaggaggcccacagatggcccagaatcacccagcccgtgctgaagagacccagacacgtgcactgccacctgtgctgccccgacggccacatgcagcacgccgtgctgaccgccagaagacacggcagagacctgtacagatgcgccagagtgagcagctggggcgacctgctgcccgtgctgacccccagcgccttcccccccagcaccgcccaggaccccagcgagagctag

SEQ ID NO: 212885 - DNA, 1744 bp, Artificial Sequence
  derived and/or modified sequence
ctcttgatttctggggccggtgaccaggcccaacgcagccttcaagtcggcccaaacacggtttctgcctcaaggattatttatataaccattgcttattggctgctggcaaacactcgctcttctcgttggctgaaactgtcgggagaagttctgcgaaggctgctccttgcggcgttgggactgagggtcacaggcacctgtatttccgtttccggttcgcctccggagccatggcggcggcactgaagtgtctactgacattaggaagatggtgccccggccttggagtggctccccaggcccgggcgctcgccgccttagtacccggagtgacccaggtagataacaagtccggtttcctgcagaagaggcctcatcgccagcaccctggcatcctaaagctgccgcacgtgcggctgccacaggcactggctaacggtgcccagttattgctacttgggagcgctgggcccactatggagaatcaggtgcaaacactgaccagttatctctggagcagacatttgcctgtagagccagaggagttgcaaagacgggctaggcatcttgagaaaaaattcctggaaaacccagacttatctcagacagaggagaaacttcgtggagcagtgctacacgcactacgtaaaactacctaccattggcaagaactgagctacactgagggactgagcctggtgtatatggcagcaagactggatggtggctttgcagcagtctccagagcattccatgagatccgggctcgaaatccagcatttcagccacaaactttgatggactttggctcaggtactggttctgtcacctgggctgctcacagtatttggggccagagcctacgtgaatatatgtgtgtggacagatcagctgccatgttggttttggcagaaaaactactgaaaggtggttcagaatctggggagccttatattccaggtgtctttttcagacagtttctacctgtatcacccaaggtgcagtttgatgtagtagtgtcagctttttccttaagtgaactgcccagcaaggctgaccgcactgaggtagttcaaaccttatggcgtaagacaggtcatttcctggtactggtggagaatggaacaaaagctgggcacagccttctcatggatgccagggatctggtccttaagggaaaagagaagtcacctttggaccctcgacctggttttgtctttgccccgtgtccccatgaactcccttgtccccagttgaccaacctggcctgtagcttctcacaggcgtaccatcccatccccttcagctggaacaagaaaccaaaggaagaaaagttctctatggtgatccttgctcgggggtctccagaggaggctcatcgctggccccgtatcactcagcctgtccttaaacggcctcgccatgtgcattgtcacttgtgctgtccagatgggcacatgcagcatgctgtgctcacagcccgccggcacggcagggatttgtatcgttgtgcccgtgtcagctcctggggagatcttttacctgtgcttactccgtctgcgtttcctccatctacggctcaggatccctctgagagttgatgaggatgtgtaacaagtattttcttctatcgtgcctgccagggctgaagctgcctggtatccaggaggggaatgctggtatccccatatgtctgtgtttgtttgagatttttaataataaataataaatttttgaagaa

SEQ ID NO: 212886 - DNA, 591 bp, Artificial Sequence
  derived and/or modified sequence
atggtgcccagaccctggagcggcagccccggccccggcgagtgcctgcacagcctgctgagcgagagactgtggatctgcagagacatcagcgcccagagaagaagcgcccccggcagccccagacccagcgactgccagcagctgagcttcctgcccggcaaccagcccaccttcctgtgcctgcaggccctggccgccctggtgcccggcgtgacccaggtggacaacaagagcggcttcctgcagaagagaccccacagacagcaccccggcatcctgaagctgccccacgtgagactgccccaggccctggccaacggcgcccagctgctgctgctgggcagcgccggccccaccatggagaaccaggtgcagaccctgaccagctacctgtggagcagacacctgcccgtggagcccgaggagctgcagagaagagccagacacctggagaagaagttcctggagaaccccggccccgacttccagagcctgttcagcccccagacctacctgagacagagaagaaacttcgtggagcagtgctacacccactacgtgaagctgcccaccatcggcaagaactag

SEQ ID NO: 212887 - DNA, 1371 bp, Artificial Sequence
  derived and/or modified sequence
atggccgcagcccttaagtgtctgcttactctcgggcgctggtgtccagggctgggggttgccccccaagctagagctctggcggctctggtgccgggggtgacacaggtggacaacaaatctggattcctgcagaaacgacctcacagacagcaccccgggatcctcaaattgcctcacgtgcgtctgcctcaagcactggccaatggcgcccaactgttgctgcttggctccgccgggcctaccatggaaaaccaggtgcagacacttacttcatacttgtggtcacggcatctgccggtggagcccgaggaacttcagaggcgagcgcgtcatctcgaaaagaagtttctggaaaaccctgacctgagtcaaaccgaggagaagttacgtggtgcagtcctgcatgcgctcagaaagactacataccattggcaagagctttcctatacagagggcctgtccctcgtttatatggccgcacgcctcgatgggggatttgcagctgtaagtcgcgcgtttcacgaaatacgggcacggaatcctgccttccaaccgcaaactctcatggacttcggatctggcaccggctcagtcacctgggcagctcactccatttgggggcagtccctgagggaatacatgtgtgttgatagatccgccgctatgctcgtgctggccgagaaactacttaaaggtggcagcgaatccggggagccctatatacctggggtcttttttaggcagttcctcccggtaagcccaaaggttcagtttgatgtcgtggtgtcagcgttcagcctctccgaactgccctctaaggccgatcggactgaagtggttcagacactctggcggaaaacaggacatttcctggtgcttgtggagaacgggactaaagctggtcatagtctcctgatggacgcgagggacctcgttctgaaagggaaagaaaaatcgcctctcgacccaaggcctggcttcgtgtttgctccttgtcctcacgagctgccatgcccacagctgactaacttggcatgctctttcagccaggcttaccatcctatcccatttagctggaataaaaagccgaaggaagaaaagttttctatggtcattctggccagagggagcccagaggaagcacatcgatggcctcggattactcagccggtcctaaaaaggccccggcacgtgcattgtcacttgtgttgcccagatggtcatatgcagcatgctgttttaaccgccagaagacacggacgggacttgtacagatgcgctagggtgtcctcctggggcgacctgctgcctgtccttacacctagcgctttccctccatcaactgcacaagatcccagcgagagttag

SEQ ID NO: 212888 - DNA, 591 bp, Artificial Sequence
  derived and/or modified sequence
atggtccccagaccctggtcaggttctccagggcctggtgaatgccttcactccctactgagcgaaaggctctggatttgtcgagacatatctgctcagcggcggtccgcccctggaagtccacgcccgtcagattgccagcaactgagttttctacccggcaaccagccaacattcctctgtctgcaggctctggccgccctcgttcccggagtcacacaggtggacaacaagagtggatttctgcagaaaaggccacaccggcagcaccccggtattctcaagctgccccatgtgcggcttccgcaggccctggctaatggggctcagttgcttctcctgggatccgccggccctacgatggaaaaccaggtgcagacactgacatcgtacctttggtcccggcacctccccgtggagccggaggaacttcagagacgtgcccgtcaccttgagaagaaatttctcgagaaccccgggcccgattttcagagccttttttctcctcagacctaccttaggcagcgccgtaacttcgtggaacagtgctatacacactacgtgaagttaccaacaattggcaagaattag

SEQ ID NO: 212889 - DNA, 1371 bp, Artificial Sequence
  derived and/or modified sequence
atggctgctgccctgaagtgcctgctgaccctgggccgctggtgccccggcctgggcgtggccccccaggcccgggccctggccgccctggtgcctggggtgacccaggtggacaacaagagcggcttcctgcagaagaggccccaccggcagcaccctggcatcctgaagctgccccacgtgcggctgccccaggccctggccaatggagcccagctgctgctgctgggcagcgctggccccaccatggagaaccaggtgcagaccctgaccagctacctgtggagccgccacctgcctgtggagcctgaggagctgcagaggcgggcccggcacctggagaagaagttcctggagaacccagacctgagccagacagaggagaagctgcggggagctgtgctgcacgccctgaggaagaccacctaccactggcaggagctgagctacacagagggcctgagcctggtgtacatggccgcccggctggatggcggctttgctgctgtgtcccgggccttccacgagatccgggccaggaacccagccttccagccccagaccctgatggactttggcagcggcaccggctctgtgacctgggccgcccacagcatctggggccagagcctgcgggagtacatgtgtgtggacagatctgctgccatgctggtgctggccgagaagctgctgaagggcggcagcgagagcggggagccctacatccctggggtcttcttccggcagttcctgcctgtgagccccaaggtgcagtttgatgtggtggtgtctgccttcagcctgtctgagctgcccagcaaggctgacagaacagaggtggtgcagaccctgtggaggaagacaggccacttcctggtgctggtggagaatggcaccaaggccggccacagcctgctgatggatgcccgggacctggtgctgaagggcaaggagaagagccccctggacccccggcccggctttgtgtttgccccctgcccccatgagctgccctgcccccagctgaccaacctggcctgcagcttcagccaggcctaccaccccatccccttctcctggaacaagaagcccaaggaggagaagttctccatggtgatcctggcccggggcagccctgaggaggcccaccgctggccccgcatcacccagcctgtgctgaagaggcccaggcatgtgcactgccacctgtgctgcccagatggccacatgcagcacgctgtgctgacagcccggcggcacggccgggacctgtaccgctgtgcccgggtgtcctcctggggagacctgctgcctgtgctgaccccatctgccttcccccccagcacagcccaggaccccagcgagagctag

SEQ ID NO: 212890 - DNA, 591 bp, Artificial Sequence
  derived and/or modified sequence
atggtgccccggccctggagcggcagccctggccctggagagtgcctgcacagcctgctgtctgagcggctgtggatctgccgggacatcagcgcccagaggagaagtgcccctggcagcccccggcccagcgactgccagcagctgtccttcctgcccggcaaccagcccaccttcctgtgcctgcaggccctggccgccctggtgcctggggtgacccaggtggacaacaagagcggcttcctgcagaagaggccccaccggcagcaccctggcatcctgaagctgccccacgtgcggctgccccaggccctggccaatggagcccagctgctgctgctgggcagcgctggccccaccatggagaaccaggtgcagaccctgaccagctacctgtggagccgccacctgcctgtggagcctgaggagctgcagaggcgggcccggcacctggagaagaagttcctggagaaccctggccctgacttccagagcctcttcagcccccagacctacctgcggcagaggaggaactttgtggagcagtgctacacccactacgtgaagctgcccaccatcggcaagaactag

SEQ ID NO: 212891 - DNA, 1371 bp, Artificial Sequence
  derived and/or modified sequence
atggccgccgccctgaagtgcctgctgaccctgggccggtggtgccctgggctgggagtcgctccccaggcccgcgctctcgctgccctggttcctggcgttacacaagttgataataaatccggtttcctacagaaaagaccacataggcagcatccaggcattctgaaactacctcacgtcagacttccacaggctctcgcaaacggggcgcagttgctcctgctgggctctgcaggacctacgatggagaatcaggtacaaacactcacttcgtacctctggtctcggcatctgcccgtcgaaccggaagagctacagcgccgcgccaggcatctggaaaaaaagttcctcgaaaatccagacttaagtcagacagaggagaagctaaggggtgctgtactgcacgcattaagaaaaaccacctatcactggcaggaactttcttacaccgaggggctgtcgctggtgtacatggcagcaaggttagacggcggatttgctgccgttagccgggcttttcacgaaattagggcaagaaaccctgcttttcagccccagactcttatggattttggatccggaaccgggtcagtaacgtgggccgcacacagtatctgggggcagtctttgcgggaatatatgtgcgtagataggtccgcggctatgcttgtgcttgccgaaaagctgctgaagggcgggtccgaaagtggggaaccttatatcccaggagttttctttcggcagtttttgccggtgtcccccaaagtgcagtttgacgtggtggtttctgcatttagtctttctgaattgccatctaaagcggatcgcaccgaagtcgtgcagaccttgtggagaaagaccggccactttctggtcttggttgagaatgggactaaagccggtcactccctcttgatggatgcgagagacctggttttgaagggaaaagaaaagtccccactggaccctcgcccaggattcgtgtttgctccctgtccccacgagctgccttgcccacagctaacaaacttagcttgttctttctctcaggcctaccaccctataccattcagctggaataaaaaacccaaagaggaaaagttcagtatggtgatattagcacggggtagcccggaggaagctcaccgttggcctcggataacccagccggtgctgaaaagaccgagacatgtgcactgtcacctctgttgtcccgatggccacatgcagcacgcagtccttaccgctcggcggcatggcagagatctctaccgctgtgcccgcgtctcgtcttggggtgacctgctgcccgttttgacacctagcgcctttccaccatcgactgcccaggatccttcggagtcgtag

SEQ ID NO: 212892 - DNA, 591 bp, Artificial Sequence
  derived and/or modified sequence
atggtgccccggccctggagcggcagccccggccccggcgagtgcctccactctcttctctctgagagactgtggatctgtcgtgatattagcgcccaaagaagatccgctccaggaagccccagaccctccgactgccagcagctttctttcctccctgggaatcagcctacgtttttgtgcttacaggccctcgcagctctggtgcctggggtgacccaggtggacaataagagcggatttctgcagaagagaccccaccgccaacatccaggaattctcaagctgccccacgtccggctgccacaggcgcttgccaacggagcacagctgctgctacttgggtcagcggggcctacaatggagaatcaggtccagacactaactagttacctttggagccggcacctccccgtggaaccggaggaactccagagaagggcaaggcacctggaaaagaagttcctcgaaaatcccggacctgatttccaatcattattttcaccccagacttacctccgccaacggcggaacttcgtggagcaatgctacacgcactatgtgaagctgccaaccatcgggaagaactag

SEQ ID NO: 212893 - DNA, 1371 bp, Artificial Sequence
  derived and/or modified sequence
atggccgctgccctgaagtgtctgttgaccctggggagatggtgcccaggactgggagtggccccacaggcaagagcactggctgccctagtgcccggagtgactcaggtagacaacaaatctggattcctccagaaacggccacatcgccagcatccgggtatactgaagctgcctcacgtgagactgccccaggccctggctaatggagcgcagctattgctgctgggctccgcgggtccaaccatggagaatcaagtacagacactcaccagctacctttggagtaggcacctgcccgtcgagcctgaagaacttcagagacgggctcggcatcttgagaaaaagtttctggaaaaccccgatctgagtcagacagaagagaagctgcgcggagctgtgctgcacgcactgagaaaaaccacatatcattggcaggaactgtcctacacagagggtctgtccctggtttacatggcagccagattggatgggggattcgcggctgttagccgggctttccacgagatacgagctcgcaatccagcattccagccacagacattaatggattttggatctgggacaggctcagtcacatgggcggctcacagcatttggggacagagtctgcgcgaatatatgtgtgtcgaccggtctgcggctatgctggtgttggcggagaagctccttaagggcggttcagagtcaggcgaaccctacatccccggagtgtttttcaggcagtttctgccagtgagtccaaaggtccagtttgacgttgttgtctcagcgtttagcctcagcgaactcccatccaaggctgatcgtacagaagtggtgcaaaccctgtggagaaaaactgggcactttttggtcctcgttgaaaacggaacgaaggctggccacagtctgctgatggatgccagagacctggtcctgaagggcaaggagaaatccccgttggaccctcggcctggctttgtgtttgccccttgcccacacgaactcccatgtccacaattgacaaacctcgcttgttctttctcgcaggcctaccacccaatacctttcagctggaataagaagcctaaggaagaaaagttctccatggtcattttggcaagggggtcgccagaggaagcccacagatggccccgtataactcagcccgttctcaagcgccctcgccatgtgcattgtcacctgtgctgccccgacggacacatgcaacatgcggtccttaccgctaggcgacatggtcgggatttgtaccggtgtgctcgggtctcttcgtggggcgatctattgcccgttctcacacctagtgccttcccgccaagcacagcccaggacccatcagaatcttag

SEQ ID NO: 212894 - DNA, 591 bp, Artificial Sequence
  derived and/or modified sequence
atggtgccgcgtccttggtccggcagcccagggccaggagaatgccttcacagtctattgtctgagcggctttggatttgtcgagacatcagcgcccaacggcgatccgctccaggctcccctcgacctagcgactgccagcagctctcgttcctccccggaaaccaacccaccttcctctgtctccaggcactagctgccctagtccccggagtcacccaggtcgataacaagtccggctttctgcagaagagacctcaccggcagcatcccggaatcctgaagctccctcacgtccggctgccacaggccctggcaaacggcgcacagttgctactgttggggtcagccggtccaacgatggagaatcaggttcaaaccctcacctcttacctctggagccgccatctcccggtagagcctgaggagctacagaggcgggcacgccatcttgagaagaagttcctagaaaaccctggtccagatttccagtcgctgttctcaccacagacctacctgagacagagacgcaactttgtagaacaatgttatacgcattacgtgaaattgcccactatcggaaagaactag

SEQ ID NO: 212895 - DNA, 357 bp, Artificial Sequence
  derived and/or modified sequence
atgtcctgtcagcagtcccaacagcagtgtcagcccccacctaagtgcacaccaaagtgtccgccaaagtgcacacctaagtgtccacctaaatgcccccctaagtgtcctcctcagtgtagcgctccttgtccgccacccgtctcatcttgctgcggatcctcatcgggaggatgctgctcttctgaaggcggaggatgctgtctgagtcaccatcgcccaaggcaatccctgcggagacgacctcagagcagctcctgctgtgggtccggctcgggtcagcagtccggcggtagtagctgttgccacagcagcggtggcagtggatgttgccatagtagcggtggttgctgttag

SEQ ID NO: 212896 - protein, 528 aa, Artificial Sequence
  derived and/or modified sequence
MAAVLNAERLEVSVDGLTLSPDPEERPGAEGAPLLPPPLPPPSPPGSGRGPGASGEQPEPGEAAAGGAAEEARRLEQRWGFGLEELYGLALRFFKEKDGKAFHPTYEEKLKLVALHKQVLMGPYNPDTCPEVGFFDVLGNDRRREWAALGNMSKEDAMVEFVKLLNRCCHLFSTYVASHKIEKEEQEKKRKEEEERRRREEEERERLQKEEEKRRREEEERLRREEEERRRIEEERLRLEQQKQQIMAALNSQTAVQFQQYAAQQYPGNYEQQQILIRQLQEQHYQQYMQQLYQVQLAQQQAALQKQQEVVVAGSSLPTSSKVNATVPSNMMSVNGQAKTHTDSSEKELEPEAAEEALENGPKESLPVIAAPSMWTRPQIKDFKEKIQQDADSVITVGRGEVVTVRVPTHEEGSYLFWEFATDNYDIGFGVYFEWTDSPNTAVSVHVSESSDDDEEEEENIGCEEKAKKNANKPLLDEIVPVYRRDCHEEVYAGSHQYPGRGVYLLKFDNSYSLWRSKSVYYRVYYTR

SEQ ID NO: 212897 - DNA, 1587 bp, Artificial Sequence
  derived and/or modified sequence
atggccgcagtgctcaacgcagagcggttggaggtctcagtagatggcctaactctatccccggaccccgaagagagaccaggtgccgagggagctcccctccttccaccccccctgccacctcccagcccacctggatcaggccgcggcccaggagcaagcggagaacagccggaaccgggcgaggctgcagccgggggagccgccgaagaggcgcgccggctcgaacaaaggtggggcttcggccttgaggagctctatgggctggccctgcgttttttcaaggaaaaggacggcaaagcattccatcccacttatgaggagaaactgaagcttgtggccttgcacaagcaggtgctcatggggccatataacccagacacttgcccagaggtgggcttctttgatgttctaggaaacgatagacgtcgggagtgggcagccctcgggaacatgagtaaagaagacgccatggtcgaatttgtgaaacttcttaatcgctgttgccacctcttttctacctacgtggcctcacataagatcgaaaaggaggaacaggaaaagaaacgcaaagaggaagaagagaggagaaggcgagaggaggaagaacgggaacggttgcagaaggaagaggaaaagagacggcgggaagaggaggagaggctaagaagagaggaggaggaacggcgacggatagaggaggagagactgagactcgaacagcagaaacagcagattatggccgccctgaattcacagactgctgttcagttccagcagtacgcagcccagcaatatcccggaaattacgaacagcaacaaattctgataagacagctgcaggaacagcattaccagcaatacatgcagcagttatatcaggtgcaattggcacagcagcaggctgctctgcagaagcaacaggaggtggtcgtggccggctcttccctgcccacgtcttctaaggtgaacgcgaccgtgccatccaacatgatgagcgtgaatggacaggccaaaacccatacagacagctctgagaaagaactggagcccgaagcagccgaggaggccctggagaacgggcccaaagagagcctacctgtcatcgctgcacccagcatgtggacacgcccccaaatcaaagatttcaaagagaagatccagcaagatgcagactctgtgattaccgtggggcggggcgaggtggttacggttcgagttcccacgcatgaagaaggcagctatctcttttgggagttcgccaccgataactatgacataggttttggagtctactttgagtggaccgatagcccgaatacagccgtctccgtacatgtgtccgagagtagcgatgatgacgaagaagaggaggagaacatcgggtgcgaggagaaggcaaaaaaaaatgccaataaaccgctgttagacgaaatagtgcctgtttaccgccgggattgtcacgaggaggtgtacgccggatctcaccagtacccgggcagaggagtgtacctacttaagtttgataactcttattcactctggcgctccaaatctgtatactatagagtttactacactcggtag

SEQ ID NO: 212898 - DNA, 1587 bp, Artificial Sequence
  derived and/or modified sequence
atggctgctgtgctgaatgctgagcggctggaggtgtctgtggatggcctgaccctgagcccagaccctgaggagaggcctggagctgagggcgcccccctgctgcccccacccctgcccccacccagccccccaggcagcggccggggccctggggccagcggggagcagcctgagcccggggaggccgctgctggaggagctgctgaggaggcccggcggctggagcagcgctggggcttcggcctggaggagctgtatggcctggccctgcgcttcttcaaggagaaggatggcaaggccttccaccccacctatgaggagaagctgaagctggtggccctgcacaagcaggtgctgatgggcccctacaacccagacacctgcccagaggtgggcttctttgatgtgctgggcaatgacagaagaagagagtgggccgccctgggcaacatgagcaaagaagatgccatggtggagtttgtgaagctgctgaaccgctgctgccacctgttcagcacctacgtggccagccacaagattgagaaggaggagcaggagaagaagaggaaggaggaggaggagaggagaagaagagaggaggaggagcgggagcggctgcagaaggaggaggagaagagaagaagagaggaggaggagcggctgcggcgggaggaggaggagcggcggcgcatcgaggaggagcggctgcggctggagcagcagaagcagcagatcatggccgccctgaacagccagacagctgtgcagttccagcagtatgctgcccagcagtacccaggcaactatgagcagcagcagatcctgatccggcagctgcaggagcagcactaccagcagtacatgcagcagctgtaccaggtgcagctggcccagcagcaggccgccctgcagaagcagcaggaggtggtggtggccggcagcagcctgcccaccagcagcaaggtgaatgccaccgtgcccagcaacatgatgtctgtgaatggccaggccaagacccacacagacagcagcgagaaggagctggagcctgaggccgctgaggaggccctggagaatggccccaaggagagcctgcctgtgattgctgcccccagcatgtggacccggccccagatcaaggacttcaaggagaagatccagcaggatgctgacagcgtcatcaccgtgggccgcggggaggtggtgacagtgcgggtgcccacccatgaggagggcagctacctgttctgggagtttgccacagacaactatgacattggatttggagtgtactttgagtggacagacagccccaacacagctgtgtctgtgcacgtgtctgagagcagtgatgatgatgaggaggaggaggagaacatcggctgtgaggagaaggccaagaagaatgccaacaagcccctgctggatgaaattgtgcctgtgtaccgccgggactgccacgaggaggtgtatgccggcagccaccagtacccaggccggggcgtgtacctgctgaagtttgacaacagctacagcctgtggaggagcaagtctgtgtactacagagtgtactacaccaggtag

SEQ ID NO: 212899 - DNA, 1587 bp, Artificial Sequence
  derived and/or modified sequence
atggccgccgtgctgaacgccgagcggctggaggtgagcgtggacggccttacgctgtcacccgatcccgaggaaaggcccggcgcggagggggcacccctgctcccaccaccacttccccctcccagccctcctgggagcggaagagggcctggggcctctggcgaacagccagaaccaggtgaagccgctgcagggggcgccgccgaggaagcgcggagacttgagcaaaggtggggctttggcctggaggagctctacggtttggctctccgtttttttaaggagaaggatggtaaggccttccatcccacttatgaagaaaagttgaagctggtggccttgcacaaacaggtgctcatggggccctataatccagacacttgcccagaggtgggttttttcgacgtcctgggcaacgatagacggagggagtgggccgccctgggcaacatgtccaaggaggatgccatggtcgaattcgtcaaacttttgaacagatgctgtcaccttttctccacctacgtggcttcccacaagatcgagaaggaggagcaggaaaaaaaacggaaagaggaagaagagcgccgtagaagggaagaggaggagagagagagactccagaaggaggaagagaagcggaggagagaggaagaagaacggcttcgcagagaagaagaggagcggagacggatagaggaggaacggctgaggttagagcaacagaagcaacagataatggctgcattgaatagccagaccgccgttcagtttcagcagtatgcagctcagcagtatcctgggaattacgagcagcaacaaatcctgattaggcagctccaggaacagcattaccagcaatatatgcagcagctctatcaagtgcagttggcccagcagcaggccgcgttgcagaaacagcaagaggtggtagtggctggaagctcactccccaccagttcaaaagtcaacgcaactgtcccttctaatatgatgagtgtaaatgggcaggctaagacacatactgattcgtccgaaaaagagctggagcctgaagctgctgaggaggccctggagaacggccctaaggagtcccttcctgtgatcgccgccccatccatgtggacacgtccacagatcaaggacttcaaggagaagatccagcaagacgcagattctgtaataaccgtaggacggggggaagtggtaactgtgcgggttccaacacacgaagagggatcctatttgttctgggagttcgccactgacaactatgatattgggtttggcgtgtatttcgagtggaccgacagccccaatactgcagttagcgtacacgtgtctgagtcttccgatgatgacgaggaagaagaggaaaacatcggctgcgaagagaaggccaagaagaatgccaataaacccctcttagacgaaatcgtgcctgtgtaccgcagagactgccatgaggaagtgtatgccgggtcccaccaatatcctggaagaggtgtttaccttctgaagttcgataacagctactcgctatggagaagcaagagcgtttattacagagtctactatacccgttag

SEQ ID NO: 212900 - DNA, 1587 bp, Artificial Sequence
  derived and/or modified sequence
atggccgctgtgctgaacgcagaaaggcttgaggtcagcgttgacggactcaccctgtcgccggatcccgaggagaggcctggtgccgagggggcacccctgctgccccctcccctgccgccacccagccccccaggctcagggcgaggacccggtgcctccggtgagcagcctgaacctggggaggccgctgccggtggtgcagcagaggaggctaggcgcctcgagcagcgctggggctttggacttgaagagttatacgggctagctctgcgcttttttaaagaaaaagacgggaaggcattccatcccacctatgaggaaaagctaaaactggtcgcactacataaacaagtgttgatgggaccttataatcccgacacgtgtcccgaagttgggttcttcgacgtgctgggcaatgaccgcaggagggaatgggctgccctgggaaatatgagtaaggaggatgccatggtggagtttgttaagctgctaaacaggtgttgtcacttgttttctacctacgtagccagtcataagatcgagaaagaagagcaggagaagaaacgcaaagaagaggaagagagacgtcggcgagaggaggaagaacgcgaacgtttacaaaaggaagaggaaaaacgaaggcgggaggaagaggagcgcttgcgcagggaggaagaagagaggagacggattgaggaggagcgactacgattggaacagcagaaacaacaaatcatggcagcactcaactcccagacggccgtgcagttccagcagtacgcggcacaacaataccccggaaattatgagcagcaacaaatcttgattcggcagctccaagagcaacattaccagcagtatatgcagcaattgtaccaagtccaactggcccaacagcaagcagctttgcagaagcagcaggaagttgtagtggccggatcctcactccctaccagcagcaaagttaatgcaacagttccctctaatatgatgagcgtgaacggacaggcaaaaacgcacaccgattcttccgaaaaggagttagaacccgaggccgctgaagaggcccttgaaaatgggccaaaagagtctctgccagtcattgccgctccttcgatgtggaccagacctcagattaaagactttaaagagaagatccaacaggatgcagatagcgtgataactgtaggaagaggggaagttgttaccgtgcgggtaccgactcacgaggaaggtagctatctgttttgggagtttgcgacagataattacgatatcgggtttggggtgtacttcgaatggactgactcacctaacaccgccgtgtccgttcatgtctcagagagctccgatgacgacgaggaggaggaggagaacatcgggtgcgaagagaaagcaaagaagaacgctaacaagcccctgttggatgagattgtgccagtctatcgtcgcgattgccacgaggaagtgtatgccggatctcatcagtaccccggtcggggtgtttatctcctcaagtttgacaactcttacagtttgtggcgcagtaagtcagtgtactatagagtatattatactcgatag

SEQ ID NO: 212901 - DNA, 1587 bp, Artificial Sequence
  derived and/or modified sequence
atggccgccgtgctgaacgccgagagactggaggtgagcgtggacggcctgaccctgagccccgaccccgaggagagacccggcgccgagggcgcccccctgctgcccccccccctgcccccccccagcccccccggcagcggcagaggccccggcgccagcggcgagcagcccgagcccggcgaggccgccgccggcggcgccgccgaggaggccagaagactggagcagagatggggcttcggcctggaggagctgtacggcctggccctgagattcttcaaggagaaggacggcaaggccttccaccccacctacgaggagaagctgaagctggtggccctgcacaagcaggtgctgatgggcccctacaaccccgacacctgccccgaggtgggcttcttcgacgtgctgggcaacgacagaagaagagagtgggccgccctgggcaacatgagcaaggaggacgccatggtggagttcgtgaagctgctgaacagatgctgccacctgttcagcacctacgtggccagccacaagatcgagaaggaggagcaggagaagaagagaaaggaggaggaggagagaagaagaagagaggaggaggagagagagagactgcagaaggaggaggagaagagaagaagagaggaggaggagagactgagaagagaggaggaggagagaagaagaatcgaggaggagagactgagactggagcagcagaagcagcagatcatggccgccctgaacagccagaccgccgtgcagttccagcagtacgccgcccagcagtaccccggcaactacgagcagcagcagatcctgatcagacagctgcaggagcagcactaccagcagtacatgcagcagctgtaccaggtgcagctggcccagcagcaggccgccctgcagaagcagcaggaggtggtggtggccggcagcagcctgcccaccagcagcaaggtgaacgccaccgtgcccagcaacatgatgagcgtgaacggccaggccaagacccacaccgacagcagcgagaaggagctggagcccgaggccgccgaggaggccctggagaacggccccaaggagagcctgcccgtgatcgccgcccccagcatgtggaccagaccccagatcaaggacttcaaggagaagatccagcaggacgccgacagcgtgatcaccgtgggcagaggcgaggtggtgaccgtgagagtgcccacccacgaggagggcagctacctgttctgggagttcgccaccgacaactacgacatcggcttcggcgtgtacttcgagtggaccgacagccccaacaccgccgtgagcgtgcacgtgagcgagagcagcgacgacgacgaggaggaggaggagaacatcggctgcgaggagaaggccaagaagaacgccaacaagcccctgctggacgagatcgtgcccgtgtacagaagagactgccacgaggaggtgtacgccggcagccaccagtaccccggcagaggcgtgtacctgctgaagttcgacaacagctacagcctgtggagaagcaagagcgtgtactacagagtgtactacaccagatag

SEQ ID NO: 212902 - DNA, 3573 bp, Artificial Sequence
  derived and/or modified sequence
ggaagtcgatacgtggctgccgtctgtccccgctgaggaggtgcagcagccggagatggcggcggtgctgaacgcagagcgactcgaggtgtccgtcgacggcctcacgctcagcccggacccggaggagcggcctggggcggagggcgccccgctgctgccgccaccgctgccaccgccctcgccacctggatccggtcgcggcccgggcgcctcaggggagcagcccgagcccggggaggcggcggctgggggcgcggcggaggaggcgcggcggctggagcagcgctggggtttcggcctggaggagttgtacggcctggcactgcgcttcttcaaagaaaaagatggcaaagcatttcatccaacttatgaagaaaaattgaagcttgtggcactgcataagcaagttcttatgggcccatataatccagacacttgtcctgaggttggattctttgatgtgttggggaatgacaggaggagagaatgggcagccctgggaaacatgtctaaagaggatgccatggtggagtttgtcaagctcttaaataggtgttgccatctcttttcaacatatgttgcgtcccacaaaatagagaaggaagagcaagaaaaaaaaaggaaggaggaagaggagcgaaggcggcgtgaagaggaagaaagagaacgtctgcaaaaggaggaagagaaacgtaggagagaagaagaggaaaggcttcgacgggaggaagaggaaaggagacggatagaagaagaaaggcttcggttggagcagcaaaagcagcagataatggcagctttaaactcccagactgccgtgcagttccagcagtatgcagcccaacagtatccagggaactacgaacagcagcaaattctcatccgccagttgcaggagcaacactatcagcagtacatgcagcagttgtatcaagtccagcttgcacagcaacaggcagcattacagaaacaacaggaagtagtagtggctgggtcttccttgcctacatcatcaaaagtgaatgcaactgtaccaagtaatatgatgtcagttaatggacaggccaaaacacacactgacagctccgaaaaagaactggaaccagaagctgcagaagaagccctggagaatggaccaaaagaatctcttccagtaatagcagctccatccatgtggacacgacctcagatcaaagacttcaaagagaagattcagcaggatgcagattccgtgattacagtgggccgaggagaagtggtcactgttcgagtacccacccatgaagaaggatcatatctcttttgggaatttgccacagacaattatgacattgggtttggggtgtattttgaatggacagactctccaaacactgctgtcagcgtgcatgtcagtgagtccagcgatgacgacgaggaggaagaagaaaacatcggttgtgaagagaaagccaaaaagaatgccaacaagcctttgctggatgagattgtgcctgtgtaccgacgggactgtcatgaggaggtgtatgctggcagccatcaatatccagggagaggagtctatctcctcaagtttgacaactcctactctttgtggcggtcaaaatcagtctactacagagtctattatactagataaaaatgttgttacaaagtctggagtctagggttgggcagaagatgacatttaatttggaaatttctttttacttttgtggagcattagagtcacagtttaccttattgatattggtctgatggtttgtgaactcttgctgggaatcaaaatttccttgagactctttagcattcatactttggggttaaaggagattcctcagactcatccagcccttgggtgctgaccagcagagtcactagtggatgctgaagttacatgagctacatgttaaatatttaaagtctccaaaataaaacaccccaacgttgaccttacccggctgatggttagccccttgctgcctgctccatgtgtcttatgagagcccgtagttacagtgtcctctaatttgaaatccataagttaacaagtctatatcaggtgcagctggctttgattaaaggccatttttaaaacttaaaaactcaacacctcacagattataatagaaaaagaaatggcctcagtttgatctcgttcagaatgacccagattgtttctgctttgggtgcagctgtttagttcagagttatattacagagaattattttctgagataatcttaaactagaatgttcaaaactaattgataattgaagtatcaagatacgtagaacacctcagagatttttcttcaggaacttccacaaactttgaatccttgtatctttatttggtattcatactactagtagcaaaatacaggttttttgttttgttttgttttgttttggcttcatagagtatctcaaattgaaacttttctgcacaaagaataaaattaaggattttataaactcaaattggcacctactgaattaaaatacataaaatcatttaaatataattcagcatatgggaagtaacattgcactaatatggaaatcactgccagagacagtctattttcttttaatttgttactacttagtcacaaaccccacattattccagtttggaattacttattaaggagaattggaaatacatatgcccatgcttaaattttatagctttaatttgtgttatttctttattgacgggaagaggtacatctttttttccttactgaaaacaaatatggattaattgcctcaaatttgtataagtgattggctagtgattcttgttttcagaagggagagtggtatagatagaaaatgacaaagatggcaatatacacttaatgttgttattgtatgttgttactgaagtacttagatttttaaaatttcaaatcctaaatcacttcttgtaggagggttttcattaactgcagtatatacagttcactacatatgggttgtttgagttttttgtgtgctgtatttctttctgttttttaatacctggttttgtacatatctaactctgttctcttttggttgttcagaaactggattttttttttcttaagcagtgcttaatttgtgttttttaattttgattcagaagtagtcccagctcataggtgttcatactgttacatccagaacatttgtcaggctctctgtcagctttcatgtacatatggtatagaaaccatggagttaggcacttcctggattttttttttatgagaaaaatactgtatttaaaatgtaaaataaacttttaaaaagcaggcactaatatatatttcttccagcctttgattacaaatttgtccttgcacatgttaagatgaattatctcctaaaaatatcattgttcttgggagcagtgtatgttactttacatagcagcggttcctgtcatgtgttcatgtcagaatatttttggttttaaactttcttattgcctttggctgttgattagtacagtacaagtgcgatttcaaaaagatcttgaaagtaatatatttaatcaattaaaatgtttatctgtaa

SEQ ID NO: 212903 - protein, 465 aa, Artificial Sequence
  derived and/or modified sequence
MEEEDEEARALLAGGPDEADRGAPAAPGALPALCDPSRLAHRLLVLLLMCFLGFGSYFCYDNPAALQTQVKRDMQVNTTKFMLLYAWYSWPNVVLCFFGGFLIDRVFGIRWGTIIFSCFVCIGQVVFALGGIFNAFWLMEFGRFVFGIGGESLAVAQNTYAVSWFKGKELNLVFGLQLSMARIGSTVNMNLMGWLYSKIEALLGSAGHTTLGITLMIGGITCILSLICALALAYLDQRAERILHKEQGKTGEVIKLTDVKDFSLPLWLIFIICVCYYVAVFPFIGLGKVFFTEKFGFSSQAASAINSVVYVISAPMSPVFGLLVDKTGKNIIWVLCAVAATLVSHMMLAFTMWNPWIAMCLLGLSYSLLACALWPMVAFVVPEHQLGTAYGFMQSIQNLGLAIISIIAGMILDSRGYLFLEVFFIACVSLSLLSVVLLYLVNRAQGGNLNYSARQREEIKFSHTE

SEQ ID NO: 212904 - protein, 514 aa, Artificial Sequence
  derived and/or modified sequence
MGVALRDLPGRHVSSRSHVTAVLTVFHGRCFLPGFGVVTTFPSPSPAGAMEEEDEEARALLAGGPDEADRGAPAAPGALPALCDPSRLAHRLLVLLLMCFLGFGSYFCYDNPAALQTQVKRDMQVNTTKFMLLYAWYSWPNVVLCFFGGFLIDRVFGIRWGTIIFSCFVCIGQVVFALGGIFNAFWLMEFGRFVFGIGGESLAVAQNTYAVSWFKGKELNLVFGLQLSMARIGSTVNMNLMGWLYSKIEALLGSAGHTTLGITLMIGGITCILSLICALALAYLDQRAERILHKEQGKTGEVIKLTDVKDFSLPLWLIFIICVCYYVAVFPFIGLGKVFFTEKFGFSSQAASAINSVVYVISAPMSPVFGLLVDKTGKNIIWVLCAVAATLVSHMMLAFTMWNPWIAMCLLGLSYSLLACALWPMVAFVVPEHQLGTAYGFMQSIQNLGLAIISIIAGMILDSRGYLFLEVFFIACVSLSLLSVVLLYLVNRAQGGNLNYSARQREEIKFSHTE

SEQ ID NO: 212905 - DNA, 1398 bp, Artificial Sequence
  derived and/or modified sequence
atggaggaggaggacgaggaggccagagccctgctggccggcggccccgacgaggccgacagaggcgcccccgccgcccccggcgccctgcccgccctgtgcgaccccagcagactggcccacagactgctggtgctgctgctgatgtgcttcctgggcttcggcagctacttctgctacgacaaccccgccgccctgcagacccaggtgaagagagacatgcaggtgaacaccaccaagttcatgctgctgtacgcctggtacagctggcccaacgtggtgctgtgcttcttcggcggcttcctgatcgacagagtgttcggcatcagatggggcaccatcatcttcagctgcttcgtgtgcatcggccaggtggtgttcgccctgggcggcatcttcaacgccttctggctgatggagttcggcagattcgtgttcggcatcggcggcgagagcctggccgtggcccagaacacctacgccgtgagctggttcaagggcaaggagctgaacctggtgttcggcctgcagctgagcatggccagaatcggcagcaccgtgaacatgaacctgatgggctggctgtacagcaagatcgaggccctgctgggcagcgccggccacaccaccctgggcatcaccctgatgatcggcggcatcacctgcatcctgagcctgatctgcgccctggccctggcctacctggaccagagagccgagagaatcctgcacaaggagcagggcaagaccggcgaggtgatcaagctgaccgacgtgaaggacttcagcctgcccctgtggctgatcttcatcatctgcgtgtgctactacgtggccgtgttccccttcatcggcctgggcaaggtgttcttcaccgagaagttcggcttcagcagccaggccgccagcgccatcaacagcgtggtgtacgtgatcagcgcccccatgagccccgtgttcggcctgctggtggacaagaccggcaagaacatcatctgggtgctgtgcgccgtggccgccaccctggtgagccacatgatgctggccttcaccatgtggaacccctggatcgccatgtgcctgctgggcctgagctacagcctgctggcctgcgccctgtggcccatggtggccttcgtggtgcccgagcaccagctgggcaccgcctacggcttcatgcagagcatccagaacctgggcctggccatcatcagcatcatcgccggcatgatcctggacagcagaggctacctgttcctggaggtgttcttcatcgcctgcgtgagcctgagcctgctgagcgtggtgctgctgtacctggtgaacagagcccagggcggcaacctgaactacagcgccagacagagagaggagatcaagttcagccacaccgagtag

SEQ ID NO: 212906 - DNA, 1545 bp, Artificial Sequence
  derived and/or modified sequence
atgggcgtggccctgagagacctgcccggcagacacgtgagcagcagaagccacgtgaccgccgtgctgaccgtgttccacggcagatgcttcctgcccggcttcggcgtggtgaccaccttccccagccccagccccgccggcgccatggaggaggaggacgaggaggccagagccctgctggccggcggccccgacgaggccgacagaggcgcccccgccgcccccggcgccctgcccgccctgtgcgaccccagcagactggcccacagactgctggtgctgctgctgatgtgcttcctgggcttcggcagctacttctgctacgacaaccccgccgccctgcagacccaggtgaagagagacatgcaggtgaacaccaccaagttcatgctgctgtacgcctggtacagctggcccaacgtggtgctgtgcttcttcggcggcttcctgatcgacagagtgttcggcatcagatggggcaccatcatcttcagctgcttcgtgtgcatcggccaggtggtgttcgccctgggcggcatcttcaacgccttctggctgatggagttcggcagattcgtgttcggcatcggcggcgagagcctggccgtggcccagaacacctacgccgtgagctggttcaagggcaaggagctgaacctggtgttcggcctgcagctgagcatggccagaatcggcagcaccgtgaacatgaacctgatgggctggctgtacagcaagatcgaggccctgctgggcagcgccggccacaccaccctgggcatcaccctgatgatcggcggcatcacctgcatcctgagcctgatctgcgccctggccctggcctacctggaccagagagccgagagaatcctgcacaaggagcagggcaagaccggcgaggtgatcaagctgaccgacgtgaaggacttcagcctgcccctgtggctgatcttcatcatctgcgtgtgctactacgtggccgtgttccccttcatcggcctgggcaaggtgttcttcaccgagaagttcggcttcagcagccaggccgccagcgccatcaacagcgtggtgtacgtgatcagcgcccccatgagccccgtgttcggcctgctggtggacaagaccggcaagaacatcatctgggtgctgtgcgccgtggccgccaccctggtgagccacatgatgctggccttcaccatgtggaacccctggatcgccatgtgcctgctgggcctgagctacagcctgctggcctgcgccctgtggcccatggtggccttcgtggtgcccgagcaccagctgggcaccgcctacggcttcatgcagagcatccagaacctgggcctggccatcatcagcatcatcgccggcatgatcctggacagcagaggctacctgttcctggaggtgttcttcatcgcctgcgtgagcctgagcctgctgagcgtggtgctgctgtacctggtgaacagagcccagggcggcaacctgaactacagcgccagacagagagaggagatcaagttcagccacaccgagtag

SEQ ID NO: 212907 - DNA, 1398 bp, Artificial Sequence
  derived and/or modified sequence
atggaagaggaagatgaggaggcccgggccctcctagccggcgggcccgatgaagccgacagaggcgccccggcagcccctggcgctttacccgctctatgcgaccctagtcgactggcgcaccgcctcctcgtgctactacttatgtgtttcctgggctttggctcatacttttgctacgataaccctgctgctctgcagactcaagtaaagcgggatatgcaggttaacaccaccaaattcatgctgttgtacgcatggtacagttggcccaacgtggtcctgtgcttcttcggaggctttctcattgacagagtttttggcatcaggtggggcacaatcatctttagctgcttcgtgtgtatcggccaggttgtgttcgctctcggcggcattttcaacgctttctggctaatggagttcgggagatttgtgtttggcatcggcggagaatccttagcagttgctcaaaatacatacgcagtgtcttggttcaagggcaaagaactgaacctggtgttcggcctgcagctgtctatggcacggattggcagcacagtgaatatgaacctgatggggtggctttacagtaaaattgaggccctgttggggtcggccgggcataccaccttgggcattacgctcatgattggggggataacttgtatattgtccctgatttgcgcgttagccctcgcctacttggatcagagagctgagcggatcctgcacaaggaacaggggaagactggcgaggtcatcaagctgactgacgtcaaagacttttcgctcccactctggctcatatttattatctgtgtgtgttattacgtcgccgtctttccattcataggcttggggaaagtgttcttcactgaaaagttcggtttctcatctcaggccgcatcagccatcaacagcgtggtgtacgtgatttccgccccgatgagccccgtttttggacttctggtggacaagaccggaaagaatatcatttgggttctctgcgctgtggcagcgacactggtgtctcacatgatgctggcgtttaccatgtggaacccgtggatcgctatgtgtctcttggggttatcttactccctcctggcttgcgcgttatggcccatggtggcatttgtcgtgcctgaacaccagctcggaaccgcatatggattcatgcaaagcatacagaacctgggactggcaatcatatcaattattgctggaatgatactcgacagccggggatacctctttctggaagttttcttcatcgcatgcgtgtcgctgagcttattgagcgtcgttctgctctacttagtcaaccgcgcccagggaggcaatctgaactattcagctaggcagcgcgaagaaatcaaattctcgcacacagagtag

SEQ ID NO: 212908 - DNA, 1545 bp, Artificial Sequence
  derived and/or modified sequence
atgggcgtggctctccgcgacctcccaggccggcatgtgagtagccgcagccacgtgactgcagtcctcaccgtcttccatggacgctgtttcctgcccggtttcggagtagtgacaaccttccccagcccatctcctgccggcgctatggaagaggaagacgaggaagcacgcgcactgctcgcaggcgggcccgacgaggcggaccgaggtgctccagccgcccctggcgctttacctgcgctatgcgatccctcaagactggctcaccggctcctggtgctccttctcatgtgcttcttgggttttggcagttatttttgctacgacaacccggcagcgctgcagacacaggtcaagcgtgacatgcaggtgaacacaaccaaattcatgctgctatacgcctggtactcctggcctaatgttgtactctgtttttttggagggttcctcatcgaccgtgtattcggtataaggtggggcaccattattttctcttgtttcgtttgtatcggacaggtggtatttgctctgggcggcattttcaatgccttctggctgatggaatttgggcggttcgtgtttgggattggcggcgaatcgttggctgttgcgcagaatacgtacgctgtgagctggtttaaaggtaaggaacttaatctggtgttcggactgcagttgagtatggcacggattgggtccaccgtgaatatgaacctgatgggctggctgtatagcaagatcgaggccctccttggcagcgcgggacatactactctcggcatcaccctgatgatcgggggcatcacctgtatcctttccctcatctgcgcccttgccctggcttatctcgatcagcgggcagaacggatactacacaaggaacaaggcaaaacaggtgaagtgattaagttgaccgatgtcaaagatttttcactgccactttggctgatctttatcatctgcgtgtgctactacgtagcggtttttcctttcattggccttggaaaggtattttttaccgagaagttcggcttttcctcccaggctgcatcggccatcaatagcgttgtttacgtgatcagcgcgccaatgtcccctgtgttcggactgctggtggacaagactggaaagaacattatttgggtcttatgtgcggtggcagccacacttgtgagtcacatgatgcttgcatttaccatgtggaatccgtggatcgcaatgtgtctcctgggcctgtcttacagccttcttgcctgtgcgctgtggccaatggtggcctttgtggtgccagaacaccagctaggtacagcttatggctttatgcaatctatccagaatctgggcctcgccataattagcatcatagccggtatgatcctggattccagggggtacttgtttctcgaggtgtttttcattgcgtgtgtgtccctcagcctactgagtgttgtgctgctttacttagtcaatcgcgcccagggtggcaatctcaattatagtgccagacaacgtgaggagataaagttcagccacacggaatag

SEQ ID NO: 212909 - DNA, 2361 bp, Artificial Sequence
  derived and/or modified sequence
agtcacccaggaaaagcgaaccgcgccaggccctgtcatcgaccgctgggtccgtcctcccagcgctcgcggccgctcacatgggcgtggccctgcgtgacctgccggggcgtcacgtgagctcccggagtcatgtgaccgccgtcttgacagtgttccacgggcgctgcttcctgcctgggtttggagttgtcaccactttcccctctccgtctcctgcgggcgcaatggaggaggaggatgaggaagcgcgggcgctcctggcaggcggccctgacgaggccgacagaggtgccccggccgcccctggagccctgccggccctctgcgaccccagtcgcctggcgcaccggcttttggtgctgttactgatgtgcttccttggctttggcagctatttttgctatgataatcctgctgcccttcagactcaagttaaacgagatatgcaagtgaataccacgaaattcatgctgctgtatgcctggtattcttggcccaatgtagttttgtgtttctttggtggctttttgatagaccgagtatttggaatacgatggggcacaatcatttttagctgctttgtttgcattggacaggttgtttttgccctgggtggaatatttaatgctttttggctgatggaatttggaagatttgtatttgggattggtggcgagtccttagcagttgcccagaatacatatgctgtgagctggtttaaaggcaaagaattaaacctggtgtttggacttcaacttagcatggctagaattggaagtacagtaaacatgaacctcatgggatggctgtattctaagattgaagctttgttaggttctgctggtcacacaaccctcgggatcacacttatgattgggggtataacgtgtattctttcactaatctgtgccttggctcttgcctacttggatcagagagcagagagaatccttcataaagaacaaggaaaaacaggtgaagttattaaattaactgatgtaaaggacttctccttacccctgtggcttatatttatcatctgtgtctgctattatgttgctgtgttcccttttattggacttgggaaagttttctttacagagaaatttggattttcttcccaggcagcaagtgcaattaacagtgttgtatatgtcatatcagctcccatgtccccggtgtttgggctcctggtggataaaacagggaagaacatcatctgggttctttgcgcagtagcagccactcttgtgtcccacatgatgctggcctttacgatgtggaacccttggattgctatgtgtcttctgggactctcctactcattgcttgcctgtgcattgtggccaatggtggcatttgtagttcctgaacatcagctgggaactgcatatggcttcatgcagtccattcagaatcttgggttggccatcatttccatcattgctggtatgatactggattctcgggggtatttgtttttggaagtgttcttcattgcctgtgtttctttgtcacttttatctgtggtcttactctatttggtgaatcgtgcccagggtgggaacctaaattattctgcaagacaaagggaagaaataaaattttcccatactgaatgagaagttaaaatgaatgtgtcatgagaatgggcttaacacatcgttggtttgaaaacttccatttttaaaaatttagagtttagtcattagaaaaaataatggactggaaagttatatttatatccaaatatacctatttcaaagtgtatttgtgaggcctgttttagcctgtgtcttttgtattgtgtgttgctaaagaattctacttttagtaggctaatcaacaatgaaagggttagaaaattgctgtggaacatccaggtgaacttcaggaaagacagtgaaaaatggaaaacgttggagcttctgttgagataatcttcattaggtatatatcttagggatacagccttttctttatcttatagcaggaaaaaaaaacttttgagggaaatagaagggctgcgttacacaaaataaacaatggcattgtcataggccttccttttactagtagggcataatgctagggaatatgtgaagatgtttttatgaagtctctttctgatcacgaacaatagcttgcgctctactctgtagttatgtggattgccgagcaatgacccttttcaatttcttatttctgtgttactgaggaccctaatcacttagggatgtaattttatagtataaactttctgtacagtttttcttatagtctaataagtaaaaagtgtccttcaaattatgataattgcctatgtacatggataaattaaaacactgcacacggagt

SEQ ID NO: 212910 - DNA, 2423 bp, Artificial Sequence
  derived and/or modified sequence
agtgcagtaattggtggaaagctggaagtgggcacctcgagggcctcagccccacgaacacagtcacccaggaaaagcgaaccgcgccaggccctgtcatcgaccgctgggtccgtcctcccagcgctcgcggccgctcacatgggcgtggccctgcgtgacctgccggggcgtcacgtgagctcccggagtcatgtgaccgccgtcttgacagtgttccacgggcgctgcttcctgcctgggtttggagttgtcaccactttcccctctccgtctcctgcgggcgcaatggaggaggaggatgaggaagcgcgggcgctcctggcaggcggccctgacgaggccgacagaggtgccccggccgcccctggagccctgccggccctctgcgaccccagtcgcctggcgcaccggcttttggtgctgttactgatgtgcttccttggctttggcagctatttttgctatgataatcctgctgcccttcagactcaagttaaacgagatatgcaagtgaataccacgaaattcatgctgctgtatgcctggtattcttggcccaatgtagttttgtgtttctttggtggctttttgatagaccgagtatttggaatacgatggggcacaatcatttttagctgctttgtttgcattggacaggttgtttttgccctgggtggaatatttaatgctttttggctgatggaatttggaagatttgtatttgggattggtggcgagtccttagcagttgcccagaatacatatgctgtgagctggtttaaaggcaaagaattaaacctggtgtttggacttcaacttagcatggctagaattggaagtacagtaaacatgaacctcatgggatggctgtattctaagattgaagctttgttaggttctgctggtcacacaaccctcgggatcacacttatgattgggggtataacgtgtattctttcactaatctgtgccttggctcttgcctacttggatcagagagcagagagaatccttcataaagaacaaggaaaaacaggtgaagttattaaattaactgatgtaaaggacttctccttacccctgtggcttatatttatcatctgtgtctgctattatgttgctgtgttcccttttattggacttgggaaagttttctttacagagaaatttggattttcttcccaggcagcaagtgcaattaacagtgttgtatatgtcatatcagctcccatgtccccggtgtttgggctcctggtggataaaacagggaagaacatcatctgggttctttgcgcagtagcagccactcttgtgtcccacatgatgctggcctttacgatgtggaacccttggattgctatgtgtcttctgggactctcctactcattgcttgcctgtgcattgtggccaatggtggcatttgtagttcctgaacatcagctgggaactgcatatggcttcatgcagtccattcagaatcttgggttggccatcatttccatcattgctggtatgatactggattctcgggggtatttgtttttggaagtgttcttcattgcctgtgtttctttgtcacttttatctgtggtcttactctatttggtgaatcgtgcccagggtgggaacctaaattattctgcaagacaaagggaagaaataaaattttcccatactgaatgagaagttaaaatgaatgtgtcatgagaatgggcttaacacatcgttggtttgaaaacttccatttttaaaaatttagagtttagtcattagaaaaaataatggactggaaagttatatttatatccaaatatacctatttcaaagtgtatttgtgaggcctgttttagcctgtgtcttttgtattgtgtgttgctaaagaattctacttttagtaggctaatcaacaatgaaagggttagaaaattgctgtggaacatccaggtgaacttcaggaaagacagtgaaaaatggaaaacgttggagcttctgttgagataatcttcattaggtatatatcttagggatacagccttttctttatcttatagcaggaaaaaaaaacttttgagggaaatagaagggctgcgttacacaaaataaacaatggcattgtcataggccttccttttactagtagggcataatgctagggaatatgtgaagatgtttttatgaagtctctttctgatcacgaacaatagcttgcgctctactctgtagttatgtggattgccgagcaatgacccttttcaatttcttatttctgtgttactgaggaccctaatcacttagggatgtaattttatagtataaactttctgtacagtttttcttatagtctaataagtaaaaagtgtccttcaaattatgataattgcctatgtacatggataaattaaaacactgcacacggagta

SEQ ID NO: 212911 - DNA, 1398 bp, Artificial Sequence
  derived and/or modified sequence
atggaggaggaggatgaggaggcccgggccctgctggccggcggcccagatgaagctgacagaggagccccagctgcccctggggccctgcctgccctgtgtgaccccagccggctggcccaccggctgctggtgctgctgctgatgtgcttcctgggcttcggcagctacttctgctatgacaacccagctgccctgcagacccaggtgaagagggacatgcaggtgaacaccaccaagttcatgctgctgtatgcctggtacagctggcccaacgtggtgctgtgcttcttcggcggcttcctgattgacagagtgtttggcatccgctggggcaccatcatcttcagctgctttgtgtgcatcggccaggtggtgtttgccctgggcggcatcttcaatgccttctggctgatggagtttggccgctttgtgtttggcatcggcggggagagcctggccgtggcccagaacacctatgctgtgtcctggttcaagggcaaggagctgaacctggtgtttggcctgcagctgtccatggccagaattggcagcacagtgaacatgaacctgatgggctggctgtacagcaagattgaggccctgctgggcagcgctggccacaccaccctgggcatcaccctgatgattggaggcatcacctgcatcctgagcctcatctgtgccctggccctggcctacctggaccagagagctgagcgcatcctgcacaaggagcagggcaagacaggagaggtgatcaagctgacagatgtgaaggacttcagcctgcccctgtggctgatcttcatcatctgtgtgtgctactacgtggccgtgttccccttcatcggcctgggcaaggtgttcttcacagagaagtttggcttcagcagccaggccgccagcgccatcaacagcgtggtgtatgtgatcagcgcccccatgagccctgtgtttggcctgctggtggacaagacaggcaagaacatcatctgggtgctgtgtgctgtggccgccaccctggtgagccacatgatgctggccttcaccatgtggaacccctggatcgccatgtgcctgctgggcctgagctacagcctgctggcctgtgccctgtggcccatggtggcctttgtggtgcctgagcaccagctgggcacagcctacggcttcatgcagagcatccagaacctgggcctggccatcatcagcatcatcgccggcatgatcctggacagccggggctacctgttcctggaggtgttcttcatcgcctgtgtgtccctgagcctgctgtctgtggtgctgctgtacctggtgaacagagcccagggcggcaacctgaactacagcgcccggcagcgggaggagatcaagttcagccacacagaatag

SEQ ID NO: 212912 - DNA, 1545 bp, Artificial Sequence
  derived and/or modified sequence
atgggcgtggccctgcgggacctgcccggccgccacgtgagcagccgcagccacgtgacagctgtgctgaccgtcttccacggccgctgcttcctgcccggctttggagtggtgaccaccttccccagccccagccctgctggggccatggaggaggaggatgaggaggcccgggccctgctggccggcggcccagatgaggccgacagaggagccccagctgcccctggggccctgcctgccctgtgtgaccccagccggctggcccaccggctgctggtgctgctgctgatgtgcttcctgggcttcggcagctacttctgctatgacaacccagctgccctgcagacccaggtgaagagggacatgcaggtgaacaccaccaagttcatgctgctgtatgcctggtacagctggcccaacgtggtgctgtgcttctttggaggcttcctgattgacagagtgtttggcatccgctggggcaccatcatcttcagctgctttgtgtgcatcggccaggtggtgtttgccctgggcggcatcttcaatgccttctggctgatggagtttggccgctttgtgtttggaattggaggagagagcctggccgtggcccagaacacctatgctgtgtcctggttcaagggcaaggagctgaacctggtgtttggcctgcagctgtccatggcccgcatcggcagcacagtgaacatgaacctgatgggctggctgtacagcaagattgaggccctgctgggcagcgctggccacaccaccctgggcatcaccctgatgattggaggcatcacctgcatcctgagcctcatctgtgccctggccctggcctacctggaccagagagctgagcgcatcctgcacaaggagcagggcaagacaggagaggtgatcaagctgacagatgtgaaggacttcagcctgcccctgtggctgatcttcatcatctgtgtgtgctactacgtggccgtgttccccttcatcggcctgggcaaggtgttcttcacagagaagtttggcttcagcagccaggccgccagcgccatcaacagcgtggtgtatgtgatcagcgcccccatgagccctgtgtttggcctgctggtggacaagacaggcaagaacatcatctgggtgctgtgtgctgtggccgccaccctggtgagccacatgatgctggccttcaccatgtggaacccctggatcgccatgtgcctgctgggcctgagctacagcctgctggcctgtgccctgtggcccatggtggcctttgtggtgcctgagcaccagctgggcacagcctacggcttcatgcagagcatccagaacctgggcctggccatcatcagcatcatcgccggcatgatcctggacagccggggctacctgttcctggaggtgttcttcatcgcctgtgtgtccctgagcctgctgtctgtggtgctgctgtacctggtgaacagagcccagggcggcaacctgaactacagcgcccggcagcgggaggagatcaagttcagccacacagaatag

SEQ ID NO: 212913 - DNA, 1398 bp, Artificial Sequence
  derived and/or modified sequence
atggaggaggaggacgaggaggcccgggccctgctggccggcggcccggacgaagcagacaggggtgcccccgccgctcctggcgccttacctgcactctgtgatccttctcgcctcgcacatcgcttgcttgtgctgctattgatgtgttttttaggatttggctcatatttttgctatgacaatccggctgccctgcagactcaggttaagagagacatgcaggtcaacacaacgaaattcatgctcctctatgcctggtattcctggcccaatgttgttttatgtttcttcggggggttccttatcgatagggtgtttggaattcggtggggcacaatcatctttagctgctttgtctgcatcgggcaagtggtgtttgctctgggcgggatattcaacgctttttggctcatggagtttggccgtttcgtgtttgggattggaggcgagtcccttgccgtggcccagaatacctatgcagtgagctggttcaaggggaaagaactcaatctggtgtttggcctgcaactttctatggcgcgcataggaagtactgtgaatatgaatttgatgggctggctgtactcgaagattgaggccctcttagggtcggccggccataccactctgggcattaccttgatgataggaggcattacgtgcatactctccctgatctgtgccctggccctggcttacctggatcaacgtgctgagaggattctacataaggagcagggtaaaacaggcgaagtgatcaagctgaccgacgtaaaggacttctcgctgcccctgtggctgatattcattatctgcgtttgctactacgtagcagtgtttccttttatcggattaggaaaggtttttttcactgaaaagtttggattttcctcacaggctgcatctgcaattaattcagttgtatacgttatctcagcaccgatgtccccagtcttcgggcttttggtcgataagacgggtaagaacatcatttgggtgctgtgtgccgttgccgctaccctggtgtcacatatgatgctcgctttcaccatgtggaatccatggatagccatgtgcttgctgggtctttcttattccctgctcgcttgtgcactatggcccatggttgcgtttgtggtacctgagcaccagctcgggaccgcatatggcttcatgcagtccatccaaaacttgggcctcgccattatctcaatcatcgccggaatgatcttagatagccgagggtatctgtttttagaggtgttcttcatcgcgtgcgtttccctgtcgctgttgagcgtggtacttctgtacctggtcaatcgcgcccagggtggcaatctaaactacagtgccagacaaagggaggaaatcaagttttcgcacacagagtag

SEQ ID NO: 212914 - DNA, 1545 bp, Artificial Sequence
  derived and/or modified sequence
atgggcgtggccctgcgggacctgcccggccggcacgtgagcagcaggtcccacgtaacagcagtgctgaccgtttttcatggccgctgtttcctgcctggtttcggcgttgtgactacttttcccagtccatctccagctggggccatggaagaggaggacgaagaggcccgggctctactggcaggtgggcctgatgaagctgatcgaggagctcccgcagccccgggtgcccttccggcgctgtgtgatccatctcggctagcacatcgcctgttggtgttgctgttaatgtgcttcctgggcttcggctcctatttttgttatgacaaccccgccgcactgcagactcaggtgaagagagacatgcaggtgaatacaaccaagtttatgctgctgtatgcttggtattcatggcctaatgtcgtcctctgcttttttggaggtttcctgatcgacagggtatttggcatccgatgggggaccattatcttctcctgctttgtctgcattggccaggtggtcttcgccctgggggggatattcaatgctttctggttaatggaattcggccggtttgtctttggaatagggggtgaatctctagctgtggcccagaatacctacgcagtgtcatggtttaaaggcaaagaactgaacctagttttcggcttacagctctcaatggcccgcatcgggtctacagtgaatatgaatcttatgggatggctttattcaaagatcgaagctttactgggatccgcaggtcacaccaccttaggtattacgctaatgatcggcggtattacttgtatccttagcttgatttgcgccctggctctcgcatacctggatcaacgagctgagcgcatcctgcataaggaacagggcaagaccggcgaagtgataaaactgacagatgtgaaggacttctccctccccctctggctgatattcatcatctgtgtatgttattatgtggccgtttttccctttataggactgggaaaggttttttttacagagaaattcgggttttcttcgcaagccgcttccgccattaatagcgttgtgtacgtgattagcgctccaatgagtcccgtgttcggactcctggtggacaagactggcaagaacatcatttgggtcctgtgtgcggtggcagctaccctggtctcacatatgatgctcgcatttaccatgtggaacccatggatagccatgtgtctgctcggactgtcctactcccttctggcttgcgctctgtggcctatggtagcgttcgtcgtacctgaacatcaattgggcaccgcctatggattcatgcaatccattcagaacttgggcctggccatcataagcataatcgctggcatgatcttggactcacggggatacctcttccttgaggtcttcttcattgcatgtgtgtctctgtcactcctgtctgtagtgctgctgtatctggtgaacagggctcagggcgggaacctaaattactccgcacgtcagagagaagagatcaagttctctcacactgagtag

SEQ ID NO: 212915 - DNA, 1398 bp, Artificial Sequence
  derived and/or modified sequence
atggaggaggaagatgaggaagctagggctctgctcgctggagggccagacgaagctgatcgcggagcacctgctgccccaggggctctgcccgcactgtgcgaccccagccgactggctcatagactgttggtgctgctcttgatgtgctttcttggattcggcagctatttttgttacgacaatccagccgctttgcagacgcaggttaagagggacatgcaagttaacacaaccaaattcatgctgttatacgcatggtacagctggcctaacgtggtgctctgcttcttcggcggtttcctgatagacagggtgttcgggatcagatggggcacaatcatcttctcctgttttgtttgtatcggtcaggtggtgtttgctctgggcggtatttttaatgccttctggctcatggaatttgggagattcgtgttcggaatcgggggagagtcattggctgtggcccagaacacatatgcagtcagctggtttaagggcaaggagttgaatctggtttttgggttgcaactgtcaatggccagaataggatccaccgtgaacatgaacttaatgggatggctgtactcaaagatagaggcactgttgggatctgctggtcacacaaccttaggcattacactgatgatcggagggattacatgcatcctcagcctgatctgcgcccttgcactcgcttaccttgatcaacgggctgagcgaattctgcacaaggagcaaggaaagacgggcgaggtgattaaacttaccgatgttaaggattttagtctgcccctgtggctgatttttataatctgtgtgtgttactatgttgctgtgtttccgtttatcggtcttggcaaagtattcttcacagaaaaattcggattcagttcacaggccgcaagtgctattaattctgtggtctatgtcataagcgcaccaatgtcccccgtgtttggtctcctcgtggataagaccggaaagaacatcatctgggtgctgtgtgcagttgcggctaccctcgtgagccatatgatgctggcattcacaatgtggaacccctggattgcaatgtgtttactcggactcagttactctctgttagcctgtgctctctggcctatggtcgccttcgtggttcccgagcatcaactgggcaccgcatacgggttcatgcagtctatacagaatctggggctagcaattatttcaataatcgctggtatgatcttggattctagaggctacctcttcctcgaggttttcttcatcgcatgcgtgagtctgagcctgttgtcagtggtcctactctatctagtcaacagagcgcagggcggtaacctgaattatagcgctaggcaacgcgaagagatcaaattcagccataccgagtag

SEQ ID NO: 212916 - DNA, 1545 bp, Artificial Sequence
  derived and/or modified sequence
atgggtgtggcactcagagatctgccaggaaggcacgtaagctcgcgctcccacgtgacagccgtccttaccgtcttccatggccgatgctttctgccaggatttggagttgtgacaacattcccatctccctcacctgcaggcgctatggaagaggaggacgaagaagccagagcactcctcgcaggcggacccgatgaagcagatcggggagccccagccgctcctggcgctctaccagctctgtgcgatccctcgcggctcgctcacagacttctcgttcttttgcttatgtgcttcctaggattcggaagttatttctgctatgataatcccgctgctctgcagacacaggtcaaaagagacatgcaagtgaacaccacaaaatttatgcttctctacgcctggtatagttggccaaatgtagtgctgtgctttttcgggggttttctcattgatcgtgtgtttggaataagatggggcactatcatttttagttgctttgtttgcatcgggcaggtggtctttgcactagggggaatcttcaatgcgttctggctcatggagtttggacgcttcgtgtttgggattggtggtgaaagtctggcagttgcccagaacacatacgctgtctcctggttcaaggggaaagagctgaacctggtgtttggactgcagttatctatggccaggataggttcaacagttaacatgaaccttatggggtggctttactccaaaattgaggctctgttggggagtgctggccatacaacccttggtattacactaatgatcggtggtattacctgcatactgtctcttatatgtgcgttggcccttgcgtacctggatcagcgagcagaaagaatcctccataaggagcagggaaagactggggaagtgataaaactgaccgacgtcaaagactttagcctgcctctttggctcatctttatcatttgcgtatgctactacgtcgccgtttttccttttatcggactggggaaagtgttttttaccgagaagttcggcttcagttcccaagccgcttcagcaatcaactcagtggtgtacgtcatctccgcccctatgtctcccgtgttcggtctgctggtcgacaagaccggcaaaaacatcatttgggtcttgtgcgccgtcgccgctacactcgtgagccacatgatgttggccttcacaatgtggaacccatggattgcaatgtgtcttttgggcctatcttattctctcttagcttgtgccctctggcctatggtcgctttcgtggtccctgaacatcagctggggaccgcttacggattcatgcaatctattcagaatcttggattggctattatttctataatcgccggaatgatattagactcgcgcggatatcttttcctggaggttttctttattgcatgtgtttctctgtcactcctttccgtggttttgctctacctggttaaccgtgcacagggtggtaacctgaattattccgccagacagagggaagaaatcaagttcagccatactgagtag

SEQ ID NO: 212917 - protein, 343 aa, Artificial Sequence
  derived and/or modified sequence
MAGGRPHLKRSFSIIPCFVFVESVLLGIVILLAYRLEFTDTFPVHTQGFFCYDSTYAKPYPGPEAASRVPPALVYALVTAGPTLTILLGELARAFFPAPPSAVPVIGESTIVSGACCRFSPPVRRLVRFLGVYSFGLFTTTIFANAGQVVTGNPTPHFLSVCRPNYTALGCLPPSPDRPGPDRFVTDQGACAGSPSLVAAARRAFPCKDAALCAYAVTYTAMYVTLVFRVKGSRLVKPSLCLALLCPAFLVGVVRVAEYRNHWSDVLAGFLTGAAIATFLVTCVVHNFQSRPPSGRRLSPWEDLGQAPTMDSPLEKNPRSAGRIRHRHGSPHPSRRTAPAVAT

SEQ ID NO: 212918 - DNA, 1032 bp, Artificial Sequence
  derived and/or modified sequence
atggccggcggcagaccccacctgaagagaagcttcagcatcatcccctgcttcgtgttcgtggagagcgtgctgctgggcatcgtgatcctgctggcctacagactggagttcaccgacaccttccccgtgcacacccagggcttcttctgctacgacagcacctacgccaagccctaccccggccccgaggccgccagcagagtgccccccgccctggtgtacgccctggtgaccgccggccccaccctgaccatcctgctgggcgagctggccagagccttcttccccgccccccccagcgccgtgcccgtgatcggcgagagcaccatcgtgagcggcgcctgctgcagattcagcccccccgtgagaagactggtgagattcctgggcgtgtacagcttcggcctgttcaccaccaccatcttcgccaacgccggccaggtggtgaccggcaaccccaccccccacttcctgagcgtgtgcagacccaactacaccgccctgggctgcctgccccccagccccgacagacccggccccgacagattcgtgaccgaccagggcgcctgcgccggcagccccagcctggtggccgccgccagaagagccttcccctgcaaggacgccgccctgtgcgcctacgccgtgacctacaccgccatgtacgtgaccctggtgttcagagtgaagggcagcagactggtgaagcccagcctgtgcctggccctgctgtgccccgccttcctggtgggcgtggtgagagtggccgagtacagaaaccactggagcgacgtgctggccggcttcctgaccggcgccgccatcgccaccttcctggtgacctgcgtggtgcacaacttccagagcagaccccccagcggcagaagactgagcccctgggaggacctgggccaggcccccaccatggacagccccctggagaagaaccccagaagcgccggcagaatcagacacagacacggcagcccccaccccagcagaagaaccgcccccgccgtggccacctag

SEQ ID NO: 212919 - DNA, 1032 bp, Artificial Sequence
  derived and/or modified sequence
atggcaggtggccgaccacacctcaaacgatcattctccatcatcccttgcttcgtatttgtagagtcggttctattaggcattgtaattctgctcgcttacaggcttgagtttacggataccttcccagtgcacacccagggttttttctgctatgacagcacatatgctaagccatatcccgggcctgaagccgcctctagagtgcccccagcccttgtgtatgcgctagttaccgctggtccaactttgaccatattgctgggggagttggccagggcttttttccctgcaccgccaagcgccgtgcctgtcataggcgagtcgactatcgtgtctggagcgtgttgccggttttcaccccctgtccggcggctggtaaggttcctaggagtctactcatttgggctgtttacaactacaatctttgcgaacgccggtcaagttgtgaccggcaatcccaccccccacttcctttcggtatgccgcccaaactatactgcactgggttgcctgcctccaagtcccgatcggccagggcctgatcgatttgttacggaccagggggcatgtgctggcagccctagcctggttgccgccgcacgtcgggcatttccgtgcaaagacgcggccctgtgtgcttacgctgtcacatacaccgctatgtacgtgacactggtgtttagagttaaggggtcgagactcgtaaaaccttccctgtgcctagcacttctctgtccagcatttctggtgggcgttgtgcgcgtcgccgagtacagaaatcattggagcgacgtgttagcaggctttctcaccggcgcagctatagcaactttcctggtgacttgtgtcgtgcacaactttcaatctagacctccatccggtcggcgcttatccccctgggaggacctcggacaggcccccacaatggacagccctctggaaaagaacccccgcagcgcaggtcgtatcaggcatagacatggatctcctcatccttctaggaggactgccccagccgtagctacttag

SEQ ID NO: 212920 - DNA, 2723 bp, Artificial Sequence
  derived and/or modified sequence
atgcaaatgagacgcccggaggccccgcccctccctccacctcggagtctgcgcggcgcggccaggcccggccgaccgcgtctcggtcttcgcgtctgccagcctggctggcagtccgtctgtccatcccgccgcgccggggcagtctaggcggagcgggggctcaggcggcggcggcctcgacgcgagtgagtgtcgtggttggggtgctggacccagagtgcctaccctcgcctgcctgggcctcagtttccacatctgcacaatgggggtgaccatccctgccctgctggctgccaggagcggctgtgagtcttcaggcgtggatgcagcctgggggaagccatagggcgctttcacaggcctggccttcaccatggcgggagggagaccgcatctgaagaggagtttctccatcatcccctgctttgtcttcgtggagtcggtgctgctgggcattgtgatcctgcttgcttaccgcctggagttcacggacaccttccctgtgcacacccagggattcttctgctatgacagtacctacgccaagccctacccagggcctgaggctgccagccgagtgcctcctgctcttgtctacgcactggtcactgccgggcccaccctcacgatcctgctgggagagctggcgcgtgcctttttccctgcaccaccttcagccgtcccagtcatcggggagagcaccatcgtgtctggggcctgctgccgcttcagccccccagtgcggaggctggtccgcttcctgggggtctactccttcggcctcttcaccacgaccatcttcgccaacgcggggcaggtggtgaccggcaatcccacgccacacttcctgtccgtgtgccgccccaactacacggccctgggctgcctgccaccttctccggatcggccaggtcccgaccgctttgtcactgaccagggtgcctgcgctggcagtcccagcctcgtggccgccgcgcgccgcgccttcccctgcaaggatgcggccctctgcgcctacgcggtcacctacacagcgatgtacgtgactctcgtgttccgcgtgaagggctcccgcctggtcaaaccctcgctctgcctggccttgctgtgcccggccttcctggtgggcgtggtccgcgtggccgagtaccgaaaccactggtcggacgtgctggctggcttcctgacaggggcggccatcgccacctttttggtcacctgcgttgtgcataactttcagagccggccaccctctggccgaaggctctctccctgggaggacctgggccaagcccccaccatggatagccccctcgaaaagaacccgaggtctgcaggccgcattcgacaccggcacggctcaccccatccaagtcgcagaactgcgcccgccgtggccacctgatccccagctgtgtctcctccagggccccagccatgtgttcgtcgccccgtgtgccccgtcctcgattgaggtctgagccgacgcccttgcccctgcccctacccctgccagcgcccacccccagccagggcccctcgccttcctcccctggacctggggggccaggcgggggtggtggacgtggccggaagctgctgctgcccacgcccctgctgcgggacctgtacaccctgagtggactctatccctcccccttccaccgggacaacttcagcccttacctgtttgccagccgtgaccacctgctgtgaggcccgaccacccacccagaatctgcccagtccccacttcttccctgccacgcgtgtgtgtgcgtgtgccacgtgagtgccaaagtcccctgccccccaagccagccagacccagacattagaagatggctagaaggacatttaggagacatctgcctctctggccctctgagatatcccgatgggcacaaatggaaggtgcgcacttgcccctactattgcccttttaagggccaaagcttgaccccattggccattgcctggctaatgagaacccctggttctcagaattttaaccaaaaggagttggctccaaccaatgggagccttcccctcacttcttagaatcctcctgcaagagggcaactccagccagtgttcagcgactgaacagccaataggagcccttggtttccagaatttctagagtgggtgggcatgattccagtcaatgggggaccgcccgtgtctaagcatgtgcaaaggagaggagggagatgaggtcattgtttgtcattgagtcttctctcagaatcagcgagcccagctgtagggtggggggcaggctcccccatggcagggtccttggggtaccccttttcctctcagcccctccctgtgtgcggcctctccacctctcacccactctctcctaatcccctacttaagtagggcttgccccacttcagaggttttggggttcagggtgctgtgtctccccttgcctgtgcccaggtcatcccaaacccttctgttatttattagggctgtgggaagggtttttcttctttttcttggaacctgcccctgttcttcacactgccccccatgcctcagcctcatacagatgtgccatcatggggggcatgggtggagcagaggggctccctcaccccgggcaggcaaaggcagtgggtagaggaggcactgcccccctttcctgccccctcctcatctttaataaagacctggcttctcatctttaataaagacctgtttgtaac

SEQ ID NO: 212921 - DNA, 1032 bp, Artificial Sequence
  derived and/or modified sequence
atggccggcggccggccccacctgaagaggagcttcagcatcatcccctgctttgtgtttgtggagagcgtgctgctgggcatcgtcatcctgctggcctaccgcctggagttcacagacaccttccctgtgcacacccagggcttcttctgctatgacagcacctacgccaagccctacccaggccctgaggccgccagccgggtgcccccagccctggtgtatgccctggtgacagctggccccaccctgaccatcctgctgggggagctggcccgggccttcttccctgcccctccttctgctgtgcctgtgattggagagagcaccatcgtgtctggggcctgctgccgcttcagcccccctgtgcggcggctggtgcgcttcctgggcgtgtacagctttggcctcttcaccaccaccatctttgccaatgccggccaggtggtgactggaaaccccaccccccacttcctgtctgtgtgccggcccaactacacagccctgggctgcctgccccccagcccagacaggcctggccctgacagatttgtgacagaccagggcgcctgtgccggcagccccagcctggtggccgccgcccggcgggccttcccctgcaaggatgctgccctgtgtgcctatgctgtgacctacacagccatgtatgtgaccctggtgttccgggtgaagggcagccggctggtgaagcccagcctgtgcctggccctgctgtgcccagccttcctggtgggcgtggtgcgggtggccgagtacagaaaccactggagcgatgtgctggccggcttcctgaccggggccgccatcgccaccttcctggtgacctgtgtggtgcacaacttccagagccggccccccagcggccggcggctgagcccctgggaggacctgggccaggcccccaccatggacagccccctggagaagaaccccaggtctgctggccgcatccgccaccgccacggcagcccccaccccagcagaagaacagccccagctgtggccacctag

SEQ ID NO: 212922 - DNA, 1032 bp, Artificial Sequence
  derived and/or modified sequence
atggccggcggccggccccacctgaagcggagcttcagcatcatcccgtgcttcgtattcgtcgagtcggtcttactcggcatagtgattctgctggcatatcgcctcgagtttactgacacttttcctgtgcatacccaggggtttttttgctatgacagtacctacgccaagccataccccggacctgaagccgcatccagggtgccacccgcgcttgtctacgccctggtgacagcaggtcctacactgacaattctgcttggggagctggcacgggcatttttcccagctcccccctctgctgtccccgtaattggcgagagtactatagtatccggggcctgctgccgttttagcccacccgtgcggagactcgtgagattcctcggggtttacagcttcggcctgttcacaaccacgatattcgccaacgcaggacaggtcgtgactggcaatcctaccccacattttttgtctgtgtgtcggcccaactatacagccctgggctgcctgcccccgagccccgatcgcccagggccggacagattcgtcactgaccagggggcttgcgccggctcacctagcctggtcgctgccgccagacgggcctttccctgtaaagatgccgctttgtgcgcttatgcggtcacatatactgccatgtacgttaccctggtgtttagagtgaaggggagccggctggtgaagccgtccctgtgtctcgccctcctgtgccccgcattcttagtgggggtggtcagagtggcagagtataggaaccactggagcgacgtactggccggattcctcacaggggccgccatcgcgaccttcctggtgacatgtgtagttcataattttcagtcacggccacctagcggacgcagactcagtccttgggaggatttgggccaggccccgaccatggactctccgctggaaaagaacccacggtccgccgggagaattaggcaccgacacgggtcccctcaccccagtaggagaactgctcccgcagtggccacctag

SEQ ID NO: 212923 - DNA, 1032 bp, Artificial Sequence
  derived and/or modified sequence
atggctggcggtcgccctcatcttaagcggtctttctccattatcccctgctttgtgttcgtggaatcagtcctcctgggaattgtgatcctcttggcctatagactcgagtttacagacaccttccccgtgcacacccagggctttttctgttatgattccacttatgctaaaccataccccggacctgaggccgcttcacgcgtgccacccgctctcgtgtacgccctggtcacagcaggaccgacattaaccatcttactgggtgaactggccagggccttttttccggcacccccatctgctgtccccgtcatcggcgagagcactatagtatctggagcctgctgtcggttctcgcccccagtgaggcggttagtccggttcctgggggtctactcctttggtctatttaccaccaccattttcgccaacgcgggtcaggtagttacgggcaaccccactccacacttcttaagcgtttgccgccctaattatacagcgctgggttgtctgccacctagcccagatagacccggaccagaccggtttgtcaccgatcagggagcttgcgctggctctcctagcttagtagctgctgccaggagagccttcccatgcaaggacgcagccttgtgtgcctacgccgtaacttacactgccatgtacgtcactttggtgttcagggtcaagggatcccgtctggttaagccctccttgtgtctggcactgctatgcccagctttcctggtgggcgttgtccgagtagccgagtaccgcaatcactggagtgacgttctcgccggattcctcaccggagctgcaatcgccacattcttggtgacttgcgtggtccacaattttcagtcaaggcctcccagtgggcgacgtcttagcccgtgggaagatctgggccaggcgccaaccatggatagcccactagagaagaatccaagaagcgccggacggattagacaccgacatggttcgccacacccctcgcggcgtaccgcacccgcagtcgccacctag

SEQ ID NO: 212924 - protein, 748 aa, Artificial Sequence
  derived and/or modified sequence
MSNPGGRRNGPVKLRLTVLCAKNLVKKDFFRLPDPFAKVVVDGSGQCHSTDTVKNTLDPKWNQHYDLYIGKSDSVTISVWNHKKIHKKQGAGFLGCVRLLSNAINRLKDTGYQRLDLCKLGPNDNDTVRGQIVVSLQSRDRIGTGGQVVDCSRLFDNDLPDGWEERRTASGRIQYLNHITRTTQWERPTRPASEYSSPGRPLSCFVDENTPISGTNGATCGQSSDPRLAERRVRSQRHRNYMSRTHLHTPPDLPEGYEQRTTQQGQVYFLHTQTGVSTWHDPRVPRDLSNINCEELGPLPPGWEIRNTATGRVYFVDHNNRTTQFTDPRLSANLHLVLNRQNQLKDQQQQQVVSLCPDDTECLTVPRYKRDLVQKLKILRQELSQQQPQAGHCRIEVSREEIFEESYRQVMKMRPKDLWKRLMIKFRGEEGLDYGGVAREWLYLLSHEMLNPYYGLFQYSRDDIYTLQINPDSAVNPEHLSYFHFVGRIMGMAVFHGHYIDGGFTLPFYKQLLGKSITLDDMELVDPDLHNSLVWILENDITGVLDHTFCVEHNAYGEIIQHELKPNGKSIPVNEENKKEYVRLYVNWRFLRGIEAQFLALQKGFNEVIPQHLLKTFDEKELELIICGLGKIDVNDWKVNTRLKHCTPDSNIVKWFWKAVEFFDEERRARLLQFVTGSSRVPLQGFKALQGAAGPRLFTIHQIDACTNNLPKAHTCFNRIDIPPYESYEKLYEKLLTAIEETCGFAVE

SEQ ID NO: 212925 - DNA, 2247 bp, Artificial Sequence
  derived and/or modified sequence
atgagcaaccccggcggcagaagaaacggccccgtgaagctgagactgaccgtgctgtgcgccaagaacctggtgaagaaggacttcttcagactgcccgaccccttcgccaaggtggtggtggacggcagcggccagtgccacagcaccgacaccgtgaagaacaccctggaccccaagtggaaccagcactacgacctgtacatcggcaagagcgacagcgtgaccatcagcgtgtggaaccacaagaagatccacaagaagcagggcgccggcttcctgggctgcgtgagactgctgagcaacgccatcaacagactgaaggacaccggctaccagagactggacctgtgcaagctgggccccaacgacaacgacaccgtgagaggccagatcgtggtgagcctgcagagcagagacagaatcggcaccggcggccaggtggtggactgcagcagactgttcgacaacgacctgcccgacggctgggaggagagaagaaccgccagcggcagaatccagtacctgaaccacatcaccagaaccacccagtgggagagacccaccagacccgccagcgagtacagcagccccggcagacccctgagctgcttcgtggacgagaacacccccatcagcggcaccaacggcgccacctgcggccagagcagcgaccccagactggccgagagaagagtgagaagccagagacacagaaactacatgagcagaacccacctgcacaccccccccgacctgcccgagggctacgagcagagaaccacccagcagggccaggtgtacttcctgcacacccagaccggcgtgagcacctggcacgaccccagagtgcccagagacctgagcaacatcaactgcgaggagctgggccccctgccccccggctgggagatcagaaacaccgccaccggcagagtgtacttcgtggaccacaacaacagaaccacccagttcaccgaccccagactgagcgccaacctgcacctggtgctgaacagacagaaccagctgaaggaccagcagcagcagcaggtggtgagcctgtgccccgacgacaccgagtgcctgaccgtgcccagatacaagagagacctggtgcagaagctgaagatcctgagacaggagctgagccagcagcagccccaggccggccactgcagaatcgaggtgagcagagaggagatcttcgaggagagctacagacaggtgatgaagatgagacccaaggacctgtggaagagactgatgatcaagttcagaggcgaggagggcctggactacggcggcgtggccagagagtggctgtacctgctgagccacgagatgctgaacccctactacggcctgttccagtacagcagagacgacatctacaccctgcagatcaaccccgacagcgccgtgaaccccgagcacctgagctacttccacttcgtgggcagaatcatgggcatggccgtgttccacggccactacatcgacggcggcttcaccctgcccttctacaagcagctgctgggcaagagcatcaccctggacgacatggagctggtggaccccgacctgcacaacagcctggtgtggatcctggagaacgacatcaccggcgtgctggaccacaccttctgcgtggagcacaacgcctacggcgagatcatccagcacgagctgaagcccaacggcaagagcatccccgtgaacgaggagaacaagaaggagtacgtgagactgtacgtgaactggagattcctgagaggcatcgaggcccagttcctggccctgcagaagggcttcaacgaggtgatcccccagcacctgctgaagaccttcgacgagaaggagctggagctgatcatctgcggcctgggcaagatcgacgtgaacgactggaaggtgaacaccagactgaagcactgcacccccgacagcaacatcgtgaagtggttctggaaggccgtggagttcttcgacgaggagagaagagccagactgctgcagttcgtgaccggcagcagcagagtgcccctgcagggcttcaaggccctgcagggcgccgccggccccagactgttcaccatccaccagatcgacgcctgcaccaacaacctgcccaaggcccacacctgcttcaacagaatcgacatccccccctacgagagctacgagaagctgtacgagaagctgctgaccgccatcgaggagacctgcggcttcgccgtggagtag

SEQ ID NO: 212926 - DNA, 2247 bp, Artificial Sequence
  derived and/or modified sequence
atgtcaaaccccgggggaagacgtaacgggcctgtcaagctgaggctgacagtcctgtgcgctaagaatctggttaagaaagatttcttccgcctgccagatcctttcgcaaaggtcgtggtggatggctcagggcagtgccattcaacagacaccgtgaagaataccctcgatccgaaatggaaccagcactacgatttgtacataggcaaatctgactccgtaactatctcagtttggaatcacaagaagattcacaagaagcaaggcgccggatttctgggctgtgttcggctcctgtctaacgccattaaccgcctgaaggacaccgggtatcagcggttggacctgtgtaagctgggtccaaacgataacgatactgtgaggggccaaatcgtcgtaagtttacagtcaagggacaggatcggaactggggggcaagttgtagattgctcacgcttgtttgataatgacctccctgatggatgggaggaaaggagaacagcctcaggccgaatccagtatctcaaccatatcactaggaccacacagtgggagcgccccacacgccccgccagcgaatattcatcccctggacggccactttcctgctttgtcgacgagaatacacccatcagtggaacaaacggcgcgacctgcggtcagtcttctgacccgagactggcagagaggagagtgcggtcgcagcgccaccgtaattacatgtcccgtacacaccttcatacaccgcccgacctgcccgagggctatgaacagaggaccactcaacagggtcaagtctacttcttacacactcaaacaggggtaagcacttggcacgatcctagagtaccacgcgatctcagtaacatcaattgcgaggagcttggtcctctcccgccgggttgggaaatccgaaataccgcaaccggcagagtctactttgttgaccacaataataggactacacagtttaccgacccaaggttgagtgccaacctgcatctggtgttaaatcgccagaatcagctgaaagatcagcagcagcaacaggttgtgagcctgtgtccagatgacacagagtgtctgacggtccccagatacaagcgagacctggttcagaagcttaaaatactgcgccaggagttgtcccagcagcagccacaggctgggcactgtaggatcgaggtgtctcgggaggaaattttcgaggagtcgtatcggcaagtcatgaagatgcgacctaaagacctttggaaaaggttaatgatcaaatttagaggagaggaggggctcgattacggcggcgttgctcgagaatggctttacttactgtctcacgagatgttaaatccctactacggactttttcagtacagccgtgatgatatttacacgctgcaaattaatcccgactccgccgtaaaccctgaacatctctcatatttccactttgtgggtaggatcatgggaatggctgtctttcatggacactacattgacggagggttcaccctccccttttacaaacagctgctgggaaagtctatcaccctcgatgatatggaactggtcgatcccgacctccacaacagtctggtgtggatcctcgagaatgacattacaggcgtcctcgatcacactttttgtgtggaacacaacgcctatggagaaatcattcagcatgagttgaagcctaacggcaagtccattcctgtaaacgaggaaaacaagaaggagtacgtgcgcctctacgtaaattggcgcttccttaggggtatagaggcccaatttctggcactgcaaaaagggtttaacgaggtcatcccacagcacctgctcaaaacattcgacgaaaaggaattagagctgatcatttgtgggctgggcaaaatagacgttaatgactggaaagttaatacgcgcttgaaacactgcacaccagactccaatattgtcaagtggttctggaaggctgtcgaatttttcgatgaggagagacgggcacggcttctccagtttgtcactggctcgtcccgcgtacctctccaagggtttaaagctctccagggcgctgccggaccccggctgttcacaatccaccagatcgacgcgtgcaccaacaatctgcctaaggcccacacctgcttcaaccgtatcgatatcccaccttacgaatcctacgagaaactttacgagaagctgctaaccgcaattgaggagacctgtggattcgccgtggaatag

SEQ ID NO: 212927 - DNA, 2247 bp, Artificial Sequence
  derived and/or modified sequence
atgagcaaccctgggggcagaagaaatggacctgtgaagctgcggctgactgtgctgtgtgccaagaacctggtgaagaaggacttcttccggctgcctgacccctttgccaaggtggtggtggatggcagcggccagtgccacagcacagacacagtgaagaacaccctggaccccaagtggaaccagcactatgacctgtacatcggcaagagtgacagcgtgaccatctctgtgtggaaccacaagaagatccacaagaagcagggcgccggcttcctgggctgtgtgcggctgctgagcaatgccatcaaccggctgaaggacaccggctaccagaggctggacctgtgcaagctgggccccaatgacaatgacacagtgcggggccagatcgtggtgtccctgcagagccgggaccgcatcggcaccggcggccaggtggtggactgcagccggctgtttgacaatgacctgcctgatggctgggaggagaggagaacagccagcggccgcatccagtacctgaaccacatcaccaggaccacccagtgggagcggcccaccaggcctgccagcgagtacagcagccctggccggcccctgagctgctttgtggatgagaacacccccatcagcggcaccaacggggccacctgtggccagagcagtgacccccggctggccgagaggagagtgcgcagccagaggcacaggaactacatgagcaggacccacctgcacaccccaccagacctgcctgagggctatgagcagaggaccacccagcagggccaggtgtacttcctgcacacccagacaggagtgtccacctggcatgacccccgggtgccccgggacctgagcaacatcaactgtgaggagctgggccccctgcccccaggctgggagatccggaacacagccaccggccgggtgtactttgtggaccacaacaacagaaccacccagttcacagacccccggctgagcgccaacctgcacctggtgctgaaccggcagaaccagctgaaggaccagcagcagcagcaggtggtgtccctgtgcccagatgacacagaatgtctgactgtgccccgctacaagagggacctggtgcagaagctgaagatcctgcggcaggagctgagccagcagcagccccaggccggccactgcagaattgaggtgtcccgggaggagatctttgaggagagctaccggcaggtgatgaagatgaggcccaaggacctgtggaagaggctgatgatcaagttccggggggaggagggcctggactatggaggagtggcccgggagtggctgtacctgctgagccatgagatgctgaacccctactacggcctcttccagtacagcagagatgacatctacaccctgcagatcaacccagattctgctgtgaaccctgagcacctgagctacttccactttgtgggccgcatcatgggcatggctgtgttccacggccactacattgatggcggcttcaccctgcccttctacaagcagctgctgggcaagagcatcaccctggatgacatggagctggtggaccctgacctgcacaacagcctggtgtggatcctggagaatgacatcaccggggtgctggaccacaccttctgtgtggagcacaatgcctacggggagatcatccagcacgagctgaagcccaacgggaagagcatccctgtgaatgaggagaacaagaaggagtatgtgcggctgtatgtgaactggaggttcctgcggggcatcgaggcccagttcctggccctgcagaagggcttcaatgaggtgatcccccagcacctgctgaagacctttgatgagaaggagctggagctgatcatctgtggcctgggcaagattgatgtgaatgactggaaggtgaacacccggctgaagcactgcaccccagacagcaacatcgtgaagtggttctggaaggctgtggagttctttgatgaggagcggcgggcccggctgctgcagtttgtgacaggcagcagccgggtgcccctgcagggcttcaaggccctgcagggcgctgctggccccaggctcttcaccatccaccagattgatgcctgcaccaacaacctgcccaaggcccacacctgcttcaacagaattgacatccccccctatgagagctatgagaagctgtatgagaagctgctgacagccatcgaggagacctgtggctttgctgtggagtag

SEQ ID NO: 212928 - DNA, 2247 bp, Artificial Sequence
  derived and/or modified sequence
atgagcaaccccggcggccggcggaacggccccgtgaagctgcggttaaccgtgctatgtgccaagaacctggtcaagaaagattttttcagactgcccgacccttttgctaaggtggtggtcgacggctcgggacaatgccactctaccgatacagttaagaatactctggacccgaagtggaatcaacactatgacctatacattggtaaatctgattccgtcaccatatcagtgtggaaccacaaaaaaatacacaaaaaacagggcgctgggttcttagggtgcgttagactgctgtccaacgctatcaataggctgaaagacaccggctaccagcggcttgacctatgtaaactgggacccaacgacaatgacaccgtgcggggccagatcgttgtttctctacagagcagggaccgcatcggaacagggggtcaagtcgtcgactgcagccgcctcttcgacaatgatcttcctgacggatgggaggagcgcagaacagcttcggggcgaatacagtacctcaatcatattacacgaaccacccagtgggaacgtccgacccgtcccgcttcagaatactcgagcccaggcaggcctctgtcgtgcttcgtggatgagaatacaccgattagtgggacaaatggagccacgtgtggtcaatcatctgacccccgcctagccgaacgaagagtgcgatcccagcgacacagaaactatatgagtcgaacccaccttcatacccccccagatctccctgaaggttatgaacaacgtacaacccagcagggtcaagtttacttcctgcatacacaaaccggcgttagtacatggcacgatccgcgtgtgccaagggacctgtcaaacatcaattgtgaggagctaggccccctgccgccggggtgggaaatacgaaatacagccacaggacgggtgtattttgtggatcataataacaggacaacccaatttaccgacccgcggctgtcagctaacctgcatcttgtcctgaacagacaaaaccagctcaaagatcagcagcaacaacaggtggtctcactctgtcctgatgacacagagtgcctgaccgtgccaaggtacaagcgggacttggtacagaaattgaagattcttcggcaggagctgagtcagcagcagcctcaggccggccattgtcgtattgaagtgtcccgagaggaaattttcgaagagagctaccggcaggtgatgaagatgaggccaaaagacctctggaagagactgatgatcaaatttagaggtgaagaaggccttgattacggcggcgtagcacgggagtggctgtacctgcttagccacgagatgcttaatccctattacggcctgtttcaatacagtcgcgacgacatctacacactgcagataaaccccgacagcgcggtgaacccagaacacttgtcgtactttcattttgtaggtcgaatcatgggcatggcggtcttccacggccattacattgacggcggctttacccttcctttctataagcagctattagggaagtccatcactctcgacgatatggaactggtggaccccgacctgcacaacagcctggtttggattctcgaaaacgatatcaccggcgtcctggaccacacattctgcgtggagcacaacgcctacggtgaaatcattcagcacgaactcaaaccaaacggcaaatccattcctgtgaatgaggaaaataagaaggagtatgtccgcctgtacgttaactggaggttccttagaggtatagaagcgcagtttttagccctacagaagggttttaacgaggtgattcctcaacacctgttgaagacatttgatgagaaagaattggagcttatcatctgtggactgggtaagattgacgtcaatgactggaaggtgaatacaagattaaaacattgcactccagattccaacatcgtgaaatggttttggaaggcagtggaattttttgatgaggagcgaagggctcgactcctgcaatttgtcaccggaagtagccgcgtgccactgcagggcttcaaggccctgcagggggccgccgggccaaggttgttcactatccaccagattgacgcttgtacaaacaacctccccaaggctcatacatgcttcaaccggatcgatattcccccatacgagtcttatgaaaaactttatgaaaaactacttactgccattgaggaaacctgtggatttgcagtcgagtag

SEQ ID NO: 212929 - DNA, 2247 bp, Artificial Sequence
  derived and/or modified sequence
atgtcaaacccagggggtcgaaggaacggaccggtgaaattaagacttactgtactatgtgcaaagaatctggtcaagaaggacttcttcagactgccagatccgttcgctaaggtcgtcgttgatgggagtggccaatgccattcgacagacactgtcaaaaacacactcgacccaaaatggaatcagcactatgacttgtatatcgggaaatccgactctgtgacgattagcgtgtggaaccataagaaaatccataaaaagcagggcgctgggttcctgggctgcgtacgtctgctgagcaacgcaattaatcgtctcaaggatacgggctatcagcggttggatctatgtaaattgggcccaaacgataatgacacagtacggggtcagatcgtcgtgagtttgcagtctagagacaggattggcaccggtgggcaggtcgtggattgttctagactcttcgataatgatctcccggatggttgggaggaaagacggacagccagtggccgtattcagtacctgaatcatattactcgaactacccagtgggaaaggcccacacgcccagcctctgagtattcctctccgggacgacctttgagctgtttcgtggacgagaacacccctataagtggcaccaacggagctacctgcgggcaaagctccgaccctcgtctggcggaacgaagagtgcgatcccagagacatagaaactacatgtctcggacccacttacacaccccccctgatttacccgagggctatgagcagcggaccacccaacagggccaggtgtattttctgcacactcagacaggggtgagtacgtggcacgacccacgcgttccgcgagatctgtccaacatcaactgtgaagaactggggccactgccaccaggttgggagattcgaaacacggctacaggcagagtatatttcgtggaccacaacaacaggaccacacagttcaccgaccctaggctctctgctaatcttcacttggtcttaaacagacagaaccagctcaaggaccaacagcagcagcaggtggttagcttgtgtcccgatgacaccgagtgcctgacagtccctaggtacaaacgggaccttgtccagaagctcaaaattttgagacaggagctttctcagcagcagccccaggctggccattgtagaatcgaggtgagtagagaggagatctttgaggagtcttatagacaggttatgaagatgcgaccaaaggatctgtggaaaaggctgatgatcaaattccggggagaggaaggactggactatggaggggttgcacgcgagtggctctatctgctaagccacgagatgctgaatccctactacggactgttccagtatagcagagacgacatttacaccctccagattaatcctgactcagctgtgaacccagagcatctgagctatttccacttcgtcgggcgaattatgggtatggcagtatttcacggacattatatcgacggcggtttcacactgccgttttataagcagctgcttggtaagagcatcacgttggacgacatggaactggttgatcctgacctgcacaattcccttgtatggatccttgagaacgacatcacaggcgtgctggaccacaccttctgcgtggagcataatgcttatggtgaaatcatccagcatgaactaaagcccaatgggaaaagtattcctgttaacgaggaaaataagaaggaatacgtgagactctatgtcaactggaggtttttgcgtggaatagaagctcagttcctggccctgcaaaagggatttaatgaagtgataccccagcacctgctgaagacctttgacgagaaagagctggaactgatcatatgcggtctggggaagattgacgtgaacgattggaaggttaatactaggctgaagcactgcacccccgattccaatatagtaaagtggttttggaaggcggtggagttctttgacgaagaaaggcgggctagactactgcaattcgtcaccggatcctccagagtgccgctacagggatttaaggcgttacagggagctgccggaccccgtctatttaccatacatcagatcgacgcctgcaccaataatctgcctaaagcccacacttgtttcaatcgcatagacataccaccttacgagagctatgagaaattgtacgaaaaattgctgacagccatagaggaaacatgcggcttcgcagtggaatag

SEQ ID NO: 212930 - DNA, 3866 bp, Artificial Sequence
  derived and/or modified sequence
gagttctgctccggcgcccccgagcaccgcccgcttcagccgaccagccccgtcggctactgggcctcgccgagacgagaggagggaaaggcctcggcggccgcgaggaggcggcgggggcgcgggcggaggcggcgcgggcggccgcggctgccgctttgttgtgcggcccgggccgaggaaggagaagtgggaggaggggggagctcggcgtcccgctccctccgcggctcatggcgacgactctcggcacatccgggaccctccggccgtggcggccgaggcgccggctgctcgggccccagccccggccgctgtggtgactccgccgcgcctcgccgtcgcccccgtgccgcccgccgcccccgccgcccccgccgccggggacatgtctaaccccggaggccggaggaacgggcccgtcaagctgcgcctgacagtactctgtgcaaaaaacctggtgaaaaaggattttttccgacttcctgatccatttgctaaggtggtggttgatggatctgggcaatgccattctacagatactgtgaagaatacgcttgatccaaagtggaatcagcattatgacctgtatattggaaagtctgattcagttacgatcagtgtatggaatcacaagaagatccataagaaacaaggtgctggatttctcggttgtgttcgtcttctttccaatgccatcaaccgcctcaaagacactggttatcagaggttggatttatgcaaactcgggccaaatgacaatgatacagttagaggacagatagtagtaagtcttcagtccagagaccgaataggcacaggaggacaagttgtggactgcagtcgtttatttgataacgatttaccagacggctgggaagaaaggagaaccgcctctggaagaatccagtatctaaaccatataacaagaactacgcaatgggagcgcccaacacgaccggcatccgaatattctagccctggcagacctcttagctgctttgttgatgagaacactccaattagtggaacaaatggtgcaacatgtggacagtcttcagatcccaggctggcagagaggagagtcaggtcacaacgacatagaaattacatgagcagaacacatttacatactcctccagacctaccagaaggctatgaacagaggacaacgcaacaaggccaggtgtatttcttacatacacagactggtgtgagcacatggcatgatccaagagtgcccagggatcttagcaacatcaattgtgaagagcttggtccattgcctcctggatgggagatccgtaatacggcaacaggcagagtttatttcgttgaccataacaacagaacaacacaatttacagatcctcggctgtctgctaacttgcatttagttttaaatcggcagaaccaattgaaagaccaacagcaacagcaagtggtatcgttatgtcctgatgacacagaatgcctgacagtcccaaggtacaagcgagacctggttcagaaactaaaaattttgcggcaagaactttcccaacaacagcctcaggcaggtcattgccgcattgaggtttccagggaagagatttttgaggaatcatatcgacaggtcatgaaaatgagaccaaaagatctctggaagcgattaatgataaaatttcgtggagaagaaggccttgactatggaggcgttgccagggaatggttgtatctcttgtcacatgaaatgttgaatccatactatggcctcttccagtattcaagagatgatatttatacattgcagatcaatcctgattctgcagttaatccggaacatttatcctatttccactttgttggacgaataatgggaatggctgtgtttcatggacattatattgatggtggtttcacattgcctttttataagcaattgcttgggaagtcaattaccttggatgacatggagttagtagatccggatcttcacaacagtttagtgtggatacttgagaatgatattacaggtgttttggaccataccttctgtgttgaacataatgcatatggtgaaattattcagcatgaacttaaaccaaatggcaaaagtatccctgttaatgaagaaaataaaaaagaatatgtcaggctctatgtgaactggagatttttacgaggcattgaggctcaattcttggctctgcagaaaggatttaatgaagtaattccacaacatctgctgaagacatttgatgagaaggagttagagctcattatttgtggacttggaaagatagatgttaatgactggaaggtaaacacccggttaaaacactgtacaccagacagcaacattgtcaaatggttctggaaagctgtggagttttttgatgaagagcgacgagcaagattgcttcagtttgtgacaggatcctctcgagtgcctctgcagggcttcaaagcattgcaaggtgctgcaggcccgagactctttaccatacaccagattgatgcctgcactaacaacctgccgaaagcccacacttgcttcaatcgaatagacattccaccctatgaaagctatgaaaagctatatgaaaagctgctaacagccattgaagaaacatgtggatttgctgtggaatgacaagcttcaaggatttacccaggactctatttatacaaccctgactgacagcctcctttcagcagagtttcaaagaatatgctgaaatacaggaaaacactccccccccccccctttttttttttttttttacattttaggacactgtgaggggaaaggacaattttgaaattccttttcaaggaaaaaaaaggtctttatgctttgccatgaggccacattcagctgctatttaaacttaatatcttgaacctaaagaatgctgacttttcctacatttccagagttaggcagtattctacacttaaagactactactatttttataaaaggtaatctattcaaatttcttcacagatttcaagtctctcaaacatcaagacaacttcagcagtcggtacaagtcacatttcattttgattgaatacatgatcttgaacagctcctgtacttgctctttgtaaaaaaaaataaaattattttgaattattctacctttgtaaacaattggctaaaagaatcatctttaagaaattaagccatttacatgtttgtgtttttctatagcagagcattatattttgcattatatgtttcaacctagtctaagtgggtcttttttacatttttcaagaacggatttcctggaatacagcgatataattttggttgtcaaattcctaatgcaaccatttagtctaaacttagtcatttatttgtgacaataagatgtgttcaggggctccctgtttttaagagactcttttaaaaaaaaaaaaacctaatgtttttatcttgagtcaatatgattaggtattttggatttacttttaatcttaaaatactgcatttttatagcttctcagagcatgtggatgggatgggattttcgttattttgctgggtcagcttatctttaatatatggactattcctataaaccaaagtctctgacaagtgcacctaatttatattgtattttaactacagtgtaagtttccattaacaaaaccatcctaaagcgttaactgctcataattttaatcagctacagttatgaaaaaggaagaattttgctctaaagattattaataagcttagaaaatcctgcttttacctaacagaatgaagtggggttgaggggcggtagtatgaacagtgattctaactctatggcgtaaattactttgaagagttcattttggaagtaagggaatcccgcttcccttgg

SEQ ID NO: 212931 - protein, 918 aa, Artificial Sequence
  derived and/or modified sequence
LQPVYESMASHVQVFSPHTLQSSAFCSVKKLKIEPSSNWDMTGYGSHSKVYSQSKNIPLSQPATTTVSTSLPVPNPSLPYEQTIVFPGSTGHIVVTSASSTSVTGQVLGGPHNLMRRSTVSLLDTYQKCGLKRKSEEIENTSSVQIIEEHPPMIQNNASGATVATATTSTATSKNSGSNSEGDYQLVQHEVLCSMTNTYEVLEFLGRGTFGQVVKCWKRGTNEIVAIKILKNHPSYARQGQIEVSILARLSTESADDYNFVRAYECFQHKNHTCLVFEMLEQNLYDFLKQNKFSPLPLKYIRPVLQQVATALMKLKSLGLIHADLKPENIMLVDPSRQPYRVKVIDFGSASHVSKAVCSTYLQSRYYRAPEIILGLPFCEAIDMWSLGCVIAELFLGWPLYPGASEYDQIRYISQTQGLPAEYLLSAGTKTTRFFNRDTDSPYPLWRLKTPDDHEAETGIKSKEARKYIFNCLDDMAQVNMTTDLEGSDMLVEKADRREFIDLLKKMLTIDADKRITPIETLNHPFVTMTHLLDFPHSTHVKSCFQNMEICKRRVNMYDTVNQSKTPFITHVAPSTSTNLTMTFNNQLTTVHNQAPSSTSATISLANPEVSILNYPSTLYQPSAASMAAVAQRSMPLQTGTAQICARPDPFQQALIVCPPGFQGLQASPSKHAGYSVRMENAVPIVTQAPGAQPLQIQPGLLAQQAWPSGTQQILLPPAWQQLTGVATHTSVQHATVIPETMAGTQQLADWRNTHAHGSHYNPIMQQPALLTGHVTLPAAQPLNVGVAHVMRQQPTSTTSSRKSKQHQSSQRKNVISCVTVHDSPYSDSSSNTSPYSVQQRAGHNNANAFDTKGSLENHCTGNPRTIIVPPLKTQASEVLVECDSLVPGNLGPGQGRNLSLESGFPAFLLLEMLLYGS

SEQ ID NO: 212932 - protein, 1198 aa, Artificial Sequence
  derived and/or modified sequence
MAPVYEGMASHVQVFSPHTLQSSAFCSVKKLKIEPSSNWDMTGYGSHSKVYSQSKNIPLSQPATTTVSTSLPVPNPSLPYEQTIVFPGSTGHIVVTSASSTSVTGQVLGGPHNLMRRSTVSLLDTYQKCGLKRKSEEIENTSSVQIIEEHPPMIQNNASGATVATATTSTATSKNSGSNSEGDYQLVQHEVLCSMTNTYEVLEFLGRGTFGQVVKCWKRGTNEIVAIKILKNHPSYARQGQIEVSILARLSTESADDYNFVRAYECFQHKNHTCLVFEMLEQNLYDFLKQNKFSPLPLKYIRPVLQQVATALMKLKSLGLIHADLKPENIMLVDPSRQPYRVKVIDFGSASHVSKAVCSTYLQSRYYRAPEIILGLPFCEAIDMWSLGCVIAELFLGWPLYPGASEYDQIRYISQTQGLPAEYLLSAGTKTTRFFNRDTDSPYPLWRLKTPDDHEAETGIKSKEARKYIFNCLDDMAQVNMTTDLEGSDMLVEKADRREFIDLLKKMLTIDADKRITPIETLNHPFVTMTHLLDFPHSTHVKSCFQNMEICKRRVNMYDTVNQSKTPFITHVAPSTSTNLTMTFNNQLTTVHNQAPSSTSATISLANPEVSILNYPSTLYQPSAASMAAVAQRSMPLQTGTAQICARPDPFQQALIVCPPGFQGLQASPSKHAGYSVRMENAVPIVTQAPGAQPLQIQPGLLAQQAWPSGTQQILLPPAWQQLTGVATHTSVQHATVIPETMAGTQQLADWRNTHAHGSHYNPIMQQPALLTGHVTLPAAQPLNVGVAHVMRQQPTSTTSSRKSKQHQSSVRNVSTCEVSSSQAISSPQRSKRVKENTPPRCAMVHSSPACSTSVTCGWGDVASSTTRERQRQTIVIPDTPSPTVSVITISSDTDEEEEQKHAPTSTVSKQRKNVISCVTVHDSPYSDSSSNTSPYSVQQRAGHNNANAFDTKGSLENHCTGNPRTIIVPPLKTQASEVLVECDSLVPVNTSHHSSSYKSKSSSNVTSTSGHSSGSSSGAITYRQQRPGPHFQQQQPLNLSQAQQHITTDRTGSHRRQQAYITPTMAQAPYSFPHNSPSHGTVHPHLAAAAAAAHLPTQPHLYTYTAPAALGSTGTVAHLVASQGSARHTVQHTAYPASIVHQVPVSMGPRVLPSPTIHPSQYPAQFAHQTYISASPASTVYTGYPLSPAKVNQYPYI

SEQ ID NO: 212933 - DNA, 2757 bp, Artificial Sequence
  derived and/or modified sequence
cttcagcccgtgtatgaatctatggcctcccacgtgcaggtattctctccccataccctgcagtctagtgctttctgttccgtaaaaaagctgaaaatcgaaccctcctccaattgggacatgactgggtatggcagccatagcaaggtgtattcccaaagcaaaaatattccactgtctcagccagccactacaactgttagtacctccctgcctgtgccaaacccttcgttgccctacgaacagaccatcgtcttccctggctcaacagggcatatcgtggttacatccgccagctctacctccgtgacgggacaagtgcttggagggccacataacctgatgcggcgctctacagtgtccctcttagacacctaccaaaaatgcggcctcaaacgcaaatcggaggagatcgaaaacacatcgtctgtacagatcatcgaggaacaccctccaatgattcagaataacgccagcggcgccaccgtggccaccgccacgactagcaccgcaacatcaaaaaactccgggtctaacagcgaaggggattatcagctggtccagcacgaagtgctatgcagcatgacgaatacctatgaggtgctcgagttcctggggcggggtacatttggacaggtggtgaaatgttggaagcgagggacaaatgaaattgtggcaataaaaattcttaagaaccacccaagctatgcccgacagggccagatcgaagtgtcaattttggcccgcttgagtaccgaatctgctgacgactataactttgtcagggcctacgaatgcttccagcacaagaatcacacttgtctggtctttgagatgcttgagcagaacttgtacgacttcttgaagcagaacaagttcagccctctgcccttaaagtacatcaggcccgttttgcagcaggttgcaactgctttgatgaagctgaaaagcctggggctcattcatgctgacctgaaacccgaaaatatcatgttagtcgacccctcccgtcagccttacagggtgaaggtgattgatttcggatccgccagccatgtttctaaggctgtgtgcagcacatatctgcagagcagatactaccgcgctccggagataatcctgggcctgccattctgtgaggcaattgatatgtggtcactgggctgcgtcatagccgagctctttctcggctggcccctgtatcctggggcctcagagtacgatcaaattcgctatatctcgcagacacaaggcctgccagcagaatacttacttagcgcaggaaccaagacgacccggttctttaaccgagataccgacagcccttaccctctgtggaggctcaagactccggacgaccacgaggctgaaactggaatcaagagtaaggaggctaggaaatatatctttaactgtctggacgatatggcccaagtgaacatgactaccgatctggagggttctgacatgttggtggaaaaagctgacaggcgggagtttattgacctactgaaaaagatgctgaccatcgacgccgataagaggatcactccaattgaaacattgaatcatccctttgtgaccatgacccacctcctagacttcccccacagcacgcacgtaaaatcttgcttccagaacatggaaatctgtaagcggagagttaacatgtatgacaccgtgaatcagtcaaagacaccctttataacgcatgtggcaccgagcaccagtacaaacctgactatgaccttcaacaaccaactgactacagtgcacaatcaggcaccaagctcaacctccgctactatttccctggccaacccagaggtgtccattctgaactacccaagcacactgtaccaacccagcgccgcttctatggctgccgtggcccagagatcaatgcctctgcagacgggcactgcccagatatgcgccaggccggatccatttcagcaggcgctgatcgtgtgtccacctggattccagggccttcaggcctctccctctaagcacgccggatatagcgtgaggatggaaaatgccgtgcccattgtcactcaggcaccaggcgcacaaccattgcagatacaacctggcctcctggctcagcaagcatggccttctggaacgcagcagatcctcctgccccctgcttggcaacagctgacgggcgtcgccactcacacaagtgtgcaacacgccaccgtgatccccgagactatggccgggacccagcagttagcagattggcgaaacacacatgcgcacggttcccattacaatcctatcatgcagcagcctgctttactgacaggccatgtgacgctgccagccgctcagcccttgaatgtgggggtggctcacgtaatgagacagcaacctacctccactactagctctaggaaatcaaaacagcaccagtcaagccagaggaagaacgtgatctcctgcgtgaccgtgcacgactcaccttacagcgattcctcttcgaatacaagcccttatagcgtgcagcagagggccggccataataacgccaatgctttcgataccaaaggaagcctggaaaaccactgtaccggcaaccctaggactatcatcgtgcctcctctgaagacacaggcttcggaggtgctggtagaatgcgattctttggttcccggcaacctgggacctggccagggccgcaatctcagcctcgagagcgggttccccgcattcctgctgctggaaatgctcctttacggatcctag

SEQ ID NO: 212934 - DNA, 3597 bp, Artificial Sequence
  derived and/or modified sequence
atggctcccgtttacgagggcatggctagtcacgttcaggtatttagcccacataccctgcagtctagcgctttctgctctgttaaaaagctgaaaatcgagccctcctccaactgggacatgaccggctacgggtcccacagcaaggtctattctcagagcaaaaacattcccttgagccaaccggctacaactaccgtctcaacatctctgccagtccccaatcctagccttccctacgagcagaccatcgtgtttccagggagtacagggcatattgtcgtcacttccgccagcagcaccagcgttacaggtcaggtactgggcggccctcacaacctgatgaggcggtccacagttagcttgctggatacctatcagaaatgcggactgaagcgtaagagcgaggagatcgaaaatacctctagcgtccagatcattgaggaacatccaccaatgatccagaataatgccagcggagcgaccgtcgctactgctaccacgtccaccgccacctcaaagaacagtggtagcaatagcgaaggcgactatcagcttgtccaacatgaagtgctatgttccatgacaaacacatatgaggtgcttgagttcctggggaggggcacttttggccaagtcgtcaagtgttggaaaagaggaaccaacgaaattgtggccataaagattctcaagaaccatcccagctacgcccggcagggccagatcgaggtatccatattggcacgcctgtcaaccgagtccgctgacgattacaattttgtccgggcttacgaatgctttcaacataagaatcatacttgtttagtgttcgagatgttagagcagaacctgtacgattttctcaagcagaacaagtttagccccctgccacttaaatacattcggcccgttctgcagcaagtagctaccgccttgatgaagttaaagtcacttggccttatccacgctgacctgaagccagagaatataatgcttgtggaccctagtaggcagccatacagggtcaaggtcattgacttcggatctgcttcacacgtgagtaaggctgtatgctcaacttatctgcagagtaggtactatagagcaccggaaatcatcctaggcctcccattttgcgaggcaattgacatgtggtccctgggttgcgtgatcgccgagttgtttctgggttggcccttgtaccccggcgctagtgaatacgaccagataaggtacatttcgcagacacagggacttccagcagaataccttttgagcgctgggactaaaaccaccagattcttcaatagagatacagactccccgtacccactgtggcgcttgaagacacctgatgatcatgaggctgaaactgggatcaagtcaaaagaagcacgtaaatacatatttaattgtctggacgatatggcccaggtaaatatgactactgatcttgagggtagtgacatgctggtggaaaaagccgacagacgggaatttatagatctattgaagaagatgctgactattgacgccgacaagaggataacccccattgaaactctcaaccacccgtttgtgaccatgactcacttactcgacttcccccattccacacacgtcaaatcttgtttccagaacatggagatttgtaagcgccgcgtgaatatgtacgacactgttaaccagtcaaaaactcctttcattacccatgtggctcctagtacctcaaccaacttgaccatgactttcaacaaccaactgaccaccgtgcacaatcaggctccttcaagcacgagcgccaccattagtcttgccaacccagaggtctcgatactgaactacccctctaccctatatcagccttccgctgcctcgatggctgctgtcgcccagcgctccatgccactgcagactggcacagctcagatttgcgcccgccccgatccttttcagcaggctctgattgtctgtcctcctggttttcagggactccaggcgtcaccatcaaagcacgcagggtattctgtcaggatggagaacgctgtgccgattgtgacccaggcacccggggcgcagccattgcaaatccagccaggcctgctcgctcagcaggcttggccctctggcacccagcaaatccttctgccccccgcatggcagcaacttacgggggtggccacccacactagtgtccagcacgctactgtcatcccagagactatggctggcacccagcagctggctgactggcgaaacactcacgcacatggcagccactacaatccaattatgcagcagcctgcacttctgaccggccacgtcactctgccagccgcccagccattgaatgtgggcgtggcccacgtcatgcgtcagcagccaacttctactacctcttctcgtaagagcaagcagcatcagtcatcagtgcgcaatgtctctacttgtgaagtgtctagctctcaggcgattagttcacctcagcggtcaaagcgcgtgaaggagaataccccacctcggtgtgccatggtacactcctcaccagcttgcagcacatctgtcacatgtggatggggggacgtcgcgtcctcgactacacgagaacggcagcgccagaccatcgtcatccctgacactccaagcccaacggtgagtgtgataactataagttctgataccgatgaggaagaagaacagaaacacgccccgacttcaactgtcagcaagcagcgcaaaaacgttatctcctgcgttactgtgcacgatagtccttactccgattccagttcgaatacgagtccttactccgtccagcagcgcgcagggcacaataatgcaaacgcatttgacactaaaggctcactggaaaatcactgtaccggcaatcctcggactatcatagtccccccactcaaaacccaagcttccgaggtcctggttgaatgcgatagcctggtcccggtaaatacttcacaccactcttcctcgtataagagcaagtccagttctaacgttacaagtaccagcggccacagttcaggctcctcctccggcgcaattacatatagacaacagcgccccgggcctcactttcagcagcagcagccgctgaacctttcccaggcccagcagcatatcaccacagataggactgggtcgcaccgacgtcagcaggcatatatcacacctactatggctcaggcaccttatagctttccacataatagcccatcccacgggacagtgcatccacacttggctgctgcagccgctgccgcacacctgccgacccagcctcacttgtacacctacactgcccctgcggcactgggctctacaggcactgtggcgcacttagtagctagtcaggggagtgcccggcacacagttcaacacacagcctaccctgcctctattgtccaccaggtgcccgtaagtatgggtcctagggtactgccctctcccacgatccatcctagccagtaccctgcgcagttcgctcaccaaacttatatttcagcttcacccgcatccacagtgtatactggataccctctctctcctgcgaaggtgaaccagtacccatatatttag

SEQ ID NO: 212935 - DNA, 2757 bp, Artificial Sequence
  derived and/or modified sequence
cttcagcctgtttatgagagtatggcctcacatgtgcaagttttctcccctcacacccttcaatcaagtgccttctgtagtgtgaagaaactgaaaatagagccgagttccaactgggacatgactgggtacggctcccacagcaaagtgtatagccagagcaagaacatccccctgtcgcagccagccaccacaaccgtcagcacctccttgccggtcccaaacccaagcctaccttacgagcagaccatcgtcttcccaggaagcaccgggcacatcgtggtcacctcagcaagcagcacttctgtcaccgggcaagtcctcggcggaccacacaacctaatgcgtcgaagcactgtgagcctccttgatacctaccaaaaatgtggactcaagcgtaagagcgaggagatcgagaacacaagcagcgtgcagatcatcgaggagcatccacccatgattcagaataatgcaagcggggccactgtcgccactgccaccacgtctactgccacctccaaaaacagcggctccaacagcgagggcgactatcagctggtgcagcatgaggtgctgtgctccatgaccaacacctacgaggtcttagagttcttgggccgagggacgtttgggcaagtggtcaagtgctggaaacggggcaccaatgagatcgtagccatcaagatcctgaagaaccacccatcctatgcccgacaaggtcagattgaagtgagcatcctggcccggttgagcacggagagtgccgatgactataacttcgtccgggcctacgaatgcttccagcacaagaaccacacgtgcttggtcttcgagatgttggagcagaacctctatgactttctgaagcaaaacaagtttagccccttgcccctcaaatacattcgcccagttctccagcaggtagccacagccctgatgaaactcaaaagcctaggtcttatccacgctgacctcaaaccagaaaacatcatgctggtggatccatctagacaaccatacagagtcaaggtcatcgactttggttcagccagccacgtctccaaggctgtgtgctccacctacttgcagtccagatattacagggcccctgagatcatccttggtttaccattttgtgaggcaattgacatgtggtccctgggctgtgttattgcagaattgttcctgggttggccgttatatccaggagcttcggagtatgatcagattcggtatatttcacaaacacagggtttgcctgctgaatatttattaagcgccgggacaaagacaactaggtttttcaaccgtgacacggactcaccatatcctttgtggagactgaagacaccagatgaccatgaagcagagacagggattaagtcaaaagaagcaagaaagtacattttcaactgtttagatgatatggcccaggtgaacatgacgacagatttggaagggagcgacatgttggtagaaaaggctgaccggcgggagttcattgacctgttgaagaagatgctgaccattgatgctgacaagagaatcactccaatcgaaaccctgaaccatccctttgtcaccatgacacacttactcgattttccccacagcacacacgtcaaatcatgtttccagaacatggagatctgcaagcgtcgggtgaatatgtatgacacggtgaaccagagcaaaacccctttcatcacgcacgtggcccccagcacgtccaccaacctgaccatgacctttaacaaccagctgaccactgtccacaaccaggctccctcctctaccagtgccactatttccttagccaatcccgaagtctccatactaaactacccatctacactctaccagccctcagcggcatccatggctgcagtggcccagcggagcatgcccctgcagacaggaacagcccagatttgtgcccggcctgacccgttccagcaagctctcatcgtgtgtccccccggcttccaaggcttgcaggcctctccctctaagcacgctggctactcggtgcgaatggaaaatgcagttcccatcgtcactcaagccccaggagctcagcctcttcagatccaaccaggtctgcttgcccagcaggcttggccaagtgggacccagcagatcctgcttcccccagcatggcagcaactgactggagtggccacccacacatcagtgcagcatgccaccgtgattcccgagaccatggcaggcacccagcagctggcggactggagaaatacgcatgctcacggaagccattataatcccatcatgcagcagcctgcactattgaccggtcatgtgacccttccagcagcacagcccttaaatgtgggtgtggcccacgtgatgcggcagcagccaaccagcaccacctcctcccggaagagtaagcagcaccagtcatctcaaagaaaaaacgtcatcagctgtgtcacagtccacgactccccctactccgactcctccagcaacaccagcccctactccgtgcagcagcgtgctgggcacaacaatgccaatgcctttgacaccaaggggagcctggagaatcactgcacggggaacccccgaaccatcatcgtgccacccctgaaaacccaggccagcgaagtattggtggagtgtgatagcctggtgccaggtaatttggggccaggacagggcaggaacctctccctggagagtggttttcctgcttttctgctgctagaaatgttgctgtatgggagctag

SEQ ID NO: 212936 - DNA, 15049 bp, Artificial Sequence
  derived and/or modified sequence
ctcaagatggcagattccgactgaggctgggggggccgagctcgcgcgccgctttcccgtccccgttgccatgaaccgcggacaccccggccccgatggcccccgtgtacgaaggtatggcctcacatgtgcaagttttctcccctcacacccttcaatcaagtgccttctgtagtgtgaagaaactgaaaatagagccgagttccaactgggacatgactgggtacggctcccacagcaaagtgtatagccagagcaagaacatccccctgtcgcagccagccaccacaaccgtcagcacctccttgccggtcccaaacccaagcctaccttacgagcagaccatcgtcttcccaggaagcaccgggcacatcgtggtcacctcagcaagcagcacttctgtcaccgggcaagtcctcggcggaccacacaacctaatgcgtcgaagcactgtgagcctccttgatacctaccaaaaatgtggactcaagcgtaagagcgaggagatcgagaacacaagcagcgtgcagatcatcgaggagcatccacccatgattcagaataatgcaagcggggccactgtcgccactgccaccacgtctactgccacctccaaaaacagcggctccaacagcgagggcgactatcagctggtgcagcatgaggtgctgtgctccatgaccaacacctacgaggtcttagagttcttgggccgagggacgtttgggcaagtggtcaagtgctggaaacggggcaccaatgagatcgtagccatcaagatcctgaagaaccacccatcctatgcccgacaaggtcagattgaagtgagcatcctggcccggttgagcacggagagtgccgatgactataacttcgtccgggcctacgaatgcttccagcacaagaaccacacgtgcttggtcttcgagatgttggagcagaacctctatgactttctgaagcaaaacaagtttagccccttgcccctcaaatacattcgcccagttctccagcaggtagccacagccctgatgaaactcaaaagcctaggtcttatccacgctgacctcaaaccagaaaacatcatgctggtggatccatctagacaaccatacagagtcaaggtcatcgactttggttcagccagccacgtctccaaggctgtgtgctccacctacttgcagtccagatattacagggcccctgagatcatccttggtttaccattttgtgaggcaattgacatgtggtccctgggctgtgttattgcagaattgttcctgggttggccgttatatccaggagcttcggagtatgatcagattcggtatatttcacaaacacagggtttgcctgctgaatatttattaagcgccgggacaaagacaactaggtttttcaaccgtgacacggactcaccatatcctttgtggagactgaagacaccagatgaccatgaagcagagacagggattaagtcaaaagaagcaagaaagtacattttcaactgtttagatgatatggcccaggtgaacatgacgacagatttggaagggagcgacatgttggtagaaaaggctgaccggcgggagttcattgacctgttgaagaagatgctgaccattgatgctgacaagagaatcactccaatcgaaaccctgaaccatccctttgtcaccatgacacacttactcgattttccccacagcacacacgtcaaatcatgtttccagaacatggagatctgcaagcgtcgggtgaatatgtatgacacggtgaaccagagcaaaacccctttcatcacgcacgtggcccccagcacgtccaccaacctgaccatgacctttaacaaccagctgaccactgtccacaaccaggctccctcctctaccagtgccactatttccttagccaatcccgaagtctccatactaaactacccatctacactctaccagccctcagcggcatccatggctgcagtggcccagcggagcatgcccctgcagacaggaacagcccagatttgtgcccggcctgacccgttccagcaagctctcatcgtgtgtccccccggcttccaaggcttgcaggcctctccctctaagcacgctggctactcggtgcgaatggaaaatgcagttcccatcgtcactcaagccccaggagctcagcctcttcagatccaaccaggtctgcttgcccagcaggcttggccaagtgggacccagcagatcctgcttcccccagcatggcagcaactgactggagtggccacccacacatcagtgcagcatgccaccgtgattcccgagaccatggcaggcacccagcagctggcggactggagaaatacgcatgctcacggaagccattataatcccatcatgcagcagcctgcactattgaccggtcatgtgacccttccagcagcacagcccttaaatgtgggtgtggcccacgtgatgcggcagcagccaaccagcaccacctcctcccggaagagtaagcagcaccagtcatctgtgagaaatgtctccacctgtgaggtgtcctcctctcaggccatcagctccccacagcgatccaagcgtgtcaaggagaacacacctccccgctgtgccatggtgcacagtagcccggcctgcagcacctcggtcacctgtgggtggggcgacgtggcctccagcaccacccgggaacggcagcggcagacaattgtcattcccgacactcccagccccacggtcagcgtcatcaccatcagcagtgacacggacgaggaggaggaacagaaacacgcccccaccagcactgtctccaagcaaagaaaaaacgtcatcagctgtgtcacagtccacgactccccctactccgactcctccagcaacaccagcccctactccgtgcagcagcgtgctgggcacaacaatgccaatgcctttgacaccaaggggagcctggagaatcactgcacggggaacccccgaaccatcatcgtgccacccctgaaaacccaggccagcgaagtattggtggagtgtgatagcctggtgccagtcaacaccagtcaccactcgtcctcctacaagtccaagtcctccagcaacgtgacctccaccagcggtcactcttcagggagctcatctggagccatcacctaccggcagcagcggccgggcccccacttccagcagcagcagccactcaatctcagccaggctcagcagcacatcaccacggaccgcactgggagccaccgaaggcagcaggcctacatcactcccaccatggcccaggctccgtactccttcccgcacaacagccccagccacggcactgtgcacccgcatctggctgcagccgctgccgctgcccacctccccacccagccccacctctacacctacactgcgccggcggccctgggctccaccggcaccgtggcccacctggtggcctcgcaaggctctgcgcgccacaccgtgcagcacactgcctacccagccagcatcgtccaccaggtccccgtgagcatgggcccccgggtcctgccctcgcccaccatccacccgagtcagtatccagcccaatttgcccaccagacctacatcagcgcctcgccagcctccaccgtctacactggatacccactgagccccgccaaggtcaaccagtacccttacatataaacactggaggggagggagggagggagggagggagagaatggcccgagggaggagggagagaaggagggaggcgctcctgggaccgtgggcgctggccttttatactgaagatgccgcacacaaacaatgcaaacggggcaggggcgggggggggggggggggcagagggcagggggacgggtcgggacaccagtgaaacttgaaccgggaagtgggaggacgtagagcagagaagagaacatttttaaaaggaagggattaaagagggtgggaaatctatggtttttattttaaaaaagaaaaaggaaaaaaaaaaagtcaataacaaaaaacccagctcaagaacccattctacgccaaactggaaaggagaagagagcaacaggaagattccagaaacggggggccccagtttttgaagaactttatgaacttttcaaagattattttcatatggcagcaagtgatacggaagactgctgtcagggacacctgatatggaaatcaaatagatttttaattaattgaacataagatttagggatttttccagaactcgaaagggtcaacagccctccagaatgtcgggctgcagcctgaggaggctgatgtttggagctggtgtgggattggcgaagcccagtccgggctccctagtcaggaaagacgggggacggccaggctgctggaaggcccccgggggcgcggggcgagttttctttttctgagcactctggataaatccctaagcaacgttgtttctcaaatgtcattaataatgtgtgttgcaaactttaggtttttttcttttctgaaaatgtattttctctttgaatccacccctagtcgcgtagcgtagggctagcggtcgtcacagacaccctagtagaatgtagcactcagcacccttgtctcctaccttgtgttcaactccaatgataccaatagaatattcctcaatgtaattgcacaaaaaaaagcgatataacataggcatgtaaccaatgtggcggtgcaggtgtgcgggtgagcgagcacgtgtgggtgtgcacgcgccgccctccccgcgtggccctcggcgccgccaccctagctggcgcagtcttgacactgcatccttccctcctagtgccttaccgagcgacagacgcggcgtgagggtttacttccactggtactccaagaaactgaggctagtcagacacaatctcagctcttctgttgtgctgttgtaacagtttacgctggccttttttttttctttttctttttctttttaaaatgttaatgcccgttgtctttcctgggctgtttgctagcggaaggatgccagggaagccagcaggagctaggagagagtccgtggatctcgaaagaaatatgggagacagatgcccggcgggtgcgtctggagatggggacggcgggagttgagttgtggcagtagttgagttgtaatttgtgggcggaggcccagagagactccccacccttcacccctgccccactctgtccccagttccgccatttgtgaggccagaggtttccggactgttggcctcgccaggcagccgtctcccgccccaggcggcatcccccagtccctcccgcctccacgagagcctggagctctcagcctcgcccggggctccactctctcctccggctccctgggctgttttgctctaacgatcttgccagatccctccctctgtagacaaccaccaacctctgtttgctgttgaattctctcctcacattacccaggtctgctcaagacatgattttggttttggtttctgagggttctagtgggcagaaggttggagggacacttatgagggtggccgggggtctgacgctgcactttggaaaaactcacacagttgaatttccaaagaaatctgccctttgccctctttgcacctttgatacattctggaagttttctcaggctttggacacttctggggatggaggtgtggagaagtggggagttccctctcttcatagtaaataactctgaaatatgtgaatgtgaatggcaggagaatctggccaaggatggggccgaaaagggtggttctaattgtttgcttctgatgttgagtctttagctgaccccacaggcaggtttccaaggtgcaaagagatctttcccgagtcagcggccccatcctcatcctccctccctttacttcctcactgtgcagtctccctcaaggatctactgtgaaaggtgtgtttgtagtgatatccaacctaactcagtaacgaagtcgttacttagctcttagctgtgaaataactctggaaacttccccaccccaaccataaattcttacttataaagaaacaggtccccaaactggaaacagcttagtccaggcctcagcgagaaggaaggacaccatgactgctccatgctgggcacagccgggcagtcttgccaagtgcctgctggaggctgtgccggcaagaggcctgcagcaaggagattcccttccctcgggccattatcaatactgtctttatctggaggtggggaagcgcagccctctgagacagcaggacaatggtcagttcagagagggtgagggcagcaaacgcttcagaggacacagaagccagaggacccccccccgccccacagctgggtcagcctggaaaatccatctattagggactttttggcagccagatggcagcaatagcccattaggtctcatcccgagttccaagtcttggctgcaaatgagcctcagttcgccttactggagagcacccccagattcctgggcacagttcatttccagccctttctagatctgatcttttagggggaaagacagcttaaaatgttcttttcattttaaagaaaattattctgtctgcttaagttggaggctacttactctttcacctgacattttctttccttttattcttccagatcaggaatgaaatttccatgctgctcataaagataatattattgtactaattatttttattaccattgtaattatgatcattatgttgatattttagtcagggttttaaatgcacatttattccaagtatctttgtgttttctctttaatatttaaacttattctctctgtgagtatataagtagactggagggacatccagatgtccagttttgtcaggcaaaaaaaaaaaggaaagacttaggaagtaggaaaattgtttctgtcatctctatcccaacaagagacgtcaagaaagatccaccacagaacaaaagtttaaagaagaatcaaagccttgattgggcttctgacaacatggtcaccatcaaggttgtcattttctagatcccagaggcctgggatgcgacgtcaggtggcatctcatgggctcggggaatgtcgagtcactgactgtccagcccttagccagcttctctcccacatcctcagagctctcctgtgcttctgaaatctgttaactaaatctttggcttgcctctggtatttaagcaagaaaattccctcccagaggtgaccccatccgcttccccacaatccatccttttgccatcggcgcacctggggcgtggcttaggttcttcaatgcagggacatttgccccctcccagaagctgctgggcacagtgaggtggcgtaagagtgactggcaggtggtaccttccccaggaaatttcaccacaccacccagttcctcagcctgccccctccccctgtgatgcatgcccccagcacccaattctagccagctggaagtgggtggagggacagcaggaggccagagaaaccctgaacaaagctgggcggctgctcaggcatcacaggctgcaccccctctgaaagcatccccactgggctccggccacatcttcagtgcactgtgctgtgtgcgctgggtgctcacacgctgtccccagacccacaaagtgctaggccccagttgaagaaaggggtgaaatagccagcttcaccgaagggaagggaagggaagtattgggcgatgccagccccacagacgctcagcaaacattagtgcacattctcctagtcctcacccaatggcctcctctacccccatgcatggagctgccacatcagaagccccaagagaagctccctgcaggagaggccagctccctggatgcccaattgcatacctggccgaatctgccattgagtcaccttagcaaataggctgctgtcactaggaccaagctctcaagcagagggatgccaacctagtccttacttagcccacgaatcatctagagcatcctctagtcttttgtgggctccctccttcccatttgaagagacattgttcagaggaagaggggaagatttgaaatgtcaggtcacggaggagtgtttaactggagcctggtgaaccgcagggcaatttgcttctgctcactgggttctgactggcccgtctggacgtgggcccccatgtctctgtgcttagggcctcttcatgatgttttggatgtttccaagggaagtgggtgagcagatcaaggggtgggagagtcgaggcttgatgccagttaatactgtgaagtggagcgtgcggtcagtggaattcagaggaaaaagaagggttggagcaaagcggcattcatctcctggactgttagcctttctagtcttcctggtggctgaggtgttcacgggctgggggagccagctgacctttgtcctcttcaacctagaagactcagcccgcccagacaccaacgtgtgagacggatggacatcaggaagggaaggggagattagcccaactgctgacagaacgatttcccttggttggaccttgggaatggcaaacactcatattggaacaagcttggggtggaagatttaggccgtgtgagcatgtgtgagtgagtggaacaaactttcttggaaactggagggaggagatgaggaggcttcgggaagtattactgatggctcatggttgagagagcgacgtggggacccagctcgccccagcttttgtcccaggttctctttgtctgatgctgagggcagggtggggtgtgggaccaccactcttgttggcctgtcaagtagaccctaggacagaaaatggaaagaaggaaatggctcggtgctctcaactagcagagagaattgaggagaggtaagggttccttctgcaggccagcctgggactccacagcgccagcaggagtgacttggccacaagacattccagccccagggactttgcaggcttcattccctgtctgtgtcttttccttctggtgtgttttacagacttctgatggggaagcttcaaacttgagcaggccagagatgtccttaccaaattggaaaggaaggtgaaactgttcctttctttagccaaagaacccttctcaaagacgcctccagaaatggacaaaatggccttcccttcgttcctttccaggcaataatgacatcattagtgatgcaattctatttgtctttctctttcctctctgtccttttttttaaaaaaaaaaaatgcatttatttcaaaactgtgctattcttttaagaggagtggaggtgaccccttcgatgctgctgctatcgggagacaaggtgccataccaatacgtgggcttgactaatcccaggccaccatgggagagagcaaagcagggctgccaggagttcagttgcatcaagggcgtagagcacgcgggggctgggctcggaatagcagtacttttccactttgatgccttagaactctcacttctcatctccacagaccagactcagtaaaatctcaggccactagagaatggaaggcggtgaaacaggatttaaatgcaaaaaaaacctattggaggcttttggcaccgtggctcactagagggacccagcatagtagaggtttctcttgttgcagcttctgaaaagttcaaaaaagaactccaggccgttcttccctcaaacccagtgagagtttgcagagaagtgccccctgcagggctcccgtcccagaacaccagcaccagagagggtcttcccgatgccccccgctggacttgcccaagcctctgggagcccctcatctcagatccctgtgttgaacatgacactgactgtcccttatttgttaaaatttgcaatatctctcaagtaaataatagccaacatttgttgaatgctttcatgactcccgggctaaggcctttatgagcgttgtctcaaggggccccaacagccatcccacagggagggggataacagcccccatttatagataagggagctgaccggatgctctgagaagtggcaggtgttgaaggaaggataaagcagtgatgggccagaatccccaaggttcccttttttgttcatcaggcccttcctgagatgtgatttttaatcttttaactttttttaattaatagcaatgcgtggcctcatatttctatgaaccatttagtgatactcccgcttcctgcatgccacacactgtgctgggaattgctcatgggttgtcctgtttcatcttctccgtagccctgtgagatcggcaatattagtccccctacagccaaggaaactgcccagagccacacaactcttgaggggcgaggagggcttgaacctgagtctgcccagctccagaactgagcttgcagccattagccacagctgtctcctgcatgtctgagcaaagaaaggcctttacacagcatcaccctgtgccatcccatgcaccgtgggactcagctaaaggactgtgcaaagagggggctcctgagttggatttaggcaaaaggggcagaattcgtttgatttttagagaaaatctctggagagtttcttttgattcatagaattccttttagatttctttccagcataccaactagctttagtagtgctgctacaaccagctcttataagtaagagtgaaaaagtattcttttcttctttaaaaaataagtttttcttgcttatagttaattctagaaaggcaatactaaaggtatatatttttttcaaaatgctattttttactgcacttgataattatcctgacagctctgatctctgtaatagattcactcttcagctctgggcagaaccagaggcagggttcacaccaaatttgtaaataccatatgtgggtctggtgtccaggaacttttttctttctgttaaaaaaaagaaaaaaaaaagaaaaaaaaaaagaagtagaggtggaagaaagacaagacttagaggaacaaaagaatgttttcttttgagatactcttctcaaagaaatagcaacaattgtataaacaggaaaaccagccagctttcatgataaaaggaaggcgtgtctcttgccctggtatgagattaacagaaatacagatgcatttttattttgattgaaagatggtgagaatgtagaaatgcttaggactagatttttaattttttaaaataactattatcatttattatgaaatatttgttcagttgttttgagtgggtttcttgttccttttttcatttaaaaccttctttgttgactggctccaggcttgtttgcctaaattcttaggtagtttacacaagttctagaatcttttagaactttaactccattggaagcaaacctaactaatcggagtttgagatcctggttggtttcaataggtattctggaattctggcagaacacctaaagattttttttttttttagaaggttttagatacattatcttacacaaactgtgacctaatggcaataattacctcaaatgtgggcattcatcctggttttagccttttttgaaatcatgtagccagcttgatcttggaatttaaagactatgaattctctgtgggctgaaaataatgattacttcatacccccggtcatcgttgcttaagtgaattctgaaaatagctcatctttacaacaaaaattaaaccaaggaagagattattctttgtgtgttgtactcaaatgcgatgttcaaatgcacatgttaagtatatatgtttttagctactgtaaaatgctgttagccttctaagctatcaaaacagtcacattttaaatgagtaaactaaacaattgactgtggatacttaagcatatttctggctacgttttatagttaaagtgttttatagtttacatttagactggtactttttaaagaaaagttctgtttataactgacatccgcaaaccccagtgaatgcctcttagttggaggttgtgtctcccccaaggcaagtgtgttgtcccagactcttctgtagtccagcatgcgcacttccctctggattattactttccacgtgaactcaagagaacatgaaaggcaatccagatggagggaaaaggtgtgagtccgcagcccgggccagatgcgaaggtctcatgcgtgtcgtctaaacacttgtcttcaaggccttctctctgacatcttggaagagtcattgagaacagataacctggttcattgatttttgtcttgatttgaatatttaacttattaatagatccactgatttccaggcaccaggcagtagaagagactgggattcaggtgaccatgaaggcacagctgctacttctgggccgggggtgatattttgatcagcgttttgtaggggaggaccatatacccctattcccatggtcgctggctgggttttccatatatctgctgtcatttattcgttttccccttaaaagcaaaatcaatgtaaaaggctatgtttacgttttactcattgtccagcttagactcaaagtctagttcggtgggagggggaccttagcatcctctcagagatggtcagggctgagcaggaggaggcagagacagaggggcagctcagcctggtccattgagacccactctaaacagacatcatatttggaacaagaagatgcttcgagacaggaatgggccccactgtcatgcagaaacagactgggggaatggcagtttccctgagtcttggtttcttttatgttttctcttgtgccaccaccaaactgcagaggacctgctgtgacctaaagggcattcctttagcagataagaccttgaaaactgcaaaacacctgggaccagggagcttttaaaaaatacaaaaaaataccacatttgctttttccctgtgaactgtattgacagcgtgttcttaggacagtcttttggtggaaatgttactgtaaaatagttttcatctcacccctcctaatcatactcccactttcctgtttgtgtggtggtgttgctgttttttcctttacatgaattaaccaaatgaattttgtgtcattgtttttggggcttatatttttaaaacatagaaattgccttttgttcatttgaaaagtaagtatgttgtatctgaaaaagggctctgcctctgctctccctcgcttccttgtaaccaatctccaaacgaatctctcctggcaccgcccccttccttatatagggtcactgtccccggggccacctctgcctccaccctgctgtcaccactgccctgggccaaggcacccaggactcccagaaagcgcgagagccagcaagaaggccccactcagccttgagactggtggtcacacctccctgtcagagtcgcctgctgggctgaaggggcaatggattgtcattgttgaaattgtttggctcaggttataaggaggaacttgggaagtagaaagtgacttgaccatgtgcatccttggtagcttcctgtaactaacaaatggaacagagagcacacccccgccccgccccaccccaagcagatgttcccgtcagcgctgccctgagtcagtcggtcccccgtttctgctctcctcccttttgtgttcctgctcacttcaagcttcttccatggactttccagggcacagtcatctctagcccccaaatcatctcttcatcctctgtgtgtgcatttttttaaccaaatgaaatagacaagaaagtcatactttggggcagcagaatttctaatttagtagaatcactgtatagagatagatgttgatatatatgtttgtgtatatatatcaaaccaaattggataggagaagtatagctttacagatgaggagaaggagctctttagaggtcggagtcaagactggtgtcttggacgtgcatgggctgtgtcccaggccactccgcacacatggggctgaggcgtggcgccgggcccttgtcatccacctcaccacggcagagccagcaggccctgtagggtgctgctgctgtctcactgggtcccagcttcaagcgcatcagtgggtgacgggggcaacaaatcagagtgactggaagtttccatcccgttttgctttgaccacgtgtactgagctgcagcctctgatactctgtcacgtttccaaaaatggtatccattaggatagaaagagaatggatctgcagaaatgtttacctttcaactgctcatgaattcaggacactggatagaaagactcactccccaaaatgagaacagggaagaggagacccggcgacactaagtcaccaggtccaaggaacgtggctccctccccagggtcatctcacctagatctttctctcccaggtcatctcagctcaatctcaataaccctatgaaagccctggtctgttgtgttccttcaccgtacggtttctgtaataaaaagtgttaatccatgttaatctgtgtgaaaattattgcgtgcaacagtattttctcgtgtacctctttttcctatgtgaattgtccctcttttttatttataaatgtctacttttgtttttttaaagacaaaccaatgtgttgtagacctatatgtaacctattccttagtctcatattataggtatgttataagaatggatattttacttggctttagaatgttttacaagaaaactaattcttaactgatcaagtccttgctactaaaatgcttgtgtttttcatcatgacgtcgtgtgcttctaaattaatcattttcgttgtagaaaaatggagtgaatttatattagtcttggaaactaataatagcattgtaaatttatgagatgattttaacagaaaaaatatagaagaatatagttattttaattgtaatattactaactgtagggtgagaaaaaggggggggggtcccattgtggtgaactatgttatagcttgttactcatagtttctttttgatcattttttcggtctccgaggtgaaatgacttattaattaaaatttgtaaactcacatatgcatattgtatatgtgtagaaatgtaatcacactttgtcttggaattacattaaactgtttgaaatcactgta

SEQ ID NO: 212937 - DNA, 2757 bp, Artificial Sequence
  derived and/or modified sequence
ctgcagcctgtgtatgaatccatggccagccacgtgcaggtgttcagcccccacaccctgcagagcagcgccttctgcagcgtgaagaagctgaagattgagcccagcagcaactgggacatgacaggctacggcagccacagcaaggtgtacagccagagcaagaacatccccctgagccagcctgccaccaccaccgtgtccaccagcctgcctgtgcccaaccccagcctgccctatgagcagaccatcgtgtttcctggcagcacaggccacatcgtggtgaccagcgccagcagcacctctgtgacaggccaggtgctgggcggcccccacaacctgatgaggaggagcacagtgtccctgctggacacctaccagaagtgtggcctgaagaggaagtctgaggagattgagaacaccagctctgtgcagatcatcgaggagcacccccccatgatccagaacaatgccagcggggccaccgtggccacagccaccaccagcacagccaccagcaagaacagcggcagcaacagcgagggggactaccagctggtgcagcacgaggtgctgtgcagcatgaccaacacctatgaggtgctggagttcctgggccggggcaccttcggccaggtggtgaagtgctggaagaggggcaccaatgagatcgtggccatcaagatcctgaagaaccaccccagctatgcccggcagggccagatcgaggtgtccatcctggcccggctgagcacagagagcgcagatgactacaactttgtgcgggcctatgagtgcttccagcacaagaaccacacctgcctggtgtttgagatgctggagcagaacctgtatgacttcctgaagcagaacaagttcagccccctgcccctgaagtacatccggcctgtgctgcagcaggtggccacagccctgatgaagctgaagagcctgggcctcatccatgctgacctgaagccagagaacatcatgctggtggaccccagccggcagccctacagagtgaaggtgattgactttggaagtgccagccacgtgtccaaggctgtgtgcagcacctacctgcagagccgctactaccgggcccctgagatcatcctgggcctgcccttctgtgaggccatcgacatgtggagcctgggctgtgtgattgctgagctgttcctgggctggcccctgtacccaggggcctctgaatatgaccagatccgctacatcagccagacccagggcctgcctgctgagtacctgctgtctgctggcaccaagaccacccgcttcttcaacagagacacagacagcccctaccccctgtggaggctgaagaccccagatgaccacgaggccgagaccggcatcaagagcaaggaggccaggaagtacatcttcaactgcctggatgacatggcccaggtgaacatgaccacagacctggagggcagtgacatgctggtggagaaggctgacagaagagagttcatcgacctgctgaagaagatgctgaccattgatgctgacaagaggatcacccccatcgagaccctgaaccacccctttgtgaccatgacccacctgctggacttcccccacagcacccacgtgaagagctgcttccagaacatggagatctgcaagagaagagtgaacatgtatgacacagtgaaccagagcaagacccccttcatcacccacgtggcccccagcaccagcaccaacctgaccatgaccttcaacaaccagctgaccaccgtgcacaaccaggcccccagcagcaccagcgccaccatcagcctggccaaccctgaggtgtccatcctgaactaccccagcaccctgtaccagcccagcgctgcctccatggctgctgtggcccagaggtccatgcccctgcagacaggaacagcccagatctgtgcccggccagaccccttccagcaggccctgattgtgtgccccccaggcttccagggcctgcaggccagccccagcaagcatgctggctacagcgtgaggatggagaatgctgtgcccatcgtgacccaggcccctggggcccagcccctgcagatccagcccggcctgctggcccagcaggcctggcccagcggcacccagcagatcctgctgcccccagcctggcagcagctgactggagtggccacccacacctctgtgcagcacgccaccgtcatccctgagaccatggccggcacccagcagctggccgactggaggaacacccacgcccacggcagccactacaaccccatcatgcagcagcctgccctgctgaccggccacgtgaccctgcctgctgcccagcccctgaatgtgggcgtggcccacgtgatgaggcagcagcccaccagcaccaccagcagcaggaagagcaagcagcaccagagcagccagaggaagaatgtcatcagctgtgtgacagtgcatgacagcccctacagcgacagcagcagcaacaccagcccctacagcgtgcagcagagagctggccacaacaatgccaatgcctttgacaccaagggcagcctggagaaccactgcaccggcaaccccaggaccatcatcgtgccccccctgaagacccaggccagcgaggtgctggtggagtgtgacagcctggtgcccggcaacctgggccctggccagggcaggaacctgagcctggagagcggcttccctgccttcctgctgctggagatgctgctgtatggcagctag

SEQ ID NO: 212938 - DNA, 3597 bp, Artificial Sequence
  derived and/or modified sequence
atggcccctgtgtatgagggcatggccagccacgtgcaggtgttcagcccccacaccctgcagagcagcgccttctgcagcgtgaagaagctgaagattgagcccagcagcaactgggacatgacaggctacggcagccacagcaaggtgtacagccagagcaagaacatccccctgagccagcctgccaccaccaccgtgtccaccagcctgcctgtgcccaaccccagcctgccctatgagcagaccatcgtgtttcctggcagcacaggccacatcgtggtgaccagcgccagcagcacctctgtgacaggccaggtgctgggcggcccccacaacctgatgaggaggagcacagtgtccctgctggacacctaccagaagtgtggcctgaagaggaagtctgaggagattgagaacaccagctctgtgcagatcatcgaggagcacccccccatgatccagaacaatgccagcggggccaccgtggccacagccaccaccagcacagccaccagcaagaacagcggcagcaacagcgagggggactaccagctggtgcagcacgaggtgctgtgcagcatgaccaacacctatgaggtgctggagttcctgggccggggcaccttcggccaggtggtgaagtgctggaagaggggcaccaatgagatcgtggccatcaagatcctgaagaaccaccccagctatgcccggcagggccagatcgaggtgtccatcctggcccggctgagcacagagagcgcagatgactacaactttgtgcgggcctatgagtgcttccagcacaagaaccacacctgcctggtgtttgagatgctggagcagaacctgtatgacttcctgaagcagaacaagttcagccccctgcccctgaagtacatccggcctgtgctgcagcaggtggccacagccctgatgaagctgaagagcctgggcctcatccatgctgacctgaagccagagaacatcatgctggtggaccccagccggcagccctacagagtgaaggtgattgactttggaagtgccagccacgtgtccaaggctgtgtgcagcacctacctgcagagccgctactaccgggcccctgagatcatcctgggcctgcccttctgtgaggccatcgacatgtggagcctgggctgtgtgattgctgagctgttcctgggctggcccctgtacccaggggcctctgaatatgaccagatccgctacatcagccagacccagggcctgcctgctgagtacctgctgtctgctggcaccaagaccacccgcttcttcaacagagacacagacagcccctaccccctgtggaggctgaagaccccagatgaccacgaggccgagaccggcatcaagagcaaggaggccaggaagtacatcttcaactgcctggatgacatggcccaggtgaacatgaccacagacctggagggcagtgacatgctggtggagaaggctgacagaagagagttcatcgacctgctgaagaagatgctgaccattgatgctgacaagaggatcacccccatcgagaccctgaaccacccctttgtgaccatgacccacctgctggacttcccccacagcacccacgtgaagagctgcttccagaacatggagatctgcaagagaagagtgaacatgtatgacacagtgaaccagagcaagacccccttcatcacccacgtggcccccagcaccagcaccaacctgaccatgaccttcaacaaccagctgaccaccgtgcacaaccaggcccccagcagcaccagcgccaccatcagcctggccaaccctgaggtgtccatcctgaactaccccagcaccctgtaccagcccagcgctgcctccatggctgctgtggcccagaggtccatgcccctgcagacaggaacagcccagatctgtgcccggccagaccccttccagcaggccctgattgtgtgccccccaggcttccagggcctgcaggccagccccagcaagcatgctggctacagcgtgaggatggagaatgctgtgcccatcgtgacccaggcccctggggcccagcccctgcagatccagcccggcctgctggcccagcaggcctggcccagcggcacccagcagatcctgctgcccccagcctggcagcagctgactggagtggccacccacacctctgtgcagcacgccaccgtcatccctgagaccatggccggcacccagcagctggccgactggaggaacacccacgcccacggcagccactacaaccccatcatgcagcagcctgccctgctgaccggccacgtgaccctgcctgctgcccagcccctgaatgtgggcgtggcccacgtgatgaggcagcagcccaccagcaccaccagcagcaggaagagcaagcagcaccagagctctgtgagaaatgtgtccacctgtgaggtgagcagcagccaggccatcagcagcccccagaggagcaagagggtgaaggagaacaccccaccccgctgtgccatggtgcacagcagccctgcctgcagcacctctgtgacctgtggctggggagatgtggccagcagcaccacccgggagcggcagaggcagaccatcgtcatcccagacacccccagccccaccgtgtctgtcatcaccatcagcagtgacacagatgaggaggaggagcagaagcacgcccccaccagcacagtgtccaagcagaggaagaatgtcatcagctgtgtgacagtgcatgacagcccctacagcgacagcagcagcaacaccagcccctacagcgtgcagcagagagctggccacaacaatgccaatgcctttgacaccaagggcagcctggagaaccactgcaccggcaaccccaggaccatcatcgtgccccccctgaagacccaggccagcgaggtgctggtggagtgtgacagcctggtgcctgtgaacaccagccaccacagcagcagctacaagagcaagagcagcagcaatgtgaccagcaccagcggccacagcagcggcagcagcagcggggccatcacctaccggcagcagaggcctggcccccacttccagcagcagcagcccctgaacctgagccaggcccagcagcacatcaccacagacagaacaggcagccaccggcggcagcaggcctacatcacccccaccatggcccaggccccctacagcttcccccacaacagccccagccacggcaccgtgcacccccacctggccgctgctgctgctgctgcccacctgcccacccagccccacctgtacacctacacagccccagctgccctgggcagcacaggcaccgtggcccacctggtggccagccagggcagcgcccggcacacagtgcagcacacagcctacccagccagcatcgtgcaccaggtgcctgtgtccatgggcccccgggtgctgcccagccccaccatccaccccagccagtacccagcccagtttgcccaccagacctacatcagcgccagccctgccagcacagtgtacacaggctaccccctgagccctgccaaggtgaaccagtacccctacatctag

SEQ ID NO: 212939 - DNA, 2757 bp, Artificial Sequence
  derived and/or modified sequence
ctgcagcccgtgtacgagagcatggccagccacgtgcaggtgttctcgccacacaccctgcagtcttctgctttctgttctgtgaaaaaacttaagatcgaaccttcatccaactgggacatgacgggctatggaagtcatagtaaggtctacagtcagtccaaaaacattccactgtcccagccggcaacaactacagtttccacctcactgcccgtacctaaccccagcctgccctacgaacaaacaatcgttttcccaggatcaacgggccacattgtagtgacatcagcatcatccacttctgtgaccgggcaggtacttggaggcccccataatcttatgagacgtagcacagtgtcccttttagacacctatcagaagtgtgggcttaagagaaagagcgaagaaatcgagaacacttcatccgtgcaaatcatcgaagaacacccccctatgatacagaacaacgcctccggggcaacagtcgccacagccactacttcaacagcgacatccaaaaatagcggaagtaactccgagggcgactaccaactagtgcaacacgaggtgctatgcagcatgaccaatacgtacgaggtgctggagttcctaggacgcggaacatttggccaagttgtcaagtgctggaagagaggaacaaatgagatcgtagctatcaagatacttaaaaatcacccctcctatgctaggcagggccagatagaggtaagcattctggcacgcctatctaccgaaagtgctgatgactataactttgtgcgggcatacgaatgcttccagcataaaaaccacacatgcctggttttcgagatgctcgaacagaatctgtacgacttcctaaaacagaacaagttctccccacttccgctgaaatatattaggcctgtcctgcagcaggtggcaacggcgttgatgaaacttaaatccctggggcttatccatgccgaccttaaaccggagaacattatgctggtcgacccatctcggcagccataccgcgtcaaggttatcgattttgggtcagcctcgcacgtgtcaaaggcagtgtgcagtacctatctgcagtcaagatattatcgcgcgcctgaaattatacttggattgccgttctgtgaagctattgacatgtggtcgctcggatgtgtcattgccgagctgtttctgggatggccactctaccccggcgcttctgaatatgatcaaattagatatatatcacagacacagggactgccagccgagtatctcctcagcgctggtaccaaaacaacaagatttttcaaccgcgacaccgacagcccgtatccactgtggcggttgaaaacccctgacgatcacgaagccgagactgggatcaagagtaaggaggcccgcaaatacatttttaattgtctggatgacatggcacaggtcaatatgacaacagacctggagggaagtgacatgctcgtcgaaaaagccgaccggcgtgagttcattgacctgctgaagaaaatgctcaccatcgatgcagataaacgcattacgcccatcgagactctgaaccatccctttgtaaccatgacacatctgctggacttcccccacagcacccacgtgaagtcatgtttccagaacatggagatatgtaaacgacgagttaatatgtatgacaccgtgaaccagagcaaaacccctttcataacccatgttgccccttccacatctacgaatctgaccatgacatttaataaccagctgacaacggtgcataaccaggcccccagcagcactagcgctacaatttccctggccaacccagaagtgtcaattctgaattacccgtccactctgtaccagccaagcgcagccagcatggccgccgtggcacaacggtccatgccactccaaacaggaacagcacagatatgtgcacgccctgacccttttcaacaagcacttatcgtgtgcccgccaggcttccaagggctccaggcatcaccttcaaagcacgcaggttattctgtgcgcatggaaaatgccgtccctatagtgacacaagcaccgggagctcagcctctgcagattcaacccggcctcctcgcccaacaggcctggccaagtggaacccagcagattctgctaccgcctgcctggcaacaactaacaggagtggccacacacacgtcagttcagcatgcaaccgtaatcccagagaccatggccgggacccaacaacttgccgattggcgaaatacacacgcccacggttcgcactataaccccattatgcagcagccagctcttctgactggccatgtgactcttccagccgcccaaccgctcaacgtcggagtggctcatgtgatgcggcagcagccaacaagcactacctcctcacgcaagagcaagcaacatcagtccagccagaggaagaacgtcatctcatgtgtcacagtccatgattcaccatactccgattcctcatcgaacacttcaccctattctgttcagcagagggccggccacaataacgccaacgcatttgatactaaaggaagtctggaaaaccactgcacgggcaacccaagaacaatcattgtgcctccgcttaaaacccaggcatctgaagtgctagtggagtgtgacagcttggtacccggcaaccttgggcccgggcaggggagaaacctgtccttagagtctggcttcccagcttttctgctgttagaaatgctcctctacggctcatag

SEQ ID NO: 212940 - DNA, 3597 bp, Artificial Sequence
  derived and/or modified sequence
atggcccccgtgtacgagggcatggccagccacgtgcaggtgttcagcccccacaccctgcagtctagtgcattctgttccgtgaaaaaacttaaaatcgagccttcatccaattgggatatgacaggttatggatcgcacagcaaggtgtacagccaaagcaagaatatccctctctcacagcctgctacaacgactgtgagcactagcttacctgtgccgaatcccagtctaccttatgaacagaccatcgtatttcccggtagcaccggccatatcgttgtcaccagtgccagctcaactagcgtgacaggccaggtgttgggggggccacacaacctcatgcgtcggtccaccgtgtctctgttggatacttatcagaagtgtgggttgaaacggaaatctgaggagattgaaaatacctcttctgtacaaataatcgaagaacatccccccatgatacagaataatgcctctggagccacagtggctaccgcgaccacatctacagccacctcaaagaattcaggcagtaactctgagggagactaccaacttgtgcaacacgaagtcctgtgttcaatgaccaatacttatgaggtcctagaattccttggccgaggcacttttgggcaggtagtgaagtgctggaagaggggaactaacgaaatcgtggccatcaagatcctaaaaaatcaccctagctacgccaggcagggccaaatcgaggtgtccatcctggcgagattgtctactgagagtgctgatgattataatttcgtgagagcctacgagtgcttccaacacaagaaccacacgtgtctggtctttgagatgctggagcaaaacctgtacgacttcttgaaacagaacaaatttagtccactgccactcaagtatatacgccccgttctgcagcaggtagcaacagctttaatgaagctcaaaagcttgggcctcattcatgcggacctgaagccagagaacatcatgctagtggaccctagccgccaaccgtatagggtgaaggtgatcgattttggatcagctagccacgtgtcaaaggctgtctgctcgacgtatcttcagagccggtattatagagcccccgagattattttagggttacccttctgcgaagcaatcgatatgtggagtctcggttgtgtgatagctgagcttttcctaggatggccactatatcccggagcgtccgaatacgaccaaattaggtacatttcacagacccagggactccccgccgaatacctcctttccgcaggaactaagaccacccggttcttcaaccgcgatactgactcaccctatccactttggcgactcaagacccccgacgatcatgaggctgaaaccggcattaagagtaaagaggcacgtaagtatatctttaactgcctggatgacatggcccaggtgaatatgaccacagatttggaagggtcagatatgttggtcgaaaaagctgatcgtagagaattcattgacctcctgaagaagatgttaacaatcgatgcagataaacgtattacccccatcgagacactcaaccaccccttcgtgactatgacccaccttctcgactttccgcactcaacccacgtaaagagttgttttcagaatatggagatctgcaaaaggagagtgaacatgtacgacactgtcaatcagagcaaaaccccttttattacccacgtggccccaagcacaagtacgaacctgacaatgacctttaacaatcaattaactacagtgcataaccaggccccgtctagcaccagcgccacaatctcattggcaaatcccgaagtttcaatactcaattacccctccaccttgtaccaaccttccgcagcaagcatggcggcggtcgcacagcggtctatgcctctgcagacgggtacagcacaaatctgtgccaggccagatccctttcagcaagccctgatcgtttgccccccaggattccaaggactgcaggctagtcccagtaagcacgccggatattcggtcagaatggaaaacgcagtccccatcgttacgcaggctcctggcgcacagcccctgcagattcagccgggtctgttggcacagcaggcctggccatcaggaacccagcaaattcttctgccccctgcctggcagcagctcaccggtgtggcaactcacacatccgtccagcacgccaccgttattcctgagacaatggccggaacccagcagctggcagactggcgaaacactcacgcccacgggtcccactataaccctataatgcagcaacctgctctgctgactggtcatgttaccttaccggccgcccaacccctgaacgtcggggtggctcatgtcatgcggcagcagcccacctccaccacaagctctcggaaatccaaacagcatcaaagcagtgtaaggaacgtctccacctgcgaggtgagttcttctcaagccattagctctccacagcgatcaaagcgcgtgaaggagaataccccccctaggtgtgccatggttcattcctcgcccgcgtgtagtacttccgtgacctgtggctggggcgatgtggcatccagcactacccgggaacgacagcgccaaacaatcgtcattcccgatactccatctcccactgtgtcagtgattactatcagttctgacaccgatgaggaggaagaacagaaacacgctcctacgagcactgttagcaaacagcgaaagaacgtgatatcttgtgtcactgtgcacgatagcccctatagtgattcatcgagtaatacaagcccttattctgtgcaacagagagccggccacaacaacgccaacgctttcgatacaaagggatccctcgaaaatcactgtacgggcaatcccagaaccatcatcgtgccacctctcaagacacaagctagtgaggtcctcgtcgagtgcgactcactggtgcctgtgaacacgagccaccactcatcttcctataagtccaaaagcagttcgaatgtcacatctactagcggtcacagctctgggtcctcttccggcgcaatcacttaccggcagcagcgccccggaccccactttcagcagcagcagcctctgaatctctcacaggcacagcagcacattaccacagacagaaccgggtctcaccgccggcagcaggcctatatcaccccgacaatggctcaggcaccgtacagtttccctcacaactctcccagccacggcacagtccatccccacctcgctgctgcagccgccgcagctcaccttcctacccagcctcacctgtatacgtacaccgctccggctgctctgggatctactggcaccgtggcccacttagtggcatcgcaggggagcgcccggcataccgtgcaacataccgcttatcccgccagtattgtgcaccaggtgcccgtttccatgggtcccagagtgctgccatcacccacaatccacccgagccagtatccggcccaatttgcacaccagacgtatatatctgcaagccctgcatcgactgtttatactggctatccattgtccccagctaaagtcaaccagtatccctatatctag

SEQ ID NO: 212941 - DNA, 2757 bp, Artificial Sequence
  derived and/or modified sequence
ctgcagcccgtgtacgagagcatggcctctcatgtccaggttttctcaccacatactctgcagagctcagcattttgtagcgtgaaaaaactgaaaattgaaccctcctccaattgggacatgactggttacggctcgcattccaaagtgtactcccagagtaagaacattcctctatcacaacctgctaccactacagtttccacgagcctacccgtgcccaaccctagcctaccttacgaacagactattgtgtttcctgggagcactggccacattgttgtgacttcagccagcagcactagtgtgaccgggcaagttctgggcggaccccataacttgatgagacgctccacagtctcgctgttggatacctaccaaaagtgtggtctcaaacggaaaagcgaagagatagagaacaccagcagtgtccagatcatcgaggagcatccgccaatgattcagaacaacgcgtcaggagccactgtcgccacagcaacgacctctacggcaaccagcaagaatagtgggtcaaattcagaaggtgattatcagctggtacagcacgaagtgctctgcagcatgacaaatacctatgaggtgttggagtttttgggccgtgggacctttgggcaggtggtcaaatgttggaagagggggactaatgagatcgtggctatcaagatccttaagaaccatccatcctacgccaggcagggtcagatagaggtctccattctcgctcgcctatctaccgagagtgcggatgattataacttcgtccgtgcttacgagtgctttcaacacaagaaccatacctgtttggttttcgagatgttggaacagaatctttatgatttcctcaagcagaataaatttagcccccttccactcaagtacatccgacctgtcctgcagcaggtagccaccgccctgatgaagctcaaaagccttggactaattcacgccgacctgaagcctgaaaacattatgcttgtggacccgagcaggcagccttaccgtgtgaaggtcatcgactttggtagcgccagtcatgttagcaaggcggtctgtagcacttacctgcaaagtagatactatcgggcacctgagatcatcctgggcctacccttttgcgaggccatcgacatgtggtcactcggctgtgtgatcgccgagttgttcctcggatggcctttgtatccaggcgcttcggagtacgaccagatacggtatattagccagactcaaggactgcccgcagaatacctcctgagtgctgggacaaagaccacgcgcttttttaacagggatactgacagcccctacccgctatggaggctgaaaaccccagatgaccacgaagccgaaaccggcatcaagtctaaagaagcgcgtaaatacatttttaattgcctagatgatatggctcaggttaatatgacgacagacttagagggcagcgacatgcttgtcgagaaggccgaccggagggaattcatcgatctattaaagaaaatgttgacgatagacgccgataagcggattaccccaattgagacgcttaaccacccgttcgttactatgacacacctgctggactttccccacagcacccacgtgaagagctgctttcaaaacatggaaatttgcaaacgtcgtgtaaatatgtatgatacagttaaccagagcaaaaccccttttattacacacgtggcgccatctacctccacaaatctgactatgacctttaacaaccagctgactaccgttcacaatcaagctccctcctcaactagtgctactatttcccttgcaaatcctgaggtgagcatcctcaattatccctccacgctttatcagccatccgccgcatcaatggccgcagttgcccagcgttctatgccccttcagactggtacagcccagatatgcgccagaccagacccatttcagcaagccctgatcgtttgcccccctggcttccagggcctacaagctagtccctccaagcatgctggatacagtgtgcgaatggagaacgccgttccgatcgtgacgcaagctcccggtgcccaacccctgcagatacagcccggactcctggcacagcaagcatggcccagcggcacgcaacagatccttttaccgcctgcatggcaacaactgacaggagtggccacacacaccagcgtgcaacatgctactgtaattcccgagaccatggcaggtacccaacagctggcagattggaggaatacccatgcgcatggctcccattataaccccatcatgcaacaacctgccctgttgaccggccacgtgacgctgcccgctgcacaacccttgaacgttggtgtagctcatgtgatgcggcagcagcccacctctaccaccagctcccgcaaaagcaagcaacatcagtcatcccagcgcaagaacgtgatatcttgcgttactgtgcatgactctccttactcggacagctcgagcaacacaagcccctactccgtgcagcaacgtgcaggccacaacaacgcgaatgcattcgatacaaagggatcgctggaaaaccactgtaccgggaatccacgaacaattatagtgccacccttgaagacccaggccagcgaagtgctggtggagtgcgatagtttagtcccaggcaatctgggtccgggtcagggcagaaatctttccttagagtctggattccctgcctttctgctgcttgaaatgctcctgtacggctcctag

SEQ ID NO: 212942 - DNA, 3596 bp, Artificial Sequence
  derived and/or modified sequence
atggcgccagtatacgaggggatggctagccacgtgcaagtcttcagccctcataccctgcagagttccgcgttttgctcagttaaaaagctaaaaatagagccttcctctaattgggatatgactggttacggatctcattctaaagtgtactcccagagcaagaacatccccctgagtcagccagccactaccacggtgagcacatcgctgcctgtgcctaatcccagcctgccttacgagcagaccatcgtctttccgggatcaacaggacatatcgtggtaactagcgctagcagcacatctgtcacgggccaggtgctgggaggcccacataacctcatgcgccgttccacggtttctctcctggatacctaccaaaagtgtggactgaagcggaaaagcgaggaaatagagaatacgagttctgtgcagatcattgaagaacatcccccaatgatccaaaataatgcctccggagcaacagtcgcaacagctaccaccagtaccgctaccagcaaaaatagcgggagtaacagcgaaggcgactatcagctcgtgcagcatgaggtgttgtgcagtatgacgaatacctacgaagttctggagtttctggggcgaggcacctttgggcaagtcgtaaagtgttggaagaggggaacaaacgagatcgtggcgataaagatcctgaaaaatcatccttcttacgccagacagggtcagatcgaagtctccatcctggcacgactgagtactgagtcagcagatgactataatttcgtgagagcctatgagtgttttcagcacaagaatcacacttgtctcgtatttgagatgctggagcaaaacctctatgattttcttaagcagaacaaattctcccctctgcccctcaagtacattagaccggttctacagcaagtagcgaccgccttaatgaagctaaagagcctgggtctgatccatgccgacctgaaaccggaaaacatcatgttagtcgatcctagccggcaaccatacagggtaaaggtcatcgattttggatccgcgagccatgtcagtaaagccgtgtgcagcacgtacctccagtcaaggtactatagagctcccgagatcattctgggcctgcccttttgtgaggccatcgatatgtggtccctaggctgcgtgattgctgaattattcctcggatggcctctatatcccggagccagcgaatatgatcaaatccgctacatttcacagacacaagggctcccagccgaatatcttctgtcggccggaacgaaaacaacacgcttttttaaccgggataccgactctccctacccactgtggcgtctgaaaactcccgacgatcacgaagcagaaacgggcattaaatccaaggaagccagaaaatacatcttcaattgccttgacgacatggcacaggttaacatgaccaccgatctcgaggggtccgacatgctggtggagaaggctgatcgacgagaattcatcgacttgttgaaaaaaatgcttaccattgacgctgacaagcgcataacccccattgagacactgaaccaccccttcgtgactatgacccatttgcttgattttccgcactccacacatgtcaaatcttgtttccagaatatggagatttgcaaaagacgggtgaacatgtatgatacagttaaccagtccaaaaccccctttattactcatgttgcaccttccacctctactaacctcactatgactttcaacaaccaacttacaacggttcataatcaggcgccaagctcaaccagtgctaccatttccttggcgaatccggaggtgtccatcctgaactaccccagtaccttatatcagcccagcgctgcctccatggccgctgtggcccaacgtagtatgcctttgcagacaggaactgcgcagatatgtgcgaggcccgacccctttcaacaggctcttatcgtatgccctccaggcttccaaggtctccaggcctctccctcaaagcatgccggatactctgtgcgcatggagaacgctgtgcctatagtgactcaggctcccggtgcccaaccactgcagattcagcctggtttactggcccaacaagcttggccctcagggactcagcagattctactcccccctgcgtggcagcagctgacaggagttgcaacgcacacatctgtgcaacacgccactgttatccctgaaacaatggccggtacacagcaactcgcagactggcgcaatacacatgcgcacggcagccactacaaccctatcatgcagcagcccgctctacttactggacacgtgacacttcccgctgcccagccactgaacgttggtgtggcccacgtcatgcgacagcagcctacaagtacaacttcaagccggaagtctaaacagcatcagtctagcgtccggaacgtgtctacctgcgaggtctcaagtagccaggcaatctccagccctcaaagaagtaaaagggtgaaagagaacacaccccctagatgcgccatggtacattctagccctgcgtgcagtacctctgtgacttgcggctggggggatgtggcgagcagcacaacgcgggaacgccagaggcaaaccatagtgatacctgacacaccaagccctactgtgtctgttattaccatctccagtgatacagacgaagaggaagaacagaagcatgcacctactagcacagtcagcaagcagcgtaaaaatgtgatttcctgcgtgacggtgcacgatagcccgtatagcgacagctccagcaatacctcgccctattcagtgcagcaaagagcaggacataataatgcaaatgccttcgacactaaggggagtctggaaaatcactgcacagggaatccgcgaacgatcatcgtcccacccctgaagactcaggctagcgaggttctagtcgagtgcgacagcctcgtgcccgtgaatacttcacatcacagttcctcatacaagtccaaaagctctagcaatgtgactagcacaagtggacactcttccggaagtagctccggagctatcacctataggcagcagcgccctggcccacacttccagcagcagcagccattgaacctgtcccaggcacagcaacatatcacaacagaccggactggatcgcatcgccgacaacaggcctacattacccctacgatggcacaagccccttatagcttcccccataacagcccgagtcatggaaccgtccatccacacctggcagcggcagcagcagccgcacacctgcctacccagccacatttgtatacatatactgcccctgccgcactgggttctacagggacggtagctcacctggtggcttctcaaggtagcgcgaggcacaccgtgcagcatactgcgtatcctgctagcatcgttcatcaggtgcccgtgagcatgggccctcgtgtgctcccttcacccaccatccaccccagtcaataccccgctcagtttgcccaccagacttacataagtgcctcccccgcttcaacagtgtatacgggatacccattgtctcccgctaaggtgaaccagtacccatacatcta

SEQ ID NO: 212943 - DNA, 2757 bp, Artificial Sequence
  derived and/or modified sequence
ctgcagcccgtgtacgagagcatggccagccacgtgcaggtgttcagcccccacaccctgcagagcagcgccttctgcagcgtgaagaagctgaagatcgagcccagcagcaactgggacatgaccggctacggcagccacagcaaggtgtacagccagagcaagaacatccccctgagccagcccgccaccaccaccgtgagcaccagcctgcccgtgcccaaccccagcctgccctacgagcagaccatcgtgttccccggcagcaccggccacatcgtggtgaccagcgccagcagcaccagcgtgaccggccaggtgctgggcggcccccacaacctgatgagaagaagcaccgtgagcctgctggacacctaccagaagtgcggcctgaagagaaagagcgaggagatcgagaacaccagcagcgtgcagatcatcgaggagcacccccccatgatccagaacaacgccagcggcgccaccgtggccaccgccaccaccagcaccgccaccagcaagaacagcggcagcaacagcgagggcgactaccagctggtgcagcacgaggtgctgtgcagcatgaccaacacctacgaggtgctggagttcctgggcagaggcaccttcggccaggtggtgaagtgctggaagagaggcaccaacgagatcgtggccatcaagatcctgaagaaccaccccagctacgccagacagggccagatcgaggtgagcatcctggccagactgagcaccgagagcgccgacgactacaacttcgtgagagcctacgagtgcttccagcacaagaaccacacctgcctggtgttcgagatgctggagcagaacctgtacgacttcctgaagcagaacaagttcagccccctgcccctgaagtacatcagacccgtgctgcagcaggtggccaccgccctgatgaagctgaagagcctgggcctgatccacgccgacctgaagcccgagaacatcatgctggtggaccccagcagacagccctacagagtgaaggtgatcgacttcggcagcgccagccacgtgagcaaggccgtgtgcagcacctacctgcagagcagatactacagagcccccgagatcatcctgggcctgcccttctgcgaggccatcgacatgtggagcctgggctgcgtgatcgccgagctgttcctgggctggcccctgtaccccggcgccagcgagtacgaccagatcagatacatcagccagacccagggcctgcccgccgagtacctgctgagcgccggcaccaagaccaccagattcttcaacagagacaccgacagcccctaccccctgtggagactgaagacccccgacgaccacgaggccgagaccggcatcaagagcaaggaggccagaaagtacatcttcaactgcctggacgacatggcccaggtgaacatgaccaccgacctggagggcagcgacatgctggtggagaaggccgacagaagagagttcatcgacctgctgaagaagatgctgaccatcgacgccgacaagagaatcacccccatcgagaccctgaaccaccccttcgtgaccatgacccacctgctggacttcccccacagcacccacgtgaagagctgcttccagaacatggagatctgcaagagaagagtgaacatgtacgacaccgtgaaccagagcaagacccccttcatcacccacgtggcccccagcaccagcaccaacctgaccatgaccttcaacaaccagctgaccaccgtgcacaaccaggcccccagcagcaccagcgccaccatcagcctggccaaccccgaggtgagcatcctgaactaccccagcaccctgtaccagcccagcgccgccagcatggccgccgtggcccagagaagcatgcccctgcagaccggcaccgcccagatctgcgccagacccgaccccttccagcaggccctgatcgtgtgcccccccggcttccagggcctgcaggccagccccagcaagcacgccggctacagcgtgagaatggagaacgccgtgcccatcgtgacccaggcccccggcgcccagcccctgcagatccagcccggcctgctggcccagcaggcctggcccagcggcacccagcagatcctgctgccccccgcctggcagcagctgaccggcgtggccacccacaccagcgtgcagcacgccaccgtgatccccgagaccatggccggcacccagcagctggccgactggagaaacacccacgcccacggcagccactacaaccccatcatgcagcagcccgccctgctgaccggccacgtgaccctgcccgccgcccagcccctgaacgtgggcgtggcccacgtgatgagacagcagcccaccagcaccaccagcagcagaaagagcaagcagcaccagagcagccagagaaagaacgtgatcagctgcgtgaccgtgcacgacagcccctacagcgacagcagcagcaacaccagcccctacagcgtgcagcagagagccggccacaacaacgccaacgccttcgacaccaagggcagcctggagaaccactgcaccggcaaccccagaaccatcatcgtgccccccctgaagacccaggccagcgaggtgctggtggagtgcgacagcctggtgcccggcaacctgggccccggccagggcagaaacctgagcctggagagcggcttccccgccttcctgctgctggagatgctgctgtacggcagctag

SEQ ID NO: 212944 - DNA, 3597 bp, Artificial Sequence
  derived and/or modified sequence
atggcccccgtgtacgagggcatggccagccacgtgcaggtgttcagcccccacaccctgcagagcagcgccttctgcagcgtgaagaagctgaagatcgagcccagcagcaactgggacatgaccggctacggcagccacagcaaggtgtacagccagagcaagaacatccccctgagccagcccgccaccaccaccgtgagcaccagcctgcccgtgcccaaccccagcctgccctacgagcagaccatcgtgttccccggcagcaccggccacatcgtggtgaccagcgccagcagcaccagcgtgaccggccaggtgctgggcggcccccacaacctgatgagaagaagcaccgtgagcctgctggacacctaccagaagtgcggcctgaagagaaagagcgaggagatcgagaacaccagcagcgtgcagatcatcgaggagcacccccccatgatccagaacaacgccagcggcgccaccgtggccaccgccaccaccagcaccgccaccagcaagaacagcggcagcaacagcgagggcgactaccagctggtgcagcacgaggtgctgtgcagcatgaccaacacctacgaggtgctggagttcctgggcagaggcaccttcggccaggtggtgaagtgctggaagagaggcaccaacgagatcgtggccatcaagatcctgaagaaccaccccagctacgccagacagggccagatcgaggtgagcatcctggccagactgagcaccgagagcgccgacgactacaacttcgtgagagcctacgagtgcttccagcacaagaaccacacctgcctggtgttcgagatgctggagcagaacctgtacgacttcctgaagcagaacaagttcagccccctgcccctgaagtacatcagacccgtgctgcagcaggtggccaccgccctgatgaagctgaagagcctgggcctgatccacgccgacctgaagcccgagaacatcatgctggtggaccccagcagacagccctacagagtgaaggtgatcgacttcggcagcgccagccacgtgagcaaggccgtgtgcagcacctacctgcagagcagatactacagagcccccgagatcatcctgggcctgcccttctgcgaggccatcgacatgtggagcctgggctgcgtgatcgccgagctgttcctgggctggcccctgtaccccggcgccagcgagtacgaccagatcagatacatcagccagacccagggcctgcccgccgagtacctgctgagcgccggcaccaagaccaccagattcttcaacagagacaccgacagcccctaccccctgtggagactgaagacccccgacgaccacgaggccgagaccggcatcaagagcaaggaggccagaaagtacatcttcaactgcctggacgacatggcccaggtgaacatgaccaccgacctggagggcagcgacatgctggtggagaaggccgacagaagagagttcatcgacctgctgaagaagatgctgaccatcgacgccgacaagagaatcacccccatcgagaccctgaaccaccccttcgtgaccatgacccacctgctggacttcccccacagcacccacgtgaagagctgcttccagaacatggagatctgcaagagaagagtgaacatgtacgacaccgtgaaccagagcaagacccccttcatcacccacgtggcccccagcaccagcaccaacctgaccatgaccttcaacaaccagctgaccaccgtgcacaaccaggcccccagcagcaccagcgccaccatcagcctggccaaccccgaggtgagcatcctgaactaccccagcaccctgtaccagcccagcgccgccagcatggccgccgtggcccagagaagcatgcccctgcagaccggcaccgcccagatctgcgccagacccgaccccttccagcaggccctgatcgtgtgcccccccggcttccagggcctgcaggccagccccagcaagcacgccggctacagcgtgagaatggagaacgccgtgcccatcgtgacccaggcccccggcgcccagcccctgcagatccagcccggcctgctggcccagcaggcctggcccagcggcacccagcagatcctgctgccccccgcctggcagcagctgaccggcgtggccacccacaccagcgtgcagcacgccaccgtgatccccgagaccatggccggcacccagcagctggccgactggagaaacacccacgcccacggcagccactacaaccccatcatgcagcagcccgccctgctgaccggccacgtgaccctgcccgccgcccagcccctgaacgtgggcgtggcccacgtgatgagacagcagcccaccagcaccaccagcagcagaaagagcaagcagcaccagagcagcgtgagaaacgtgagcacctgcgaggtgagcagcagccaggccatcagcagcccccagagaagcaagagagtgaaggagaacaccccccccagatgcgccatggtgcacagcagccccgcctgcagcaccagcgtgacctgcggctggggcgacgtggccagcagcaccaccagagagagacagagacagaccatcgtgatccccgacacccccagccccaccgtgagcgtgatcaccatcagcagcgacaccgacgaggaggaggagcagaagcacgcccccaccagcaccgtgagcaagcagagaaagaacgtgatcagctgcgtgaccgtgcacgacagcccctacagcgacagcagcagcaacaccagcccctacagcgtgcagcagagagccggccacaacaacgccaacgccttcgacaccaagggcagcctggagaaccactgcaccggcaaccccagaaccatcatcgtgccccccctgaagacccaggccagcgaggtgctggtggagtgcgacagcctggtgcccgtgaacaccagccaccacagcagcagctacaagagcaagagcagcagcaacgtgaccagcaccagcggccacagcagcggcagcagcagcggcgccatcacctacagacagcagagacccggcccccacttccagcagcagcagcccctgaacctgagccaggcccagcagcacatcaccaccgacagaaccggcagccacagaagacagcaggcctacatcacccccaccatggcccaggccccctacagcttcccccacaacagccccagccacggcaccgtgcacccccacctggccgccgccgccgccgccgcccacctgcccacccagccccacctgtacacctacaccgcccccgccgccctgggcagcaccggcaccgtggcccacctggtggccagccagggcagcgccagacacaccgtgcagcacaccgcctaccccgccagcatcgtgcaccaggtgcccgtgagcatgggccccagagtgctgcccagccccaccatccaccccagccagtaccccgcccagttcgcccaccagacctacatcagcgccagccccgccagcaccgtgtacaccggctaccccctgagccccgccaaggtgaaccagtacccctacatctag

SEQ ID NO: 212945 - protein, 1154 aa, Artificial Sequence
  derived and/or modified sequence
MQAMEGEVLLPALYEEEEEEEEEEEEVEEEEEQVQKGGSVGSLSVNKHRGLSLTETELEELRAQVLQLVAELEETRELAGQHEDDSLELQGLLEDERLASAQQAEVFTKQIQQLQGELRSLREEISLLEHEKESELKEIEQELHLAQAEIQSLRQAAEDSATEHESDIASLQEDLCRMQNELEDMERIRGDYEMEIASLRAEMEMKSSEPSGSLGLSDYSGLQEELQELRERYHFLNEEYRALQESNSSLTGQLADLESERTQRATERWLQSQTLSMTSAESQTSEMDFLEPDPEMQLLRQQLRDAEEQMHGMKNKCQELCCELEELQHHRQVSEEEQRRLQRELKCAQNEVLRFQTSHSVTQNEELKSRLCTLQKKYDTSQDEQNELLKMQLQLQTELRQLKVMKSTLVENQSEKELLCRLQKLHLQHQNVTCEKEKLLERQQQLQEELQCHEAELQHLRDTVASFKESNEKDTETHAQLQEMKQLYQASKDELERQKHMYDQLEQDLLLCQLELKELKASHPIPEDKGKCANKCDTLLSRLTELQEKYKASQKEMGQLQMEQCELLEDQRRMQEEQGQLQEELHRLTLPLPKSGLLLKSQELLTKLEDLCELQLLYQGMQEEQKKLIQNQDCVLKEQLEIHEELRRFKESHFQEVLENPDDSKLAKSSKCNRNKQSKLLMEQMQALQVMYDAGQAKQELLQQEQGRLLEERKRLQADLQLCLEEMQLLQVQSPSIKMSLESYGKSYGSMVPSNENCRKTYDTTVDDNESYYKSYTSTQTSSKSFLKSYDSSTSASEAYGKSYCTTSNSSITYKKSYGSTSSSDTCQKSFVSSCTDEEPAEPEDMERFEEMVVKVLIKLQAVQAMYQISQEEHSQLQEQMEKLLAKQKDLKEELDACEREFKECMECLEKPMAPQNDKNEIKELQTKLRELQLQYQASMDEQGRLLVVQEQLEGQLQCCQEELRQLREKRPSVVKEARGKNANKNMNKNANGVKMKKVTKPCSDTSESDLETRKSLEVVLYYKASQRKLDGLAKEEEKKEEMEEEKKQVKEEAKEQCGDELVAEPADPEEAKSTEDQEENEEDKEEEEKEEDSEEEEDDADSSLESPEENNPLRLSESKKSSPTPNPPIFSLPLVGLVVISALLWCWWAETSS

SEQ ID NO: 212946 - protein, 102 aa, Artificial Sequence
  derived and/or modified sequence
MQAMEGEVLLPALYEEEEEEEEEEEEVEEEEEQVQKGGSVGSLSVNKHRGLSLTETELEELRAQVLQLVAELEETRELAGQHEDDSLELQGLLEDERLASAQ

SEQ ID NO: 212947 - protein, 137 aa, Artificial Sequence
  derived and/or modified sequence
MQAMEGEVLLPALYEEEEEEEEEEEEVEEEEEQVQKGGSVGSLSVNKHRGLSLTETELEELRAQVLQLVAELEETRELAGQHEDDSLELQGLLEDERLASAQQAEVFTKQIQQLQGELRSLREEISLLEHEKESELK

SEQ ID NO: 212948 - DNA, 3465 bp, Artificial Sequence
  derived and/or modified sequence
atgcaagctatggagggagaagtgttactgccagccctgtacgaagaggaagaagaggaggaggaagaggaagaggaagttgaagaagaggaggagcaggtgcagaaaggggggagtgttggctccctcagcgtgaacaaacatcgtggactttctctgaccgaaaccgaattggaagagctaagggcacaggtgctgcagctggttgcggagctcgaagagacgagagagcttgcagggcagcacgaggatgattctctcgagctgcagggcctgctggaggacgagcggctggcgtctgcacaacaggccgaagtattcactaaacagatccagcagttgcagggagaacttaggtccctgcgggaggagatttcccttttagaacatgaaaaggaaagcgaactcaaggagatagaacaggaacttcacctggcgcaggccgagatacagtcacttagacaggccgcagaagactccgctacagaacatgagagtgacattgcctccctacaggaggatctctgtcgaatgcaaaacgaactcgaagatatggagaggatcaggggagactacgaaatggagattgcttctctgcgcgccgaaatggagatgaaatccagcgagcccagtggaagtctgggactgagcgactattccggacttcaagaggagctgcaggaattacgggaaaggtaccatttccttaatgaggaataccgagctctgcaagagagcaattcttccctgaccgggcagttggcagacctagaatcagagagaacccaaagggcaaccgagaggtggcttcagtcccagaccctgtcaatgacctcagccgagagtcagacatcagagatggatttcttggagcccgacccagagatgcagctgctgcggcaacagctgagagacgctgaggagcaaatgcatggaatgaaaaacaaatgtcaagaattgtgctgtgaactggaggagctgcagcaccataggcaagtgtctgaagaggagcaacgtcgcctacagcgggaactgaagtgtgctcaaaatgaagtcctccgctttcagacttcccatagcgtgacccagaatgaggaacttaaaagcagactgtgcacgcttcaaaagaaatacgacacatctcaggatgagcagaacgagctgctcaaaatgcagctccagctgcagacagaactaaggcagctcaaagtgatgaaaagcactcttgtagagaaccagagcgaaaaagagttactctgtcgtctgcagaaactacatctacagcaccaaaacgtaacctgcgagaaagagaagttactggaaaggcagcagcaattgcaggaggagctgcaatgtcacgaagcagaacttcaacacttacgagatacagtcgcttcattcaaggaatctaacgagaaagataccgaaacgcacgctcaacttcaggaaatgaaacagctatatcaggcatccaaagacgaactcgagagacagaaacacatgtacgaccaattagaacaggatctgctgctttgtcagcttgagctgaaagagctgaaagcaagtcacccgattccagaggacaagggtaaatgtgcgaacaagtgcgacacccttttatctcggcttaccgagctacaggaaaaatataaagcctcccagaaagagatgggacagcttcagatggagcagtgtgaacttctggaggatcagagacgaatgcaagaagaacagggacaactacaggaagagctccatcggttgaccctacctctgcccaagtccggactgctcctcaaatcccaagagctgctaaccaagttagaagatttgtgcgagctgcagctgctgtatcaaggcatgcaggaggaacagaagaagcttatccagaatcaagattgtgtgctgaaggagcagctggagatccatgaagagctaagaagatttaaggagtcccacttccaagaggtgctggaaaaccccgacgatagtaagctggccaaaagcagcaagtgcaaccgtaataagcagagcaagctgctgatggagcagatgcaggccctacaggtaatgtatgacgcggggcaagctaagcaagagttactgcagcaggaacaaggccgtcttctagaagagagaaagaggttacaagccgacctgcagctctgtctggaggagatgcagctcctccaagttcagagcccgtccattaaaatgagtctggaaagctacgggaaatcttatgggtctatggtgccatcaaacgaaaactgtaggaagacctacgatactacagtggatgacaatgagtcctactataagtcctacacatccactcaaactagctccaagagtttcctgaagtcttatgactcgtccacgagcgctagcgaggcttatggcaagagctattgtaccacctctaactctagtatcacttataagaagagctatggctctacgtcaagcagtgatacatgtcaaaaaagctttgtctcttcctgcactgacgaggagcccgctgaaccagaggatatggaacgcttcgaggaaatggtcgtgaaagtcctgatcaaactccaggctgtgcaagctatgtatcagatttcacaggaggagcactcgcagcttcaggagcagatggagaaactcctagctaaacagaaggatctgaaagaggagctcgacgcatgcgaaagagagtttaaagaatgcatggagtgcctggagaagccaatggctccacagaacgacaagaacgaaatcaaggaactccagacaaaactccgggagttacagttacagtaccaggcctccatggacgagcagggcaggctgctcgtggtccaggagcagctggagggccagcttcagtgttgtcaagaggaactgcgccaactgcgtgagaagcgaccgagtgttgttaaagaggctcggggcaaaaatgcgaacaagaatatgaataagaatgccaatggggttaaaatgaaaaaagtaactaagccttgtagcgatacatcagagagtgacctggaaacccggaaatctctggaggtagtcctttactataaggctagccagaggaaattggatggccttgcaaaggaggaggagaagaaagaagaaatggaggaagagaagaaacaggtgaaagaggaagcaaaggagcagtgtggcgacgaactggtagcggagcccgccgatcctgaggaagccaaatctacagaagaccaagaagaaaatgaagaggataaggaggaggaagagaaagaggaggacagcgaggaggaggaggatgacgcagatagctccctcgagtcacccgaggagaataatccactgcggctcagcgagagcaagaaatcctcaccgacacccaatccccctattttttccctcccgctcgtcgggttagtggtgatctccgccttgctttggtgttggtgggccgagacaagttcatag

SEQ ID NO: 212949 - DNA, 3465 bp, Artificial Sequence
  derived and/or modified sequence
atgcaggccatggagggggaggtgctgctgcctgccctgtatgaggaggaggaggaggaggaggaggaggaggaggaggtggaggaggaggaggagcaggtgcagaagggcggctctgtgggcagcctgtctgtgaacaagcaccggggcctgagcctgacagaaacagagctggaggagctgcgggcccaggtgctgcagctggtggccgagctggaggagacccgggagctggccggccagcatgaagatgacagcctggagctgcagggcctgctggaggatgagcggctggccagcgcccagcaggccgaggtgttcaccaagcagatccagcagctgcagggcgagctgcggagcctgcgggaggagatcagcctgctggagcacgagaaggagagcgagctgaaggagattgagcaggagctgcacctggcccaggccgagatccagagcctgcggcaggccgctgaggacagcgccacagagcacgagagtgacatcgccagcctgcaggaggacctgtgcaggatgcagaatgagctggaggacatggagcgcatccggggggactatgagatggagatcgccagcctgcgggcagagatggagatgaagagcagcgagcccagcggcagcctgggcctgagtgactacagcggcctgcaggaggagctgcaggagctgcgggagcgctaccacttcctgaatgaggagtaccgggccctgcaggagagcaacagcagcctgaccggccagctggccgacctggagagcgagaggacccagagggccacagagcgctggctgcagagccagaccctgtccatgaccagcgctgagagccagaccagcgagatggacttcctggagccagaccctgagatgcagctgctgcggcagcagctgagagatgctgaggagcagatgcacggcatgaagaacaagtgccaggagctgtgctgtgagctggaggagctgcagcaccaccggcaggtgtctgaggaggagcagaggcggctgcagcgggagctgaagtgtgcccagaatgaggtgctgcgcttccagaccagccacagcgtgacccagaatgaggagctgaagagccggctgtgcaccctgcagaagaagtatgacaccagccaggatgagcagaatgagctgctgaagatgcagctgcagctgcagacagagctgcggcagctgaaggtgatgaagagcaccctggtggagaaccagagcgagaaggagctgctgtgccgcctgcagaagctgcacctgcagcaccagaatgtgacctgtgagaaggagaagctgctggagcggcagcagcagctgcaggaggagctgcagtgccatgaagctgagctgcagcacctgcgggacacagtggccagcttcaaggagagcaatgagaaggacacagagacccacgcccagctgcaggagatgaagcagctgtaccaggccagcaaggatgagctggagcggcagaagcacatgtatgaccagctggagcaggacctgctgctgtgccagctggagctgaaggagctgaaggccagccaccccatcccagaagataaaggaaaatgtgccaacaagtgtgacaccctgctgagccggctgacagagctgcaggagaagtacaaggccagccagaaggagatgggccagctgcagatggagcagtgtgagctgctggaggaccagaggaggatgcaggaggagcagggccagctgcaggaggagctgcaccggctgaccctgcccctgcccaagagcggcctgctgctgaagagccaggagctgctgaccaagctggaggacctgtgtgagctgcagctgctgtaccagggcatgcaggaggagcagaagaagctgatccagaaccaggactgtgtgctgaaggagcagctggagatccacgaggagctgcggcgcttcaaggagagccacttccaggaggtgctggagaacccagatgacagcaagctggccaagagcagcaagtgcaacagaaacaagcagagcaagctgctgatggagcagatgcaggccctgcaggtgatgtatgatgctggccaggccaagcaggagctgctgcagcaggagcagggccgcctgctggaggagaggaagaggctgcaggccgacctgcagctgtgcctggaggagatgcagctgctgcaggtgcagagccccagcatcaagatgagcctggagagctatggcaagagctatggctccatggtgcccagcaatgaaaactgcaggaagacctatgacaccaccgtggatgacaatgaaagctactacaagagctacaccagcacccagaccagcagcaagagcttcctgaagagctatgacagcagcaccagcgccagcgaggcctacggcaagagctactgcaccaccagcaacagcagcatcacctacaagaagagctatggcagcaccagcagcagtgacacctgccagaagagctttgtgagcagctgcacagatgaggagcctgctgagcctgaggacatggagagatttgaggagatggtggtgaaggtgctgatcaagctgcaggccgtgcaggccatgtaccagatcagccaggaggagcacagccagctgcaggagcagatggagaagctgctggccaagcagaaggacctgaaggaggagctggatgcctgtgagcgggagttcaaggagtgcatggagtgcctggagaagcccatggccccccagaatgacaagaatgagatcaaggagctgcagaccaagctgcgggagctgcagctgcagtaccaggcctccatggatgagcagggccgcctgctggtggtgcaggagcagctggagggccagctgcagtgctgccaggaggagctgcggcagctgcgggagaagaggccttctgtggtgaaggaggcccggggcaagaatgccaacaagaacatgaacaagaatgccaacggggtgaagatgaagaaggtgaccaagccctgcagcgacaccagcgagagtgacctggagaccaggaagagcctggaggtggtgctgtactacaaggccagccagaggaagctggatggcctggccaaggaggaggagaagaaggaggagatggaggaggagaagaagcaggtgaaggaggaggccaaggagcagtgtggagatgagctggtggccgagcctgctgaccctgaggaggccaagagcacagaggaccaggaggagaatgaggaggacaaggaggaggaggagaaggaggaggacagcgaggaggaggaggatgatgctgacagcagcctggagagccctgaggagaacaaccccctgcggctgtctgagagcaagaagagcagccccacccccaacccccccatcttcagcctgcccctggtgggcctggtggtgatcagcgccctgctgtggtgctggtgggccgagaccagcagctag

SEQ ID NO: 212950 - DNA, 3465 bp, Artificial Sequence
  derived and/or modified sequence
atgcaggccatggagggcgaggtgctgctgcccgccctgtacgaggaagaagaagaagaggaggaagaggaagaggaagttgaagaagaggaggaacaagtgcagaaggggggctcagttggttcgctgtccgtgaacaagcataggggactgtcgttaaccgaaaccgagttggaagagcttagggcccaggtattacagctggtagcagagctggaagagactagagaacttgctggccaacacgaggacgattctctagagctgcaaggcttgttagaggatgagaggctggcgtccgcccaacaagccgaggtgtttacaaaacagatccagcaacttcagggcgaactgagaagcctgagagaagaaatttccctgttagaacacgaaaaagaatctgaattaaaggaaattgaacaagagctgcacctggcccaggcagaaatccaatctttacggcaggcagctgaggactcagccaccgaacatgagtccgacatcgcttccctgcaggaagacctgtgtcggatgcagaatgaactggaggatatggagagaatcagaggcgattatgagatggaaatcgcaagcctccgagccgaaatggagatgaagagtagcgagcccagcggaagcctgggcctgagtgattattccgggttacaggaagaactgcaggagctgcgtgaacgctatcatttcctcaatgaggaataccgggcgttgcaggagtctaactcaagtttaaccgggcagttagccgacctcgagtccgagaggacccagagagcaaccgagcggtggctgcaatctcagactctgtctatgacctcggctgagtcccagacatctgagatggattttctcgagccagatcccgaaatgcagctactgcggcagcagctgcgagacgctgaagaacagatgcatggcatgaagaataagtgccaagagctgtgttgtgaacttgaggagcttcaacatcaccggcaagtatctgaagaagaacagcggcggcttcagcgggagctgaaatgcgcccaaaacgaggttctacggttccaaacatcccactccgtcacgcagaacgaagagttaaaatcaaggttgtgcacattgcagaagaagtacgatacctctcaggatgaacagaatgagcttttgaagatgcagctgcagttgcagaccgagctgagacagctgaaggttatgaagagtactcttgtggagaaccaatccgagaaagagctcctctgtcgtctgcaaaagctgcacctccagcaccagaatgtgacatgcgagaaggagaaactactagagcgacagcagcagctgcaggaggaattacaatgtcacgaagctgaactacaacacctgagggacaccgtggcctctttcaaagaatccaacgaaaaggataccgagacccacgctcagctgcaagaaatgaaacagttatatcaggcttccaaggacgagctggagagacaaaagcacatgtacgaccagttggagcaagacctgctcctctgccagctcgagctcaaggagctgaaggcttcccatcctatccccgaggataaagggaagtgtgcaaataaatgcgacactctgctgagccggttgactgaactgcaggagaagtacaaagcatcacagaaggagatgggacagctgcagatggaacaatgcgaactcctggaggaccagaggaggatgcaggaggagcagggccagctgcaggaagagctgcatcgcctgacactgcccctcccaaagtccggcctgttgttaaagagccaggaattactgacaaagctcgaggatctctgcgagctgcagctgctgtaccagggcatgcaagaggagcagaagaaattgattcaaaaccaggattgtgttttgaaggaacaactggaaatccacgaagagctccgacggttcaaagagtcacattttcaagaggtgctggaaaatccagacgacagcaagctggcaaaatcttccaagtgcaaccgaaacaaacaaagtaagctgctgatggaacagatgcaggcattgcaggtgatgtacgatgccggccaagccaagcaggagctgttgcaacaggagcaaggtagactcttagaggaacggaagcgccttcaggctgatctgcaactctgtttagaggaaatgcaattgctgcaggtgcagtcccctagcattaagatgtcccttgagagttacggaaagagttatggcagtatggtcccctccaacgagaattgtagaaaaacctacgatacaaccgttgatgataacgagagctactacaagtcctacacgagcacccagacctcatctaagagcttcctgaagagctatgattctagcacctctgcttccgaggcctatggaaaatcctactgcactaccagtaatagttctatcacttacaaaaagagttacggtagtacatcctcttctgatacctgtcagaagtctttcgtcagctcatgtacagatgaagaaccagccgaaccagaggatatggaaaggttcgaggagatggtagtcaaggtgctgatcaagctgcaggcagtccaggcaatgtatcagatcagtcaggaggagcatagtcagttacaagagcagatggaaaaactgctggcgaagcagaaggatttgaaggaagagcttgacgcttgtgagcgtgaattcaaggaatgcatggaatgtctggaaaaaccaatggccccccagaatgataagaatgagatcaaggaactccagaccaaacttagggagctgcagctccagtaccaggcttccatggacgagcagggtcgattactggtggtccaagaacagctggagggtcagttgcagtgctgtcaggaggaactaagacagctccgggaaaagagaccttcagtcgtcaaagaggcaagaggaaagaatgcaaataagaatatgaacaagaatgctaatggagtgaagatgaagaaggtcaccaaaccctgttctgatacctccgagtctgacctagagacgaggaagtccctggaagttgtattgtactacaaggcaagccagcggaagctggatggtctggctaaggaggaggaaaaaaaagaggaaatggaagaagagaagaagcaggtgaaggaagaagcaaaagagcaatgcggggacgagttagtggctgagcctgcggaccctgaggaagcgaaatctacagaagaccaggaagaaaatgaagaagacaaagaggaggaggagaaggaggaagattccgaagaagaagaggacgatgccgactcatctttggagagcccagaggagaacaatcctttaaggctttccgagtcgaaaaagagctcccccactccaaacccacccatattctccctgcctctggtgggacttgtggtcatatctgccctgttgtggtgttggtgggccgaaaccagcagctag

SEQ ID NO: 212951 - DNA, 3465 bp, Artificial Sequence
  derived and/or modified sequence
atgcaggctatggagggagaggtcttactccccgcattgtacgaagaagaagaagaagaggaagaagaggaggaggaggtcgaggaagaggaagagcaagtgcagaagggtgggagcgttggcagcctgtctgtgaataaacacagaggcctgtccctgactgagacagaactagaagaacttcgagcacaggttcttcagctcgtcgctgagctcgaggagaccagggagcttgctgggcagcacgaagatgattccctcgaactgcagggcctcttggaggatgaacgcctcgcgtctgctcaacaggcggaggtcttcactaaacagattcaacagctacagggcgagctgcgctcccttcgtgaagagatttcgctgctggagcacgagaaagagtccgaactgaaggaaatcgaacaggaattacacctagcacaggctgagattcagtctctgaggcaggctgctgaggactctgccacggaacatgagtcagacatcgcaagtctacaagaggacctttgccgcatgcagaatgagctggaggatatggaaaggatccgtggggattatgaaatggaaatagcgagcttgcgggcagaaatggaaatgaagtcttcggagccgtcaggctctttggggcttagcgactactcaggccttcaagaggaattgcaggagttgcgggagcgttaccatttccttaacgaggaatatcgtgccctacaggagtcgaatagctccctgacaggacagcttgcagacctggaaagcgaacgcacacagcgcgcaacggaaaggtggctacagagccagacgctgagcatgacttctgccgagtcccaaacaagcgagatggattttttagagcctgaccccgagatgcagctcctgcggcaacagttgagggacgcagaggaacagatgcacggcatgaaaaacaagtgccaagagctgtgctgcgaactggaggagctccagcaccatcgccaggtctcagaggaggaacagcgaagacttcagagggagctgaagtgtgcccaaaatgaagtattacgtttccagacaagccattccgtgacccagaacgaggaacttaaaagccggctttgcaccctgcagaagaaatacgatacttctcaggacgaacagaacgaactcttgaagatgcagctgcagctacagacagaacttcgacagctgaaggtcatgaaaagcactctggttgagaaccagtctgaaaaagagcttctgtgtcgtttgcagaaactgcaccttcaacaccagaatgtgacatgcgaaaaggaaaaactgctggaaagacaacagcagcttcaggaggagctacagtgccatgaggccgagctgcagcacctgagggatacggttgcctctttcaaggaatcaaatgagaaggacacagagacgcatgctcaactacaggagatgaagcagctttaccaggcatccaaagacgagctcgagagacagaaacatatgtatgatcagctggagcaggatctgctcctgtgccagctcgagctcaaggagctgaaggcctctcatcccatccctgaggataaaggcaagtgcgcgaataaatgtgataccctgctgagccgcttgacggaactgcaggaaaagtacaaagcatctcagaaagaaatgggccagttacagatggaacagtgcgaattactggaggatcagcgacggatgcaggaggaacaggggcaactccaggaggaattgcacaggttgactctgcctctgcctaagagcggcctgctgctgaagagtcaggagctgctgaccaaactggaagatctgtgcgagttacagctgctgtatcagggcatgcaggaggaacagaaaaagctgatccaaaatcaggattgcgttctcaaggaacagctcgaaatccacgaggaactgcggaggttcaaggagtcgcatttccaggaggtgctggagaatccagacgattcaaaattagcgaaatcttcaaagtgcaatcgtaacaagcagtccaaattactcatggagcagatgcaagccttgcaggtaatgtatgacgctgggcaggccaaacaagagctactccagcaggaacagggaaggcttctcgaagagaggaaaagattgcaggccgacttgcaactctgtctggaagagatgcaattgctgcaggtgcagagtccaagtatcaagatgtcattggaatcatacggtaaaagttacggttcaatggtccctagtaatgaaaactgcagaaagacatacgacactacggttgatgacaacgaatcctactacaaatcctatacgagcactcaaactagctctaaatctttcttgaagtcgtacgattccagcacatctgcatccgaggcgtacggcaaaagctattgtactacctccaattcctcgatcacatacaagaagagttacgggagcacgtcctcaagtgatacttgccaaaaatcttttgtctctagttgtactgatgaggaaccagctgagccagaggacatggagcgcttcgaggaaatggtcgtaaaagtcttgatcaagctacaggcagtgcaggcaatgtaccagatatctcaggaagaacatagccagctccaggaacaaatggagaaactattggctaagcaaaaagacctgaaagaggagcttgacgcttgtgagcgagagttcaaggagtgtatggagtgtcttgaaaaacccatggcgcctcaaaacgataaaaacgagattaaagaactccagaccaagctccgcgaactacaattgcagtaccaggccagtatggatgaacagggccgactcctggtggttcaagagcagcttgaagggcagctccaatgttgccaggaagaattgcgccagcttcgggagaagagacccagcgtggtcaaggaagcgaggggcaagaatgcgaacaaaaacatgaataagaatgcaaacggcgtaaagatgaaaaaagtgactaagccctgttctgacaccagtgagtctgatctggagacaaggaagagcctcgaagttgtgctatactacaaggcctcacaaagaaaactggatgggttagccaaggaagaagagaagaaagaggaaatggaagaggaaaagaaacaggtcaaagaagaagccaaggaacagtgcggagacgaattggtcgcggagcccgcagatcctgaagaggctaagtcaactgaagatcaggaggaaaatgaagaggataaggaagaagaagaaaaagaggaagactctgaggaagaggaagatgacgcggattcatctctggagagccctgaggagaacaatcccctcagactctcggaaagtaagaagtccagtcctaccccaaatcctcctatcttttcattgccattggttgggcttgtggttattagtgctctactgtggtgctggtgggctgaaacaagctcttag

SEQ ID NO: 212952 - DNA, 4169 bp, Artificial Sequence
  derived and/or modified sequence
ccctgtccccccggactaaatacgcacaccccctctttctttctgtgcaagcaagagggtcctggaacagcgggttctgaggaggctgggaggcagggctgagaggtggccgagagagaggagtcgcagagccgccagagtgagtcaggcacctccactgggattacagatcccagagcctcgaggagctggaagacatgtccccttctttcctctgcaccccagcccgcagccagccccccaccccccagcccctcctttctccctgctctcaggacccacagtgaccactctaggctcctatgaggcttccgagggctgtgagaggaagaagggccaacgctgggggtccctggaacgacgggggatgcaagctatggagggggaggtgttactcccagctctctatgaggaggaagaggaagaggaagaggaggaagaagaggtggaagaagaagaagaacaagtgcagaaaggtggcagtgttggctctctgtcagtcaacaagcaccggggactgagcctcacggagacagagctggaggagctgcgggctcaggtgctgcagctggtggcagaactggaggagacccgggaactggcagggcagcatgaggatgactccttggagctacaggggctcctggaggatgaacggctagccagcgcccagcaggcagaggtgttcaccaagcagatccagcagctccaaggtgagctgcgttctctacgggaggagatttccctgttagagcatgagaaagaaagcgaacttaaggaaatagaacaggaattgcatttggcccaggctgagatccagagtctgcggcaagcagcagaggattccgcaactgaacatgagagtgacatagcatccctgcaggaggatctctgccggatgcagaatgaacttgaagacatggaacgcattcggggagattatgagatggagatcgcctccctccgtgcagaaatggaaatgaagagctctgaaccatccggtagtttaggtctctcagattactctgggttacaagaagaactgcaggagctgcgggaacgctaccatttcctgaatgaggaataccgggccctgcaggagagcaacagcagcctcacggggcagcttgcagatctggagagtgagaggacacagagagcaacagagagatggctgcagtcccaaacactgagtatgacgtcagcagagtctcagacttcagaaatggatttcttagagcctgatcctgaaatgcagttgttacggcagcagctacgggatgctgaagagcagatgcatggcatgaagaacaagtgtcaggaattgtgttgtgagttggaagagctacagcatcatcgccaggtcagtgaggaggagcagaggcggctgcagagggagctcaagtgtgctcagaatgaggtgcttcggtttcagacctcccacagtgtcacccagaatgaggagctgaagtccagactctgtaccctgcagaaaaaatatgatactagccaggatgagcagaacgagctcttgaagatgcagctgcaacttcagactgagctccggcagctcaaagtcatgaaatccacacttgtagaaaaccagagtgagaaggagttactgtgccggctgcagaagctgcacctccagcaccagaacgtcacatgtgagaaggaaaagctgctggaacggcagcagcagctgcaggaggagctgcagtgccatgaggcagagctgcagcacctcagggatacggtggcctccttcaaagagagcaatgagaaggacacagagacgcacgctcagcttcaggagatgaagcagctgtaccaggccagcaaggacgagctggagcggcagaagcacatgtatgaccagctggagcaggacctcctgctctgccagctggagctgaaagagctcaaggcctcccaccccattccggaggacaaaggaaagtgtgctaataagtgtgacacactgctgtccagactgacagaattgcaggaaaagtacaaggccagccagaaggagatggggcagctgcagatggagcagtgtgagctcctggaggatcagaggaggatgcaggaggagcagggccagctgcaggaagagctgcacaggctcacactgccactgccaaagagtggcctcttactcaagagtcaggagctactcaccaagttagaagacctgtgtgagctgcagctgctctaccaaggcatgcaggaggaacagaagaagctgatacagaaccaagactgtgtattaaaagaacaattagagatccacgaagagctgcgacgtttcaaagagtctcatttccaggaagtgttggagaatcccgatgattccaaattggctaagtcctccaaatgtaatcgaaacaagcaatccaagctgctcatggagcagatgcaggccctgcaggtgatgtatgacgccggtcaggcgaagcaggagctcttgcagcaagagcaagggaggctcctagaggagcggaagaggctgcaggcagacttgcagctctgcctggaagaaatgcagctgcttcaagtccagtccccttctataaaaatgagccttgagtcctacgggaagagctatggtagcatggtccccagcaatgagaactgtcgcaagacttatgataccactgtggatgacaatgagagctattacaagagttacaccagcacccagaccagcagcaagagctttctcaagagctatgacagcagcaccagtgccagtgaggcctatgggaagagttactgcactaccagcaacagcagcattacctataagaagagttacggcagcaccagtagctctgacacctgccagaagagttttgtcagcagctgcactgacgaggaacctgctgagcctgaagacatggagcgctttgaggaaatggttgtgaaagtgctgatcaagctgcaggcggtgcaggccatgtaccagataagccaggaggaacacagccagctgcaagagcagatggaaaagttactggccaagcagaaagacctgaaggaagagctggatgcctgtgaaagggagttcaaggagtgcatggaatgccttgaaaagcccatggccccccagaacgacaagaatgagatcaaagaactgcagaccaagctgcgggagctgcagctgcaataccaggctagcatggatgagcaggggcggcttctggtagtgcaggagcagctggaggggcagctgcagtgctgccaggaggagctccgccagctcagggagaagaggccttctgttgtcaaagaagcccgggggaagaatgctaataagaacatgaacaagaatgccaatggggttaaaatgaaaaaggtgaccaagccatgctcggatacttctgagagcgaccttgagaccagaaagagtctggaggtagtgctgtactacaaggccagccagaggaaattagatggactagcaaaagaggaggaaaagaaagaggagatggaggaggaaaaaaagcaagtgaaagaggaagcaaaggagcagtgtggggatgagctagttgctgagccagcagatcctgaggaagctaaatccacagaagatcaggaggaaaatgaagaggacaaagaggaagaggagaaggaagaagacagtgaagaggaggaggatgacgccgactcttcccttgaaagtcccgaagaaaataaccccctcagactttccgagagcaaaaagtcatcccctacccccaatccccccatcttctccttgcctcttgtaggcctggtggtcatctcggctttgctctggtgctggtgggctgagacgtcgtcctaatgcagaacatgtttgggttgtggaagcctatggtattcttggctattgcagctgtggctctgtatgtgttacccaacatgcgacagcaggagtcagagttctgcctcatggagtgatggcagaccttggccagcgcgagggcagatccccagtggccaccaccctcagctttgggcaggacacactgtgccagaaccctccccatatgttccatgtgtccccatctcctcagcctcagtcacccaggctgaaaaggcttgtggggagcggctgacttccatctcctgccttgtgtaagaacctgagttccttgtaattaaatatcaactgaattaca

SEQ ID NO: 212953 - DNA, 3465 bp, Artificial Sequence
  derived and/or modified sequence
atgcaggccatggagggcgaggtgctgctgcccgccctgtacgaggaggaggaggaggaggaggaggaggaggaggaggtggaggaggaggaggagcaggtgcagaagggcggcagcgtgggcagcctgagcgtgaacaagcacagaggcctgagcctgaccgagaccgagctggaggagctgagagcccaggtgctgcagctggtggccgagctggaggagaccagagagctggccggccagcacgaggacgacagcctggagctgcagggcctgctggaggacgagagactggccagcgcccagcaggccgaggtgttcaccaagcagatccagcagctgcagggcgagctgagaagcctgagagaggagatcagcctgctggagcacgagaaggagagcgagctgaaggagatcgagcaggagctgcacctggcccaggccgagatccagagcctgagacaggccgccgaggacagcgccaccgagcacgagagcgacatcgccagcctgcaggaggacctgtgcagaatgcagaacgagctggaggacatggagagaatcagaggcgactacgagatggagatcgccagcctgagagccgagatggagatgaagagcagcgagcccagcggcagcctgggcctgagcgactacagcggcctgcaggaggagctgcaggagctgagagagagataccacttcctgaacgaggagtacagagccctgcaggagagcaacagcagcctgaccggccagctggccgacctggagagcgagagaacccagagagccaccgagagatggctgcagagccagaccctgagcatgaccagcgccgagagccagaccagcgagatggacttcctggagcccgaccccgagatgcagctgctgagacagcagctgagagacgccgaggagcagatgcacggcatgaagaacaagtgccaggagctgtgctgcgagctggaggagctgcagcaccacagacaggtgagcgaggaggagcagagaagactgcagagagagctgaagtgcgcccagaacgaggtgctgagattccagaccagccacagcgtgacccagaacgaggagctgaagagcagactgtgcaccctgcagaagaagtacgacaccagccaggacgagcagaacgagctgctgaagatgcagctgcagctgcagaccgagctgagacagctgaaggtgatgaagagcaccctggtggagaaccagagcgagaaggagctgctgtgcagactgcagaagctgcacctgcagcaccagaacgtgacctgcgagaaggagaagctgctggagagacagcagcagctgcaggaggagctgcagtgccacgaggccgagctgcagcacctgagagacaccgtggccagcttcaaggagagcaacgagaaggacaccgagacccacgcccagctgcaggagatgaagcagctgtaccaggccagcaaggacgagctggagagacagaagcacatgtacgaccagctggagcaggacctgctgctgtgccagctggagctgaaggagctgaaggccagccaccccatccccgaggacaagggcaagtgcgccaacaagtgcgacaccctgctgagcagactgaccgagctgcaggagaagtacaaggccagccagaaggagatgggccagctgcagatggagcagtgcgagctgctggaggaccagagaagaatgcaggaggagcagggccagctgcaggaggagctgcacagactgaccctgcccctgcccaagagcggcctgctgctgaagagccaggagctgctgaccaagctggaggacctgtgcgagctgcagctgctgtaccagggcatgcaggaggagcagaagaagctgatccagaaccaggactgcgtgctgaaggagcagctggagatccacgaggagctgagaagattcaaggagagccacttccaggaggtgctggagaaccccgacgacagcaagctggccaagagcagcaagtgcaacagaaacaagcagagcaagctgctgatggagcagatgcaggccctgcaggtgatgtacgacgccggccaggccaagcaggagctgctgcagcaggagcagggcagactgctggaggagagaaagagactgcaggccgacctgcagctgtgcctggaggagatgcagctgctgcaggtgcagagccccagcatcaagatgagcctggagagctacggcaagagctacggcagcatggtgcccagcaacgagaactgcagaaagacctacgacaccaccgtggacgacaacgagagctactacaagagctacaccagcacccagaccagcagcaagagcttcctgaagagctacgacagcagcaccagcgccagcgaggcctacggcaagagctactgcaccaccagcaacagcagcatcacctacaagaagagctacggcagcaccagcagcagcgacacctgccagaagagcttcgtgagcagctgcaccgacgaggagcccgccgagcccgaggacatggagagattcgaggagatggtggtgaaggtgctgatcaagctgcaggccgtgcaggccatgtaccagatcagccaggaggagcacagccagctgcaggagcagatggagaagctgctggccaagcagaaggacctgaaggaggagctggacgcctgcgagagagagttcaaggagtgcatggagtgcctggagaagcccatggccccccagaacgacaagaacgagatcaaggagctgcagaccaagctgagagagctgcagctgcagtaccaggccagcatggacgagcagggcagactgctggtggtgcaggagcagctggagggccagctgcagtgctgccaggaggagctgagacagctgagagagaagagacccagcgtggtgaaggaggccagaggcaagaacgccaacaagaacatgaacaagaacgccaacggcgtgaagatgaagaaggtgaccaagccctgcagcgacaccagcgagagcgacctggagaccagaaagagcctggaggtggtgctgtactacaaggccagccagagaaagctggacggcctggccaaggaggaggagaagaaggaggagatggaggaggagaagaagcaggtgaaggaggaggccaaggagcagtgcggcgacgagctggtggccgagcccgccgaccccgaggaggccaagagcaccgaggaccaggaggagaacgaggaggacaaggaggaggaggagaaggaggaggacagcgaggaggaggaggacgacgccgacagcagcctggagagccccgaggagaacaaccccctgagactgagcgagagcaagaagagcagccccacccccaacccccccatcttcagcctgcccctggtgggcctggtggtgatcagcgccctgctgtggtgctggtgggccgagaccagcagctag

SEQ ID NO: 212954 - protein, 369 aa, Artificial Sequence
  derived and/or modified sequence
MRCSQCRVAKYCSAKCQKKAWPDHKRECKCLKSCKPRYPPDSVRLLGRVVFKLMDGAPSESEKLYSFYDLESNINKLTEDKKEGLRQLVMTFQHFMREEIQDASQLPPAFDLFEAFAKVICNSFTICNAEMQEVGVGLYPSISLLNHSCDPNCSIVFNGPHLLLRAVRDIEVGEELTICYLDMLMTSEERRKQLRDQYCFECDCFRCQTQDKDADMLTGDEQVWKEVQESLKKIEELKAHWKWEQVLAMCQAIISSNSERLPDINIYQLKVLDCAMDACINLGLLEEALFYGTRTMEPYRIFFPGSHPVRGVQVMKVGKLQLHQGMFPQAMKNLRLAFDIMRVTHGREHSLIEDLILLLEECDANIRAS

SEQ ID NO: 212955 - DNA, 396 bp, Artificial Sequence
  derived and/or modified sequence
atgagatgcagccagtgcagagtggccaagtactgcagcgccaagtgccagaagaaggcctggcccgaccacaagagagagtgcaagtgcctgaagagctgcaagcccagatacccccccgacagcgtgagactgctgggcagagtggtgttcaagctgatggacggcgcccccagcgagagcgagaagctgtacagcttctacgacctggagagcaacatcaacaagctgaccgaggacaagaaggagggcctgagacagctggtgatgaccttccagcacttcatgagagaggagatccaggacgccagccagctgccccccgccttcgacctgttcgaggccttcgccaaggtgatctgcaacagcttcaccatctgcaacgccgagatgtag

SEQ ID NO: 212956 - DNA, 225 bp, Artificial Sequence
  derived and/or modified sequence
atgagatgcagccagtgcagagtggccaagtactgcagcgccaagtgccagaagaaggcctggcccgaccacaagagagagtgcaagtgcctgaagagctgcaagcccagatacccccccgacagcgtgagactgctgggcagagtggtgttcaagctgatggacggcgcccccagcgagagcgagaagctgtacagcttctacgacctggagagcaacatctag

SEQ ID NO: 212957 - DNA, 1110 bp, Artificial Sequence
  derived and/or modified sequence
atgagatgcagccagtgcagagtggccaagtactgcagcgccaagtgccagaagaaggcctggcccgaccacaagagagagtgcaagtgcctgaagagctgcaagcccagatacccccccgacagcgtgagactgctgggcagagtggtgttcaagctgatggacggcgcccccagcgagagcgagaagctgtacagcttctacgacctggagagcaacatcaacaagctgaccgaggacaagaaggagggcctgagacagctggtgatgaccttccagcacttcatgagagaggagatccaggacgccagccagctgccccccgccttcgacctgttcgaggccttcgccaaggtgatctgcaacagcttcaccatctgcaacgccgagatgcaggaggtgggcgtgggcctgtaccccagcatcagcctgctgaaccacagctgcgaccccaactgcagcatcgtgttcaacggcccccacctgctgctgagagccgtgagagacatcgaggtgggcgaggagctgaccatctgctacctggacatgctgatgaccagcgaggagagaagaaagcagctgagagaccagtactgcttcgagtgcgactgcttcagatgccagacccaggacaaggacgccgacatgctgaccggcgacgagcaggtgtggaaggaggtgcaggagagcctgaagaagatcgaggagctgaaggcccactggaagtgggagcaggtgctggccatgtgccaggccatcatcagcagcaacagcgagagactgcccgacatcaacatctaccagctgaaggtgctggactgcgccatggacgcctgcatcaacctgggcctgctggaggaggccctgttctacggcaccagaaccatggagccctacagaatcttcttccccggcagccaccccgtgagaggcgtgcaggtgatgaaggtgggcaagctgcagctgcaccagggcatgttcccccaggccatgaagaacctgagactggccttcgacatcatgagagtgacccacggcagagagcacagcctgatcgaggacctgatcctgctgctggaggagtgcgacgccaacatcagagccagctag

SEQ ID NO: 212958 - DNA, 396 bp, Artificial Sequence
  derived and/or modified sequence
atgcggtgctcacaatgtcgggtggccaagtattgttcagcgaaatgtcaaaaaaaagcctggcccgaccataaacgcgagtgtaaatgtttgaaatcttgcaagccccggtaccctccagatagtgtgaggctgctcggacgtgtggtgttcaagttaatggatggagcaccttcagaaagtgaaaaactgtacagcttctacgatcttgagtccaatattaacaagctcactgaggacaaaaaagaaggattgcgacagctggttatgacgtttcaacatttcatgcgagaagaaatccaagacgctagtcaactaccacccgcattcgaccttttcgaagcctttgctaaagtgatctgcaattccttcactatctgtaacgccgagatgtag

SEQ ID NO: 212959 - DNA, 225 bp, Artificial Sequence
  derived and/or modified sequence
atgagatgcagccagtgccgagtcgcaaaatattgctctgctaaatgtcagaagaaggcgtggcccgaccataaaagagaatgcaagtgcttaaagagttgtaagcctaggtatcccccagactctgtccgtctgctcggccgcgttgtgtttaaactcatggatggcgcaccatcagaatcagagaagttgtattctttctacgacctcgaaagtaacatttag

SEQ ID NO: 212960 - DNA, 1110 bp, Artificial Sequence
  derived and/or modified sequence
atgagatgctctcagtgccgagttgccaaatactgtagtgccaaatgccagaagaaagcttggccagatcataagcgggaatgcaagtgtttgaagtcttgtaaacctagatacccccccgactccgtccgcctgctggggagggtcgtttttaaactcatggacggcgccccctctgaaagcgaaaagctgtactccttctacgatctagagagcaacattaataagctgaccgaggacaagaaggaaggactcagacaactggtgatgacttttcagcacttcatgagagaagaaattcaggatgcctcgcagctgccacccgccttcgatctgtttgaggcatttgccaaggtaatttgtaactctttcacgatctgcaacgcggaaatgcaggaggtaggtgtaggcctgtatcccagcatttccctactcaatcactcgtgtgatcctaactgtagcattgtgtttaacgggccccatctgttactgagggccgtcagggacatcgaagtcggcgaggagctcactatttgctacctggacatgctgatgacatctgaagagcggcgaaagcagctccgcgaccagtattgtttcgaatgtgactgcttccggtgccaaacccaggataaggatgcagatatgcttactggagatgagcaagtctggaaagaagtgcaggagtccttgaaaaaaattgaagaattaaaggcacactggaagtgggagcaggtgttggcaatgtgtcaagcgatcatttcttctaacagtgaacgattacccgatattaatatctatcagttaaaggttctcgactgtgccatggacgcatgtattaatctggggctgctggaggaggcgctgttctacggtacacgaaccatggaaccctatagaatcttttttccagggtctcaccctgtccgcggggttcaggtaatgaaggtgggaaagctgcagctccatcagggtatgtttccacaggccatgaagaacctgcgactggctttcgatattatgagagtcactcacggccgggaacactccttgatcgaagaccttatcctcctcttggaggaatgtgacgctaatattcgcgcgagctag

SEQ ID NO: 212961 - DNA, 1110 bp, Artificial Sequence
  derived and/or modified sequence
atgagatgcagtcaatgccgcgtagcaaagtactgcagcgcaaagtgtcaaaagaaggcctggcccgaccacaagcgagaatgtaaatgcttaaagagctgcaaaccccgatacccccccgatagtgttcggctgctgggccgcgtggtctttaaactgatggacggagctccttcagaatccgagaaattgtacagcttttacgacctggaaagcaacataaacaaactgacagaggataagaaagaaggactccggcagctggtaatgacattccagcactttatgcgtgaggagattcaggatgcgagtcagctgccccctgccttcgatctgttcgaggcatttgcaaaagtgatttgcaattcatttacgatatgcaatgctgaaatgcaagaggtcggggtcggcctctatccctccatcagcttactcaaccatagctgtgatccgaattgtagcattgtgttcaacgggccacacttgctcctaagagcagtgagagatatcgaagtgggcgaagagttaacgatttgctatctcgacatgctcatgaccagcgaggaacgaagaaaacaactcagagatcagtattgttttgagtgtgattgctttaggtgccagacccaagacaaggatgccgatatgctcactggggacgagcaggtgtggaaagaggtgcaggagtccctcaagaaaattgaagagcttaaggcacattggaaatgggagcaggtactggctatgtgccaggctatcatctcctccaatagcgagcgcctcccagacatcaatatctaccagctcaaggtgctcgattgcgccatggatgcctgcattaatctgggcctgcttgaggaagctctcttctacgggacccggactatggagccttacaggatcttttttcctggtagtcatcctgtgcgtggcgtacaggtgatgaaggtggggaagctgcagctccaccaggggatgttcccccaggcaatgaagaacttaaggcttgcatttgatatcatgagagtgactcacggtcgcgagcactccctgatagaggacctcattctactgctcgaagaatgtgacgccaacataagggcctcgtag

SEQ ID NO: 212962 - DNA, 396 bp, Artificial Sequence
  derived and/or modified sequence
atgcgctgcagccagtgccgggtggccaagtactgcagcgccaagtgccagaagaaggcctggccagaccacaagcgggagtgcaagtgcctgaagagctgcaagccccgctaccccccagacagcgtgcggctgctgggccgggtggtgttcaagctgatggatggagcccccagcgagagcgagaagctgtacagcttctatgacctggagagcaacatcaacaagctgacagaggacaagaaggagggcctgcggcagctggtgatgaccttccagcacttcatgagggaggagatccaggatgccagccagctgcccccagcctttgacctgtttgaggcctttgccaaggtgatctgcaacagcttcaccatctgcaatgctgagatgtag

SEQ ID NO: 212963 - DNA, 225 bp, Artificial Sequence
  derived and/or modified sequence
atgcgctgcagccagtgccgggtggccaagtactgcagcgccaagtgccagaagaaggcctggccagaccacaagcgggagtgcaagtgcctgaagagctgcaagccccgctaccccccagacagcgtgcggctgctgggccgggtggtgttcaagctgatggatggagcccccagcgagagcgagaagctgtacagcttctatgacctggagagcaacatctag

SEQ ID NO: 212964 - DNA, 1110 bp, Artificial Sequence
  derived and/or modified sequence
atgcgctgcagccagtgccgggtggccaagtactgcagcgccaagtgccagaagaaggcctggccagaccacaagcgggagtgcaagtgcctgaagagctgcaagccccgctaccccccagacagcgtgcggctgctgggccgggtggtgttcaagctgatggatggagcccccagcgagagcgagaagctgtacagcttctatgacctggagagcaacatcaacaagctgacagaggacaagaaggagggcctgcggcagctggtgatgaccttccagcacttcatgagggaggagatccaggatgccagccagctgcccccagcctttgacctgtttgaggcctttgccaaggtgatctgcaacagcttcaccatctgcaatgctgagatgcaggaggtgggcgtgggcctgtaccccagcatcagcctgctgaaccacagctgtgaccccaactgcagcatcgtgttcaacggcccccacctgctgctgcgggctgtgcgggacatcgaggtgggggaggagctgaccatctgctacctggacatgctgatgaccagcgaggagaggaggaagcagctgcgggaccagtactgctttgaatgtgactgcttccgctgccagacccaggacaaggatgctgacatgctgactggagatgagcaggtgtggaaggaggtgcaggagagcctgaagaagattgaggagctgaaggcccactggaagtgggagcaggtgctggccatgtgccaggccatcatcagcagcaacagcgagcggctgcctgacatcaacatctaccagctgaaggtgctggactgtgccatggatgcctgcatcaacctgggcctgctggaggaggccctcttctacggcaccaggaccatggagccctaccgcatcttcttccctggcagccaccctgtgcggggcgtgcaggtgatgaaggtgggcaagctgcagctgcaccagggcatgttcccccaggccatgaagaacctgcggctggcctttgacatcatgagggtgacccacggccgggagcacagcctgattgaagatctcatcctgctgctggaggagtgtgatgccaacatccgggccagctag

SEQ ID NO: 212965 - DNA, 396 bp, Artificial Sequence
  derived and/or modified sequence
atgcggtgcagccagtgccgggtggccaagtactgcagcgccaagtgccagaagaaagcgtggcctgaccacaagagagagtgcaagtgtctgaaaagttgtaaaccgcgctatccaccagattctgtgagactgctgggcagagtcgttttcaaattgatggacggggcaccgtccgaaagcgaaaagctgtattccttttacgatctggagtctaacatcaacaaacttacagaggacaaaaaggaaggcctcaggcagctagtgatgaccttccaacactttatgcgcgaagaaatccaggacgcttctcaactgcctcccgccttcgacctgttcgaggcgttcgccaaggtgatctgcaacagcttcactatctgcaacgccgaaatgtag

SEQ ID NO: 212966 - DNA, 225 bp, Artificial Sequence
  derived and/or modified sequence
atgcggtgcagccagtgccgggtggccaagtactgcagcgccaagtgtcagaagaaggcctggccagaccacaagagagagtgcaaatgccttaaatcttgcaagccacggtacccgcctgacagcgtccgcctactcgggcgagtcgttttcaagctcatggatggcgccccttcagaaagtgagaaactatactctttttacgatctggaatccaatatatag

SEQ ID NO: 212967 - DNA, 1110 bp, Artificial Sequence
  derived and/or modified sequence
atgcggtgcagccagtgccgggtggccaagtactgcagcgccaagtgccagaaaaaagcttggcccgaccacaaaagggagtgcaaatgtcttaagtcctgcaaaccgaggtatccccctgatagtgtacggttgttggggcgggtggtgtttaaactcatggacggggctcctagcgaatctgagaagttgtactcattctatgatctggagtctaatatcaacaagctgaccgaagataagaaagaagggctgcgccaacttgtgatgacgtttcagcacttcatgagggaagagatacaggacgccagtcagttacccccagctttcgacctattcgaggcattcgccaaagtgatttgtaattccttcacgatttgcaacgccgagatgcaagaggtgggcgtgggcttatatccaagcatatctctgttaaatcatagctgcgacccgaattgctcaatcgtctttaatggtccccaccttctcctgcgcgccgttcgggacatcgaggtcggggaagaattgacgatttgctatctggacatgttgatgacaagtgaggaacgccgcaaacagcttcgcgaccaatactgcttcgagtgcgactgcttccggtgccaaactcaggataaagacgccgacatgctcacaggagatgaacaagtctggaaagaagtccaagaatccctgaagaaaattgaggagctgaaagcacattggaaatgggaacaagttctcgctatgtgtcaggcaatcatcagctcaaatagtgagaggcttccggacataaacatctatcagctcaaggtgctcgactgtgccatggatgcttgtattaacctcggcctcttagaagaagcgctcttctatggaacccgtaccatggaaccatataggatattcttcccaggttcgcacccagttcgtggagtgcaagtcatgaaagttggtaagctccagttacatcaggggatgtttccccaagccatgaagaacttgcgactcgcttttgatattatgagagtgacccacgggcgagaacattctctgatcgaggatctgatcctgctgctggaggagtgtgatgctaacattagagcaagctag

SEQ ID NO: 212968 - DNA, 1110 bp, Artificial Sequence
  derived and/or modified sequence
atgcggtgcagccagtgccgggtggccaagtactgcagcgccaagtgccagaagaaagcttggcctgatcataagcgcgagtgcaagtgccttaagagctgtaaaccaaggtatccccctgactccgtgaggttgctcgggcgggttgtgtttaagttgatggacggagcgccaagtgaaagcgagaagctgtatagtttctatgatctggagtccaatataaacaagctgacggaggataagaaagaagggctaaggcagctagtaatgactttccagcactttatgcgcgaagagatccaggatgcgagtcagctgccaccagcattcgacctgtttgaagctttcgctaaagttatctgtaactcttttacaatttgtaacgctgagatgcaggaggtcggggtgggactatatcctagtatctcgctgcttaaccactcttgtgatccgaactgcagcatcgtttttaatggaccccacctgctgctcagagcagtgagagatatcgaagttggagaggaactgaccatatgctacctcgatatgctgatgacaagtgaagaacggcgtaagcaactgcgtgaccagtactgttttgagtgcgattgtttccggtgccagacacaggacaaagacgcggacatgctgactggggacgaacaggtttggaaggaagttcaagagtccttgaagaaaatagaagagctgaaggcccattggaagtgggagcaggtgctggctatgtgccaggccattatctcctcaaattcagagcggcttcccgacataaacatctaccagctcaaagttctcgattgtgcgatggacgcgtgcatcaacctcggactattggaggaggccctcttttatggcacccggactatggagccataccgtatattctttcctgggtctcaccccgtgagaggggtacaggtgatgaaggtgggtaagcttcagttacatcagggaatgttccctcaggcgatgaagaacttaagactcgctttcgatattatgagagtgacccatgggcgcgagcactctttaatcgaagatctgattctcctgcttgaagaatgtgacgccaacatccgcgccagctag

SEQ ID NO: 212969 - DNA, 396 bp, Artificial Sequence
  derived and/or modified sequence
atgaggtgcagtcagtgtagggtcgctaaatactgttccgcgaaatgccagaaaaaggcgtggcctgatcacaagagagagtgcaaatgcttgaaaagctgcaagcccaggtacccacctgactctgttagattgctgggtcgggttgttttcaagttgatggatggagcgccatctgaaagcgaaaagttgtactccttttacgacctggagtcaaacattaataagctgacggaggacaaaaaggaggggctgagacagctcgtgatgaccttccaacacttcatgcgagaggaaatccaggacgcttcgcaactgcccccagcctttgacctcttcgaggccttcgctaaagtcatttgcaatagcttcaccatctgcaatgctgagatgtag

SEQ ID NO: 212970 - DNA, 225 bp, Artificial Sequence
  derived and/or modified sequence
atgcgatgctcccagtgcagagttgctaagtattgctcagccaagtgtcagaaaaaggcgtggcctgaccacaaacgcgagtgcaagtgcctcaagagctgcaaaccccgatatccaccagacagcgttcgccttttaggacgggtggtgttcaaattgatggatggcgctccaagcgagtccgaaaaattatatagcttctacgatttggagtccaatatttag

SEQ ID NO: 212971 - DNA, 1110 bp, Artificial Sequence
  derived and/or modified sequence
atgcgttgcagccagtgccgcgtggccaaatactgtagcgccaaatgtcagaaaaaggcctggcctgaccacaaaagagagtgcaagtgtctgaaaagttgtaagcctcggtatcctccagactctgtgagactcctggggcgagtagtttttaaactgatggatggagcaccttctgagtctgagaaactttactctttctacgatttagagtccaacataaacaagctaaccgaagacaaaaaggaaggattgcgtcagctggtaatgacattccagcactttatgcgcgaggaaatccaggacgctagccaactaccaccagcttttgacctgtttgaagcctttgcgaaggtgatctgcaatagctttaccatctgcaacgcagaaatgcaggaagttggtgtggggttgtacccctcaatttctctgctaaatcactcttgtgatccaaactgctccattgtctttaatggccctcaccttctgctcagggccgtgagagatatagaggtcggcgaggagcttaccatatgttaccttgatatgttgatgaccagtgaggaaaggcgaaagcagctgagggatcagtactgtttcgaatgcgactgtttccgatgtcagacacaagataaggatgctgatatgcttacgggcgacgagcaggtgtggaaggaggttcaggaaagcctaaagaagatcgaagaattaaaagctcactggaagtgggaacaggttctggcgatgtgccaggccatcatttccagtaattccgaaagactgcctgacattaacatctatcagctgaaggtgctagattgcgctatggatgcgtgcattaatcttggactgctcgaggaggcccttttctatggcactagaactatggagccctataggattttttttcctggcagtcaccctgtgcgcggtgttcaggtgatgaaggtcggcaaactgcagttgcaccaagggatgtttccacaggctatgaaaaacctccggttagcttttgacatcatgagggtgactcacggcagggagcactctttgatcgaagaccttattctcctgttagaagaatgcgacgctaatattcgcgctagctag

SEQ ID NO: 212972 - DNA, 1110 bp, Artificial Sequence
  derived and/or modified sequence
atgcgctgcagccaatgccgcgttgctaaatattgcagcgctaagtgccagaaaaaggcctggcctgatcacaaaagagagtgcaaatgcctgaaaagttgtaaaccaagatatcctccagattctgtccgcctcctaggcagagtggtcttcaagctgatggacggggcacctagcgagagcgagaaactgtacagcttttatgatctggaaagcaacataaataaacttacagaagataaaaaggaaggactgcgtcagctagtgatgacatttcagcatttcatgagagaagaaattcaggacgcttctcagctcccccctgcttttgatctatttgaagctttcgcaaaagtgatttgcaacagcttcacgatttgtaacgcagagatgcaggaagtcggggtaggcctatatcccagcatttccctgctgaatcactcctgtgatcccaattgttctattgtgttcaacgggcctcacctgctgctgcgcgctgtgcgcgacattgaagtcggggaggagctgacgatctgctaccttgacatgctcatgacgtcagaagaacgcagaaagcaattgagggatcagtactgtttcgaatgcgactgcttccgctgtcaaacacaggacaaggacgcggatatgctcaccggggacgaacaagtctggaaggaggtccaagaatctctcaagaagattgaggagcttaaagcccattggaaatgggaacaggtgctggcaatgtgccaggctattattagtagtaactcagagcggctgccagatattaatatttatcaacttaaagtgctggattgtgccatggacgcctgtattaacttgggtctgttggaagaggctttattctatggaacccgaactatggaaccatatcggatctttttccccggtagtcaccccgttagaggggtgcaggtgatgaaggtcgggaagcttcagctgcatcagggtatgttcccacaagccatgaaaaacctaagactcgcctttgacataatgagagtgacccacggccgagagcattcgctgatcgaagatctgattctgctgctggaggagtgtgatgctaacattcgcgcaagctag

SEQ ID NO: 212973 - protein, 337 aa, Artificial Sequence
  derived and/or modified sequence
MGAAGSSALARFVLLAQSRPGWLGVAALGLTAVALGAVAWRRAWPTRRRRLLQQVGTVAQLWIYPVKSCKGVPVSEAECTAMGLRSGNLRDRFWLVINQEGNMVTARQEPRLVLISLTCDGDTLTLSAAYTKDLLLPIKTPTTNAVHKCRVHGLEIEGRDCGEATAQWITSFLKSQPYRLVHFEPHMRPRRPHQIADLFRPKDQIAYSDTSPFLILSEASLADLNSRLEKKVKATNFRPNIVISGCDVYAEDSWDELLIGDVELKRVMACSRCILTTVDPDTGVMSRKEPLETLKSYRQCDPSERKLYGKSPLFGQYFVLENPGTIKVGDPVYLLGQ

SEQ ID NO: 212974 - DNA, 1014 bp, Artificial Sequence
  derived and/or modified sequence
atgggggctgcggggagctcagccctcgctagattcgtccttttggcgcagtcccggcccggctggttgggggtagccgccctcgggctcaccgccgtcgctcttggtgccgtggcatggagaagagcatggccaactaggagacgtaggctgctgcagcaggtgggaaccgtcgctcagctgtggatctacccagtcaagagttgcaaaggggtgcctgtcagtgaggctgaatgtacagcgatgggtctgcgttcaggcaacctccgagatagattctggttggtgattaatcaggagggcaatatggtgacagcccgtcaggaaccaaggttggtgcttatatcactcacatgtgacggggatactctgaccttatcggcagcttacaccaaagacctgctcctccccatcaaaacaccgacaactaacgcagttcataagtgcagagtccatgggttggagatcgaagggagggactgcggggaggccaccgcccaatggattacatcctttttaaaatctcaaccttacaggttggtgcattttgaaccccatatgcgccccaggcgtcctcatcagattgcggatctgtttcggcctaaagaccagattgcctactcagatacttcgcctttcctgattcttagcgaggctagtctggctgacctgaatagtcgactggagaagaaggtgaaggcaaccaacttccgtcccaatatagtcatttctggctgcgatgtttacgcagaggatagttgggacgaactgttgattggagatgtggagctcaagcgcgttatggcctgttcccgctgcatacttacaaccgtagatccggacactggggttatgtcacggaaagagccgctggagacccttaaatcttatcgacagtgtgatcctagcgagcgcaaattgtatgggaaatctccgctctttgggcagtacttcgtgcttgaaaaccccggcactataaaagtcggcgaccctgtgtacctgcttggccagtag

SEQ ID NO: 212975 - DNA, 1014 bp, Artificial Sequence
  derived and/or modified sequence
atgggcgccgccggcagcagcgccctggccaggtttgtgctgctggcccagagccggcccggctggctgggcgtggccgccctgggcctgacagctgtggccctgggcgctgtggcctggaggcgggcctggcccaccaggagaagaaggctgctgcagcaggtgggcaccgtggcccagctgtggatctaccctgtgaagagctgcaagggcgtgcctgtgtctgaggccgagtgcacagccatgggcctgcggagcggcaacctgcgggaccgcttctggctggtgatcaaccaggagggcaacatggtgacagcccggcaggagccccggctggtgctgatcagcctgacctgtgatggagacaccctgaccctgtctgctgcctacaccaaggacctgctgctgcccatcaagacccccaccaccaatgctgtgcacaagtgccgggtgcacggcctggagattgagggccgggactgtggggaggccacagcccagtggatcaccagcttcctgaagagccagccctaccgcctggtgcactttgagccccacatgaggccccggcggccccaccagattgctgacctcttccggcccaaggaccagatcgcctacagcgacaccagccccttcctgatcctgtctgaggccagcctggccgacctgaacagccggctggagaagaaggtgaaggccaccaacttccggcccaacatcgtcatcagcggctgtgatgtgtatgcagaagattcctgggatgagctgctgattggagatgtggagctgaagagggtgatggcctgcagccgctgcatcctgaccaccgtggaccctgacaccggggtgatgagcaggaaggagcccctggagaccctgaagagctaccggcagtgtgaccccagcgagaggaagctgtatggcaagagccccctgtttggccagtactttgtgctggagaaccctggcaccatcaaggtgggggaccctgtgtacctgctgggccagtag

SEQ ID NO: 212976 - DNA, 2170 bp, Artificial Sequence
  derived and/or modified sequence
agctgagccaccacctcccactccccgcgccgccccccagaaggacgcactgctctgattggcccggaagggttcaggagctgcccagcctttgggctcggggccaaaggccgcaccttcccccagcggccccgggcgaccagcgcgctccggccttgccgccgccacctcgcggagaagccagccatgggcgccgccggctcctccgcgctggcgcgctttgtcctcctcgcgcaatcccggcccgggtggctcggggttgccgcgctgggcctgaccgcggtggcgctgggggctgtcgcctggcgccgcgcatggcccacgcggcgccggcggctgctgcagcaggtgggcacagtggcgcagctctggatctaccctgtgaaatcctgcaagggggtgccggtgagcgaggcggagtgcacggccatggggctgcgcagcggcaacctgcgggacaggttttggcttgtgatcaaccaggagggaaacatggttactgctcgccaggaacctcgcctggtcctgatttccctgacctgcgatggtgacaccctgactctcagtgcagcctacacaaaggacctactactgcctatcaaaacgcccaccacaaatgcagtgcacaagtgcagagtgcacggcctggagatagagggcagggactgtggcgaggccaccgcccagtggataaccagcttcctgaagtcacagccctaccgcctggtgcacttcgagcctcacatgcgaccgagacgtcctcatcaaatagcagacttgttccgacccaaggaccagattgcttactcagacaccagcccattcttgatcctttctgaggcgtcgctggcggatctcaactccaggctagagaagaaagttaaagcaaccaacttcaggcccaatattgtaatttcaggatgcgatgtctatgcagaggattcttgggatgagcttcttattggtgacgtggaactgaaaagggtgatggcttgttccagatgcattttaaccacagtggacccagacaccggtgtcatgagcaggaaggaaccgctggaaacactgaagagttatcgccagtgtgacccttcagaacgaaagttatatggaaaatcaccactctttgggcagtattttgtgctggaaaacccagggaccatcaaagtgggagaccctgtgtacctgctgggccagtaatgggaaccgtatgtcctggaatattagatgccttttaaaaatgttctcaaaaatgacaacacttgaagcatggtgtttcagaactgagacctctacattttctttaaatttgtgattttcacatttttcgtcttttggacttctggtgtctcaatgcttcaatgtcccagtgcaaaaagtaaagaaatatagtctcaataacttagtaggacttcagtaagtcacttaaatgacaagacaggattctgaaaactccccgtttaactgattatggaatagttctttctcctgcttctccgtttatctaccaagagcgcagacttgcatcctgtcactaccactcgttagagaaagagaagaagagaaagaggaagagtgggtgggctggaagaatatcctagaatgtgttattgcccctgttcatgaggtacgcaatgaaaattaaattgcaccccaaatatggctggaatgccacttcccttttcttctcaagccccgggctagcttttgaaatggcataaagactgaggtgaccttcaggaagcactgcagatattaattttccatagatctggatctggccctgctgcttctcagacagcattggatttcctaaaggtgctcaggaggatggttgtgtagtcatggaggacccctggatccttgccattcccctcagctaatgacggagtgctccttctccagttccgggtgaaaaagttctgaattctgtggaggagaagaaaagtgattcagtgatttcagatagactactgaaaacctttaaagggggaaaaggaaagcatatgtcagttgtttaaaacccaatatctattttttaactgattgtataactctaagatctgatgaagtatattttttattgccattttgtcctttgattatattgggaagttgactaaacttgaaaaatgtttttaaaactgtgaataaatggaagctactttga

SEQ ID NO: 212977 - DNA, 1014 bp, Artificial Sequence
  derived and/or modified sequence
atgggcgccgccggcagcagcgccctggcccggttcgtgctgctggcacaaagcaggcctgggtggctcggagttgctgcgctcggactcaccgctgtggctcttggcgcggtcgcttggaggagagcctggcccacaagacgtcgacgcctcctgcagcaggttggcactgtagcgcagttgtggatttatcccgtgaagtcctgcaagggggtcccggtgtccgaggctgagtgcacagcaatgggactgcgcagtggaaatttgcgggaccggttctggctggttattaatcaagaggggaacatggtgactgctcggcaggaaccgcgcctcgtcctgatctcattgacttgcgatggggacactttaaccctatctgcagcttacacaaaagacctcttgctccctattaaaacccctacaaccaatgccgtccacaaatgccgggttcacggtcttgagattgaaggacgcgactgtggggaggccaccgcccaatggattaccagctttctgaaatcccaaccctataggctggtccactttgagcctcacatgaggccaagacggcctcaccagattgccgacctcttccggcccaaggatcaaattgcttactcagacacctcgccatttctgatactcagcgaagcatcactggcagatcttaacagcaggctcgagaagaaggttaaagccaccaactttcgaccaaacatcgtcatctcaggatgtgacgtctatgctgaagactcttgggatgagctgctgataggcgatgtggagctcaagagggttatggcctgttcaagatgtatccttacaactgttgatcctgacaccggtgtgatgtctaggaaagaacccctcgagacattaaagtcctatcgccagtgtgaccccagcgagcgcaaactgtatggaaagtcccctttgttcggccagtactttgttttggaaaaccccggcacaataaaagtgggggacccagtctacctgctgggacagtag

SEQ ID NO: 212978 - DNA, 1014 bp, Artificial Sequence
  derived and/or modified sequence
atgggcgctgccggatcttcggccctcgcgaggttcgtgctattggctcagagcaggcccggttggctcggcgttgcagcgctgggtctcacagccgtggcccttggggctgtggcatggcggagagcatggcctactaggcgcaggagactcctccagcaggttggtactgtcgcacaattatggatttatcctgtaaaatcctgcaagggcgttcccgtctcagaagctgaatgtacagcgatgggcttgagatcaggaaacttaagggaccgtttttggctggtgataaatcaggagggaaatatggtaacggcaagacaggagccaagactcgtgctaatctcattaacctgtgacggagacactctaacgttgagtgcagcctacaccaaggacctgctactgccaatcaaaactccaacaacgaacgcagtacataagtgcagagtgcacggattagagattgaaggcagagattgcggagaagcgacagctcagtggattacatcttttttaaagagtcagccatatcgcctcgttcactttgaaccccatatgcgccctaggcgccctcaccagattgcagatctatttagaccaaaagaccagattgcatatagtgacacatcccctttcctcatattgtcagaagcttctttggcagatttgaacagtcgtctggagaaaaaggtgaaagccacgaatttcaggcctaacatcgttatcagtggctgcgacgtctatgcagaggacagctgggacgaactgctcataggcgatgtagagttgaagagggtgatggcttgctcccgttgcatactcacaacagttgatcccgatacgggggtgatgtccagaaaggaaccactggagacactcaagtcctatcgccagtgcgatcctagtgaacgaaagctctatggtaagtcccctctgttcgggcagtatttcgtgcttgagaacccgggtacaatcaaagtaggtgacccggtgtacctgctaggacagtag

SEQ ID NO: 212979 - DNA, 1014 bp, Artificial Sequence
  derived and/or modified sequence
atgggcgccgccggcagcagcgccctggccagattcgtgctgctggcccagagcagacccggctggctgggcgtggccgccctgggcctgaccgccgtggccctgggcgccgtggcctggagaagagcctggcccaccagaagaagaagactgctgcagcaggtgggcaccgtggcccagctgtggatctaccccgtgaagagctgcaagggcgtgcccgtgagcgaggccgagtgcaccgccatgggcctgagaagcggcaacctgagagacagattctggctggtgatcaaccaggagggcaacatggtgaccgccagacaggagcccagactggtgctgatcagcctgacctgcgacggcgacaccctgaccctgagcgccgcctacaccaaggacctgctgctgcccatcaagacccccaccaccaacgccgtgcacaagtgcagagtgcacggcctggagatcgagggcagagactgcggcgaggccaccgcccagtggatcaccagcttcctgaagagccagccctacagactggtgcacttcgagccccacatgagacccagaagaccccaccagatcgccgacctgttcagacccaaggaccagatcgcctacagcgacaccagccccttcctgatcctgagcgaggccagcctggccgacctgaacagcagactggagaagaaggtgaaggccaccaacttcagacccaacatcgtgatcagcggctgcgacgtgtacgccgaggacagctgggacgagctgctgatcggcgacgtggagctgaagagagtgatggcctgcagcagatgcatcctgaccaccgtggaccccgacaccggcgtgatgagcagaaaggagcccctggagaccctgaagagctacagacagtgcgaccccagcgagagaaagctgtacggcaagagccccctgttcggccagtacttcgtgctggagaaccccggcaccatcaaggtgggcgaccccgtgtacctgctgggccagtag

SEQ ID NO: 212980 - protein, 701 aa, Artificial Sequence
  derived and/or modified sequence
MAQAGVVGEVTQVLCAAGGALELPELRRRLRMGLSADALERLLRQRGRFVVAVRAGGAAAAPERVVLAASPLRLCRAHQGSKPGCVGLCAQLHLCRFMVYGACKFLRAGKNCRNSHSLTTEHNLSVLRTHGVDHLSYNELCQLLFQNDPWLLPEICQHYNKGDGPHGSCAFQKQCIKLHICQYFLQGECKFGTSCKRSHDFSNSENLEKLEKLGMSSDLVSRLPTIYRNAHDIKNKSSAPSRVPPLFVPQGTSERKDSSGSVSPNTLSQEEGDQICLYHIRKSCSFQDKCHRVHFHLPYRWQFLDRGKWEDLDNMELIEEAYCNPKIERILCSESASTFHSHCLNFNAMTYGATQARRLSTASSVTKPPHFILTTDWIWYWSDEFGSWQEYGRQGTVHPVTTVSSSDVEKAYLAYCTPGSDGQAATLKFQAGKHNYELDFKAFVQKNLVYGTTKKVCRRPKYVSPQDVTTMQTCNTKFPGPKSIPDYWDSSALPDPGFQKITLSSSSEEYQKVWNLFNRTLPFYFVQKIERVQNLALWEVYQWQKGQMQKQNGGKAVDERQLFHGTSAIFVDAICQQNFDWRVCGVHGTSYGKGSYFARDAAYSHHYSKSDTQTHTMFLARVLVGEFVRGNASFVRPPAKEGWSNAFYDSCVNSVSDPSIFVIFEKHQVYPEYVIQYTTSSKPSVTPSILLALGSLFSSRQ

SEQ ID NO: 212981 - protein, 130 aa, Artificial Sequence
  derived and/or modified sequence
MFLARVLVGEFVRGNASFVRPPAKEGWSNAFYDSCVNSVSDPSIFVIFEKTRSTQSMSSSTPPPPSPRSHPPSCWPWAPCSAADSERTGVFQAFHLLCLEMAIWAFPFLFKQKLLMNCSLNIDLSMKLCS

SEQ ID NO: 212982 - DNA, 2106 bp, Artificial Sequence
  derived and/or modified sequence
atggcccaggctggagtggtcggagaggtcactcaagttctgtgtgccgccggcggggccctggaacttccagagctgcggcggaggctccgtatggggctatccgccgacgccctggagagactgctacgccagaggggccgtttcgtggttgccgttcgtgccggaggtgccgcagccgctccagagcgcgtggtcttagcggcaagccctctgaggctgtgtagagctcaccaaggttcaaaaccaggctgtgtgggactctgcgctcagttgcatttgtgtcggttcatggtgtatggggcatgcaagtttttgcgtgccggcaagaactgccggaactctcacagtttgacgacagaacacaatctgagtgtgctcaggacccacggggtcgatcacttgtcatataatgagttgtgtcagctgttgttccagaatgatccatggctgctgccggagatttgtcagcattacaataaaggagatggtccccacgggtcctgcgctttccagaagcagtgcattaagctacatatctgtcagtacttcctacagggcgagtgcaaattcggtactagttgcaagcgctcacatgatttttctaactccgaaaacctggaaaagctcgaaaaactgggtatgtctagtgacctcgtaagtaggctgccaactatatacaggaacgcccatgatatcaagaataaaagcagcgcaccgtctcgtgttcctccgctgttcgtccctcagggtacaagcgagcgcaaggattcctctggcagcgtgtcacctaacacactgtctcaagaagaaggtgaccaaatttgtctgtaccatattagaaagagctgctcattccaggataagtgccatagggtgcatttccacttgccatatcgatggcaattcctcgataggggaaagtgggaagacctcgataatatggaactaatcgaagaggcctattgcaacccaaaaatagagcgaatactctgctctgaaagcgcgtccaccttccacagccactgcctgaactttaacgcaatgacatatggggcaacacaagcgcggaggctgtctactgcgagctccgtcactaagccgccacacttcatactgacaaccgactggatctggtattggagcgatgaatttggctcgtggcaggaatacggccggcagggaacagttcacccagtcactacggtatctagcagcgatgttgagaaggcctacttagcttactgtactccgggctcagatggtcaggcggccacactcaaatttcaagctggcaaacataattatgaattagatttcaaagcgttcgttcagaaaaatctcgtttacgggaccacaaagaaggtttgccgccgccctaaatacgtcagtcctcaggacgtcactacaatgcaaacctgtaataccaaattccctggcccgaaatcaatccccgattactgggattcatccgccctacctgaccccgggtttcagaaaataactcttagttcctcatctgaagagtatcaaaaagtttggaatcttttcaataggacactgcccttctatttcgtgcagaagatcgaacgtgtccagaacctggcactgtgggaagtgtaccaatggcaaaagggccagatgcaaaagcagaatggtggaaaggcagtggacgaacgacagctgttccatggcacgtcagcaatttttgttgacgcaatctgccaacaaaatttcgactggagggtgtgtggcgtgcacggtacgtcctacggcaaagggagctactttgctagggacgctgcttattcacatcattactcaaagtccgatactcagactcacactatgtttctggctcgcgttcttgtgggtgagttcgtgcgcgggaatgcaagctttgtcaggcccccggctaaggaggggtggtccaatgccttttacgactcgtgtgtgaacagcgtttccgatcccagcatatttgtgatctttgagaaacaccaagtttatcccgagtacgtgattcagtacactacaagttctaaacctagtgttacaccatcgattttgctggcgctgggctctcttttttcatcacgccagtag

SEQ ID NO: 212983 - DNA, 393 bp, Artificial Sequence
  derived and/or modified sequence
atgttcctggcacgtgtgctcgttggcgagtttgtgaggggaaacgcaagcttcgtcagaccacctgccaaggaggggtggagcaacgccttttacgattcatgcgtgaactctgtgtcagaccccagcatcttcgtgatcttcgaaaagactaggagtacccagtcaatgagttctagcacaccaccccctccttctcccaggtctcatcccccttcctgttggccctgggcgccttgttcggcagctgacagcgagagaaccggagtgtttcaggcgttccatctactctgcctagagatggctatatgggccttcccatttttgttcaaacagaaattgctaatgaactgcagcttgaatatcgatctgtctatgaaactctgctcttag

SEQ ID NO: 212984 - DNA, 2106 bp, Artificial Sequence
  derived and/or modified sequence
atggcccaggccggcgtggtgggggaggtgacccaggtgctgtgtgccgccggcggggccctggagctgcctgagctgcggcggcggctgaggatgggcctgtctgcagatgccctggagcggctgctgcggcagaggggccgctttgtggtggccgtgcgggccggcggcgctgctgctgcccctgagcgggtggtgctggccgccagccccctgcggctgtgccgggcccaccagggcagcaagccaggctgtgtgggcctgtgtgcccagctgcacctgtgccgcttcatggtgtatggagcctgcaagttcctgcgggccggcaagaactgcaggaacagccacagcctgaccacagagcacaacctgtctgtgctgcggacccacggcgtggaccacctgagctacaatgagctgtgccagctgctcttccagaatgacccctggctgctgcctgagatctgccagcactacaacaagggagatggcccccacggcagctgtgccttccagaagcagtgcatcaagctgcacatctgccagtacttcctgcagggcgagtgcaagtttggcaccagctgcaagaggagccatgacttcagcaacagcgagaacctggagaagctggagaagctgggcatgagcagtgacctggtgtcccggctgcccaccatctacagaaatgcccatgacatcaagaacaagagcagcgcccccagccgggtgccccccctgtttgtgccccagggcaccagcgagaggaaggacagcagcggctctgtgagccccaacaccctgagccaggaggagggggaccagatctgcctgtaccacatcaggaagagctgcagcttccaggacaagtgccaccgggtgcacttccacctgccctaccgctggcagttcctggaccggggcaagtgggaggacctggacaacatggagctgattgaggaggcctactgcaaccccaagattgagcgcatcctgtgcagcgagagcgccagcaccttccacagccactgcctgaacttcaatgccatgacctatggagccacccaggcccggcggctgagcacagccagctctgtgaccaagccaccccacttcatcctgaccacagactggatctggtactggagcgatgaatttggctcctggcaggagtatggccggcagggcaccgtgcaccctgtgaccaccgtgagcagcagtgatgtggagaaggcctacctggcctactgcaccccaggcagtgatggccaggccgccaccctgaagttccaggccggcaagcacaactatgagctggacttcaaggcctttgtgcagaagaacctggtgtatggcaccaccaagaaggtgtgccggcggcccaagtatgtgagcccccaggatgtgaccaccatgcagacctgcaacaccaagtttcctggccccaagagcatcccagactactgggacagcagcgccctgcctgaccccggcttccagaagatcaccctgagcagcagcagcgaggagtaccagaaggtgtggaacctcttcaacagaaccctgcccttctactttgtgcagaagattgagcgggtgcagaacctggccctgtgggaggtgtaccagtggcagaagggccagatgcagaagcagaatggaggcaaggctgtggatgagcggcagctgttccacggcaccagcgccatctttgtggatgccatctgccagcagaactttgactggagggtgtgtggggtgcacggcaccagctatggcaagggcagctactttgccagagatgctgcctacagccaccactacagcaagagtgacacccagacccacaccatgttcctggcccgggtgctggtgggggagtttgtgagaggaaatgccagctttgtgcggcccccagccaaggagggctggagcaatgccttctatgacagctgtgtgaacagcgtgtctgaccccagcatctttgtgatctttgagaagcaccaggtgtacccagaatatgtgatccagtacaccaccagcagcaagcccagcgtgacccccagcatcctgctggccctgggcagcctcttcagcagccggcagtag

SEQ ID NO: 212985 - DNA, 393 bp, Artificial Sequence
  derived and/or modified sequence
atgttcctggcccgggtgctggtgggggagtttgtgagaggaaatgccagctttgtgcggcccccagccaaggagggctggagcaatgccttctatgacagctgtgtgaacagcgtgtctgaccccagcatctttgtgatctttgagaagaccaggagcacccagagcatgagcagcagcaccccacctccacccagccccaggagccacccccccagctgctggccctgggccccctgcagcgctgctgacagcgagaggactggagtcttccaggccttccacctgctgtgcctggagatggccatctgggccttccccttcctgttcaagcagaagctgctgatgaactgcagcctgaacatcgacctgtccatgaagctgtgcagctag

SEQ ID NO: 212986 - DNA, 2106 bp, Artificial Sequence
  derived and/or modified sequence
atggcccaggccggcgtggtgggcgaggtgacccaggtgctgtgcgccgctggaggcgcactcgaattaccagagcttaggagacggcttagaatgggactctccgctgacgccctggagcgcttactgagacagcgtggccggtttgtggtcgccgtgcgcgcaggtggcgccgcagctgctcctgagcgcgtcgtgttggccgcgtcccccctccgcctttgcagggcccaccaagggtcaaagcctggttgtgtcggcctgtgcgcacagctccatctatgccggtttatggtttatggcgcctgtaaatttctccgggccggtaagaactgccgcaattctcatagcctcactaccgaacacaacctgtcagttctccgaacccatggagtcgatcatctatcatacaatgagttatgccagttactcttccagaacgacccctggttgctaccggaaatatgtcaacattataataagggcgatggtccgcacgggtcatgcgcgtttcaaaagcagtgtatcaaattgcatatttgccagtatttcttgcagggcgaatgtaagttcggcacctcatgcaagagatctcacgatttcagcaactcagaaaatttggaaaagctcgagaaacttggtatgtcaagcgatctggtctcacgtcttcccactatctatcgtaacgcccatgatatcaagaataagtcatctgctccgtctcgggtgccacccctctttgtcccccaaggcactagtgaaaggaaggactcctccggtagcgtgtcaccgaacactctcagccaggaggagggggaccagatctgtctgtatcatatccggaagagctgttcatttcaggataagtgccatcgggtgcactttcacctgccctaccggtggcagttccttgacagagggaaatgggaggacctcgacaatatggaactcatcgaagaggcctactgtaatcccaaaatcgagaggatcctatgttctgagagtgcctctacattccattcacattgcttaaattttaacgccatgacctatggcgctacacaggccaggagactcagcactgcctcatccgtcacaaagcccccacacttcatcctgacgacagactggatttggtattggtctgacgaatttggcagttggcaagagtatgggcggcaggggaccgtgcacccagtgacaactgttagttctagcgacgtggaaaaggcatatctggcctattgcacacccgggtctgatgggcaggcagcaactctgaaattccaggccggtaagcataattacgaactggattttaaagcctttgtgcaaaagaatttggtctacggcaccactaagaaggtgtgtaggcgtcctaagtacgttagtccccaggacgtgacaaccatgcagacgtgcaacacaaagtttcccggaccaaaatcaataccagattactgggattcatctgccctccccgatcctggctttcaaaaaattacgttgtcttcaagtagcgaagaatatcagaaagtctggaatctattcaacagaaccctgcccttctattttgtgcaaaagattgagagagtgcagaacttggcgctgtgggaagtctaccaatggcagaagggtcagatgcagaagcagaacggaggcaaagccgtggacgagaggcagctttttcacggaacctccgctatctttgtggacgccatttgtcagcaaaattttgattggcgagtgtgtggcgtacatggaactagctacggaaaaggctcatattttgccagggacgccgcgtattcacatcattacagcaagagcgacacccagacccacaccatgttcctggcccgggtattagttggagagtttgtccgcgggaacgcttctttcgttagaccgccagcaaaagagggatggtctaatgcattttacgattcatgcgtgaacagtgtaagtgacccttccatctttgtcatctttgaaaaacatcaggtctatcccgagtacgtaattcagtataccaccagttcaaaaccatccgtgacacctagtatcctgctggcactcggctccctcttctcatctaggcagtag

SEQ ID NO: 212987 - DNA, 393 bp, Artificial Sequence
  derived and/or modified sequence
atgttcctggcccgggtgctggtgggcgagttcgtgcggggcaacgcatcattcgttcggccgcctgccaaagaaggctggtcaaacgccttctacgactcctgcgtaaacagcgtgtcagacccgagcatattcgtcattttcgaaaaaacacgcagtacccagtctatgagcagtagcactcctccaccccccagccctcggagccatcctccatcatgctggccctgggcaccatgttcagccgcagactcagaaagaactggggtgtttcaggcctttcatctcctgtgcctcgaaatggcaatatgggccttcccctttcttttcaagcagaaactgctgatgaattgttctcttaatatcgacttgtcaatgaaattatgttcatag

SEQ ID NO: 212988 - DNA, 3796 bp, Artificial Sequence
  derived and/or modified sequence
attcctggattacctcctcaaagggctctaacaactcgcattgctctcagcgtgtgagagggtcctttgctctgaagggtcttctaaaatatttgttcaatcgttacttagcaggggctgggagtaacggattttattttattttattttattttttgagacggagtctcgctctgtcgcccaggctggagtgcagtcgcgcaatctcggctcacggatttgctcttttaaaggacatacccttttatgtttaaatgaaggaactcattgatgcaccgaggcgaaaggaacctttaattaagtgcgtcttctatgcggagtgatcgcttttgtcacttgttcgaggggtgagagctcccgtcagttgtccctgtttctgtgagccgtctacgaagcccgggcttggcctgggcgacgctgagcggctttaaccggcggcgtccagccggctccgccagcgctgccgccgccctcgaggctccctctgactgaaggcgcgctgagcatcgcggcattaggggctcctggtccctcaaacatccagggaagccattttcagggactaggtactgacccccgcgagccgccacagccacagcccgcgctccgggccgaacgcccgagctcaagagctcccgagcttccgtcgggcggcggcctcacagctgggggccctgaggcggaaggcgcagccgctcagctgcggaccgggggcgtggcgagggcgcacaggttctgtttttcgccggcccggggccgctttcggtttcgtttcccgccggcgtctccaccctgcgagagccgcccgccagccagcgtccgccgccgtccgcgtcgcgccacccgcggtccgacgggagcaggcccagcggccatggcccaggccggcgtcgtcggtgaggtcacccaggtgctgtgcgcggccgggggcgccctggagttgcccgagctgcggcgccgcttgcggatgggcttgagcgccgacgcgctggagcggctgctgcggcagcgtgggcgcttcgtggtggcggtgcgggcgggcggcgcagccgcggccccggagcgcgtggtgctggccgcctcgccgctgcgcctgtgtcgcgcgcaccagggctccaagccgggctgcgtggggctctgcgcgcagctccacctctgcaggttcatggtctacggcgcctgcaagttcctgagagccgggaagaactgtaggaatagtcacagcttgacaaccgaacacaacctgagtgtgctgagaactcatggcgttgaccacctgagctataatgagctatgccaactcttgtttcagaacgacccctggcttttgccagaaatttgccaacattacaacaaaggagatggaccccacggctcttgtgcctttcaaaagcagtgcatcaagctccatatctgccagtattttttacagggggaatgcaagtttggcactagctgtaagagatcccatgatttctctaattctgagaatctggaaaaattggagaagttgggtatgagctcagacctggtgagcaggctgcctaccatttatagaaatgcacatgacatcaagaataagagctctgcccccagcagagtgcctcctctttttgtcccacaggggacttctgaaagaaaagacagttcaggttctgtgtccccaaacactcttagccaggaggagggtgatcagatctgtttgtaccatatccggaaaagttgtagctttcaagataagtgccatagagttcatttccatttgccgtatcgatggcaattcttggatagaggcaaatgggaggatttggacaacatggaacttattgaagaggcatattgcaatcccaaaatagaaaggatcctgtgctctgagtcagccagtacctttcactctcattgtctgaactttaacgccatgacttacggtgctacccaggctcgccgcctctccacggcctcctctgtcaccaaacctccacacttcatcctcaccactgactggatttggtactggagtgatgagtttggttcttggcaggaatatggaagacagggcacggtgcaccctgtgaccactgtcagcagtagcgacgtggagaaggcctacctggcctactgtacaccggggtctgacggccaggcagccaccttgaagttccaggccggaaagcacaactacgagttagatttcaaagccttcgttcagaaaaacctggtctatggcacaactaaaaaggtttgccgcagacccaaatacgtgtctccccaggatgtgacgaccatgcaaacctgcaataccaagtttccaggcccgaagagcatcccagactattgggactcctctgccctgccagacccaggctttcagaagatcacccttagttcttcctcggaagagtatcagaaggtctggaacctctttaaccgcacgctgcctttctactttgttcagaagattgagcgagtacagaacctggccctctgggaagtctaccagtggcaaaaaggacagatgcagaagcagaacggagggaaggccgtggacgagcggcagctgttccacggcaccagcgccatttttgtggacgccatctgccagcagaactttgactggcgggtctgtggtgttcatggcacttcctacggcaaggggagctactttgcccgagatgctgcatattcccaccactacagcaaatccgacacgcagacccacacgatgttcctggcccgggtgctggtgggcgagttcgtcaggggcaatgcctcctttgtccgtccgccggccaaggagggctggagcaacgccttctatgatagctgcgtgaacagtgtgtccgacccctccatctttgtgatctttgagaaacaccaggtctacccagagtatgtcatccagtacaccacctcctccaagccctcggtcacaccctccatcctgctggccttgggctccctgttcagcagccgacagtgagcgcacaggagtgttccaggcctttcacctgctctgccttgaaatggctatttgggcctttccttttctttttaaacagaaacttttaatgaactgttctcttaacattgacctctcaatgaagttatgttcttaatctcttgctaataatgatttttacttttaagtcacttttgggttcactagtggattaaccagaagtgattgtagttgagtccagttttgctttttaataatgtgttgaagttttagtttttactctttgttgactttgctgcttattggcaccagggacagagtttctagatacaattttatggattggttttaatttttatgagtttgtctctgcagtgattcggtttctcagagtctcatggcatcatagtttttccagaatgacacagtagccaccggtggatgacagcccacgggcggcacagtcacttctgcctgttgctctgacaccaacccaggcagctctgctgtggcttctcctgggctctggcattagttggtctgtgtcacattgtcagaacaggtggctgctgtgtggtgccatcgagtccctgctggttccccttgtcctgggagggtcacccattgcccaaggaagtgcatccacctggcaggtgacctggaggagtagcttccccgaggacccccaggcttggcctgtgattgcgcaaacccacatttcctaagcacactggacacccttcgagtgtgggttttaacatccctgtgagattgaatacttgtgccacacatgtcacaaaagagtatggaaataaaagaaaatttatccgaagtgga

SEQ ID NO: 212989 - DNA, 1127 bp, Artificial Sequence
  derived and/or modified sequence
ctttgcccgagatgctgcatattcccaccactacagcaaatccgacacgcagacccacacgatgttcctggcccgggtgctggtgggcgagttcgtcaggggcaatgcctcctttgtccgtccgccggccaaggagggctggagcaacgccttctatgatagctgcgtgaacagtgtgtccgacccctccatctttgtgatctttgagaaaaccaggtctacccagagtatgtcatccagtacaccacctcctccaagccctcggtcacaccctccatcctgctggccttgggctccctgttcagcagccgacagtgagcgcacaggagtgttccaggcctttcacctgctctgccttgaaatggctatttgggcctttccttttctttttaaacagaaacttttaatgaactgttctcttaacattgacctctcaatgaagttatgttcttaatctcttgctaataatgatttttacttttaagtcacttttgggttcactagtggattaaccagaagtgattgtagttgagtccagttttgctttttaataatgtgttgaagttttagtttttactctttgttgactttgctgcttattggcaccagggacagagtttctagatacaattttatggattggttttaatttttatgagtttgtctctgcagtgattcggtttctcagagtctcatggcatcatagtttttccagaatgacacagtagccaccggtggatgacagcccacgggcggcacagtcacttctgcctgttgctctgacaccaacccaggcagctctgctgtggcttctcctgggctctggcattagttggtctgtgtcacattgtcagaacaggtggctgctgtgtggtgccatcgagtccctgctggttccccttgtcctgggagggtcacccattgcccaaggaagtgcatccacctggcaggtgacctggaggagtagcttccccgaggacccccaggcttggcctgtgattgcgcaaacccacatttcctaagcacactggacacccttcgagtgtgggttttaacatccctgtgagattgaatacttgtgccacacatgtcacaaaagagtatggaaataaaagaaaatttatccg

SEQ ID NO: 212990 - DNA, 2106 bp, Artificial Sequence
  derived and/or modified sequence
atggcccaagctggcgttgttggggaagttacacaagttttatgtgcagccggaggagcccttgagttgcccgaactgcgacggaggctgcggatgggactgtcagctgatgcccttgaaagactgctgaggcagcggggacgcttcgttgttgcggtccgcgctggtggcgcagcagcggcacctgagagggtcgtcttggccgcatcacctttaaggctatgtcgcgctcaccaggggtctaaacctggatgtgttggtttgtgtgctcaactgcacctgtgccggttcatggtgtacggcgcatgtaaattccttcgcgcaggcaaaaactgccgtaattcacacagcctgaccacggagcataatctcagtgtcttacgcactcacggggtggaccatctgagctacaacgaattgtgccagctgctgtttcagaatgacccatggctactccccgagatctgtcagcactacaataaaggcgatggacctcacggaagctgcgcattccagaagcaatgtattaagttacatatttgtcagtacttcctccagggggagtgtaagttcggcacttcatgcaagagatcacatgactttagcaactctgagaatctggagaagctggagaaactcggaatgtcctcagacctggtgagtagactgccaactatctaccggaacgcacacgatattaaaaataagtcttccgcccctagtcgagttccgcctctattcgtcccacaagggacctccgagcgcaaagactcatctggatctgtttcccccaatactctgtcccaagaggaaggcgaccaaatctgtctataccacatccgaaagtcatgttcatttcaagataagtgccatcgagtgcactttcacctgccatatcgctggcagtttctggacaggggcaaatgggaggatctagacaacatggagctcatagaggaagcctactgtaacccaaagatcgagcgaatcctgtgcagtgagagcgcatctacattccactcgcattgcctgaactttaatgcgatgacgtatggggcaacacaggcacggcgtctgagcacagcttcctcagtcaccaagccccctcatttcatcctgacaaccgactggatttggtactggagtgatgaatttggctcttggcaagagtacggccgtcaagggaccgtccatcctgtgacgacggtctcaagcagtgacgtcgagaaagcatatctcgcatactgtactcccggaagtgacgggcaggcagccaccttgaaattccaagccggaaagcacaactacgaattggattttaaggccttcgtacagaagaacctcgtctatgggacaaccaaaaaagtatgcaggagaccaaagtacgtgtcgccccaggacgtaaccaccatgcagacatgcaataccaaattccctgggccaaaatctatcccagactactgggatagttcggctcttcccgacccaggctttcagaagatcacacttagttccagctctgaggagtatcagaaggtctggaacctgtttaataggacgctcccattttactttgtacaaaaaattgaaagagtgcagaatctggccctgtgggaagtgtaccagtggcagaaaggtcagatgcagaagcagaatggtggaaaggccgtagatgaacgtcagctctttcatggaacatcagcgatcttcgtggatgctatatgccagcagaacttcgattggcgggtgtgcggagtacacgggacaagctacggaaaagggtcctacttcgctagagatgctgcgtatagccaccattactctaaatcagatacccaaacacatacgatgtttctcgccagggttctggtcggcgagttcgttcgtggcaacgccagctttgttcgacctcctgccaaggaaggatggtctaacgctttctatgattcttgtgtgaactctgtctcggacccctctatatttgtgattttcgagaaacatcaggtgtatcccgagtatgtgatccagtataccacatctagtaaacctagcgtgaccccctctatattattagcacttgggtcactcttttcaagccgacagtag

SEQ ID NO: 212991 - DNA, 393 bp, Artificial Sequence
  derived and/or modified sequence
atgtttttggccagggtgctcgttggggaattcgtgagaggaaacgccagcttcgtgaggcctcctgccaaggagggatggtctaatgctttttacgattcttgcgtgaattctgttagtgatccctccatatttgtaattttcgaaaagaccagatccacacagagcatgagttcctctacaccacctcctccctccccccgatcacatcctccctcatgctggccttgggcaccctgcagcgccgctgactcggaaaggactggtgtcttccaggccttccacttgctgtgcctcgagatggcaatatgggccttcccgtttctcttcaaacagaagctgttaatgaactgttcgcttaatattgatctttccatgaagctgtgttcttag

SEQ ID NO: 212992 - DNA, 2106 bp, Artificial Sequence
  derived and/or modified sequence
atggcccaggccggcgtggtgggcgaggtgacccaggtgctgtgcgccgccggcggcgccctggagctgcccgagctgagaagaagactgagaatgggcctgagcgccgacgccctggagagactgctgagacagagaggcagattcgtggtggccgtgagagccggcggcgccgccgccgcccccgagagagtggtgctggccgccagccccctgagactgtgcagagcccaccagggcagcaagcccggctgcgtgggcctgtgcgcccagctgcacctgtgcagattcatggtgtacggcgcctgcaagttcctgagagccggcaagaactgcagaaacagccacagcctgaccaccgagcacaacctgagcgtgctgagaacccacggcgtggaccacctgagctacaacgagctgtgccagctgctgttccagaacgacccctggctgctgcccgagatctgccagcactacaacaagggcgacggcccccacggcagctgcgccttccagaagcagtgcatcaagctgcacatctgccagtacttcctgcagggcgagtgcaagttcggcaccagctgcaagagaagccacgacttcagcaacagcgagaacctggagaagctggagaagctgggcatgagcagcgacctggtgagcagactgcccaccatctacagaaacgcccacgacatcaagaacaagagcagcgcccccagcagagtgccccccctgttcgtgccccagggcaccagcgagagaaaggacagcagcggcagcgtgagccccaacaccctgagccaggaggagggcgaccagatctgcctgtaccacatcagaaagagctgcagcttccaggacaagtgccacagagtgcacttccacctgccctacagatggcagttcctggacagaggcaagtgggaggacctggacaacatggagctgatcgaggaggcctactgcaaccccaagatcgagagaatcctgtgcagcgagagcgccagcaccttccacagccactgcctgaacttcaacgccatgacctacggcgccacccaggccagaagactgagcaccgccagcagcgtgaccaagcccccccacttcatcctgaccaccgactggatctggtactggagcgacgagttcggcagctggcaggagtacggcagacagggcaccgtgcaccccgtgaccaccgtgagcagcagcgacgtggagaaggcctacctggcctactgcacccccggcagcgacggccaggccgccaccctgaagttccaggccggcaagcacaactacgagctggacttcaaggccttcgtgcagaagaacctggtgtacggcaccaccaagaaggtgtgcagaagacccaagtacgtgagcccccaggacgtgaccaccatgcagacctgcaacaccaagttccccggccccaagagcatccccgactactgggacagcagcgccctgcccgaccccggcttccagaagatcaccctgagcagcagcagcgaggagtaccagaaggtgtggaacctgttcaacagaaccctgcccttctacttcgtgcagaagatcgagagagtgcagaacctggccctgtgggaggtgtaccagtggcagaagggccagatgcagaagcagaacggcggcaaggccgtggacgagagacagctgttccacggcaccagcgccatcttcgtggacgccatctgccagcagaacttcgactggagagtgtgcggcgtgcacggcaccagctacggcaagggcagctacttcgccagagacgccgcctacagccaccactacagcaagagcgacacccagacccacaccatgttcctggccagagtgctggtgggcgagttcgtgagaggcaacgccagcttcgtgagaccccccgccaaggagggctggagcaacgccttctacgacagctgcgtgaacagcgtgagcgaccccagcatcttcgtgatcttcgagaagcaccaggtgtaccccgagtacgtgatccagtacaccaccagcagcaagcccagcgtgacccccagcatcctgctggccctgggcagcctgttcagcagcagacagtag

SEQ ID NO: 212993 - DNA, 393 bp, Artificial Sequence
  derived and/or modified sequence
atgttcctggccagagtgctggtgggcgagttcgtgagaggcaacgccagcttcgtgagaccccccgccaaggagggctggagcaacgccttctacgacagctgcgtgaacagcgtgagcgaccccagcatcttcgtgatcttcgagaagaccagaagcacccagagcatgagcagcagcaccccccccccccccagccccagaagccacccccccagctgctggccctgggccccctgcagcgccgccgacagcgagagaaccggcgtgttccaggccttccacctgctgtgcctggagatggccatctgggccttccccttcctgttcaagcagaagctgctgatgaactgcagcctgaacatcgacctgagcatgaagctgtgcagctag

SEQ ID NO: 212994 - protein, 875 aa, Artificial Sequence
  derived and/or modified sequence
MDPAPSLGCSLKDVKWSSVAVPLDLLVSTYRLPQIARLDNGECVEGLRENDYLLIHSCRQWTTITAHSLEEGHYVIGPKIEIPVHYAGQFKLLEQDRDIKEPVQYFNSVEEVAKAFPERVYVMEDITFNVKVASGECNEDTEVYNITLCTGDELTLMGQAEILYAKTFKEKSRLNTIFKKIGKLNSISKLGKGKMPCLICMNHRTNESISLPFQCKGRFSTRSPLELQMQEGEHTIRNIVEKTRLPVNVTVPSPPPRNPYDLHFIREGHRYKFVNIQTKTVVVCCVLRNNKILPMHFPLHLTVPKFSLPEHLVKGESWPETLVHHWLGICQEQFDIDEYSRAVRDVKTDWNEECKSPKKGRCSGHNHVPNSLSYARDELTQSFHRLSVCVYGNNLHGNSEVNLHGCRDLGGDWAPFPHDILPYQDSGDSGSDYLFPEASEESAGIPGKSELPYEELWLEEGKPSHQPLTRSLSEKNRCDQFRGSVRSKCATSPLPIPGTLGAAVKSSDTALPPPPVPPKSEAVREECRLLNAPPVPPRSAKPLSTSPSIPPRTVKPARQQTRSPSPTLSYYSSGLHNIVTKTDTNPSESTPVSCYPCNRVKTDSVDLKSPFGSPSAEAVSSRLSWPNHYSGASESQTRSDFLLDPSRSYSYPRQKTPGTPKRNCPAPFDFDGCELLASPTSPVTAEFSSSVSGCPKSASYSLESTDVKSLAAGVTKQSTSCPALPPRAPKLVEEKVASETSPLPLKIDGAEEDPKSGSPDLSEDQYFVKKGMQDIFSASYPFSSPLHLQLAPRSCGDGSPWQPPADLSGLSIEEVSKSLRFIGLSEDVISFFVTEKIDGNLLVQLTEEILSEDFKLSKLQVKKIMQFINGWRPKI

SEQ ID NO: 212995 - DNA, 2628 bp, Artificial Sequence
  derived and/or modified sequence
atggaccccgcccccagcctgggctgcagcctgaaggacgtgaagtggagcagcgtggccgtgcccctggacctgctggtgagcacctacagactgccccagatcgccagactggacaacggcgagtgcgtggagggcctgagagagaacgactacctgctgatccacagctgcagacagtggaccaccatcaccgcccacagcctggaggagggccactacgtgatcggccccaagatcgagatccccgtgcactacgccggccagttcaagctgctggagcaggacagagacatcaaggagcccgtgcagtacttcaacagcgtggaggaggtggccaaggccttccccgagagagtgtacgtgatggaggacatcaccttcaacgtgaaggtggccagcggcgagtgcaacgaggacaccgaggtgtacaacatcaccctgtgcaccggcgacgagctgaccctgatgggccaggccgagatcctgtacgccaagaccttcaaggagaagagcagactgaacaccatcttcaagaagatcggcaagctgaacagcatcagcaagctgggcaagggcaagatgccctgcctgatctgcatgaaccacagaaccaacgagagcatcagcctgcccttccagtgcaagggcagattcagcaccagaagccccctggagctgcagatgcaggagggcgagcacaccatcagaaacatcgtggagaagaccagactgcccgtgaacgtgaccgtgcccagccccccccccagaaacccctacgacctgcacttcatcagagagggccacagatacaagttcgtgaacatccagaccaagaccgtggtggtgtgctgcgtgctgagaaacaacaagatcctgcccatgcacttccccctgcacctgaccgtgcccaagttcagcctgcccgagcacctggtgaagggcgagagctggcccgagaccctggtgcaccactggctgggcatctgccaggagcagttcgacatcgacgagtacagcagagccgtgagagacgtgaagaccgactggaacgaggagtgcaagagccccaagaagggcagatgcagcggccacaaccacgtgcccaacagcctgagctacgccagagacgagctgacccagagcttccacagactgagcgtgtgcgtgtacggcaacaacctgcacggcaacagcgaggtgaacctgcacggctgcagagacctgggcggcgactgggcccccttcccccacgacatcctgccctaccaggacagcggcgacagcggcagcgactacctgttccccgaggccagcgaggagagcgccggcatccccggcaagagcgagctgccctacgaggagctgtggctggaggagggcaagcccagccaccagcccctgaccagaagcctgagcgagaagaacagatgcgaccagttcagaggcagcgtgagaagcaagtgcgccaccagccccctgcccatccccggcaccctgggcgccgccgtgaagagcagcgacaccgccctgccccccccccccgtgccccccaagagcgaggccgtgagagaggagtgcagactgctgaacgccccccccgtgccccccagaagcgccaagcccctgagcaccagccccagcatcccccccagaaccgtgaagcccgccagacagcagaccagaagccccagccccaccctgagctactacagcagcggcctgcacaacatcgtgaccaagaccgacaccaaccccagcgagagcacccccgtgagctgctacccctgcaacagagtgaagaccgacagcgtggacctgaagagccccttcggcagccccagcgccgaggccgtgagcagcagactgagctggcccaaccactacagcggcgccagcgagagccagaccagaagcgacttcctgctggaccccagcagaagctacagctaccccagacagaagacccccggcacccccaagagaaactgccccgcccccttcgacttcgacggctgcgagctgctggccagccccaccagccccgtgaccgccgagttcagcagcagcgtgagcggctgccccaagagcgccagctacagcctggagagcaccgacgtgaagagcctggccgccggcgtgaccaagcagagcaccagctgccccgccctgccccccagagcccccaagctggtggaggagaaggtggccagcgagaccagccccctgcccctgaagatcgacggcgccgaggaggaccccaagagcggcagccccgacctgagcgaggaccagtacttcgtgaagaagggcatgcaggacatcttcagcgccagctaccccttcagcagccccctgcacctgcagctggcccccagaagctgcggcgacggcagcccctggcagccccccgccgacctgagcggcctgagcatcgaggaggtgagcaagagcctgagattcatcggcctgagcgaggacgtgatcagcttcttcgtgaccgagaagatcgacggcaacctgctggtgcagctgaccgaggagatcctgagcgaggacttcaagctgagcaagctgcaggtgaagaagatcatgcagttcatcaacggctggagacccaagatctag

SEQ ID NO: 212996 - DNA, 2628 bp, Artificial Sequence
  derived and/or modified sequence
atggacccggcccctagtctaggatgcagcctgaaagacgtgaagtggtccagcgtcgccgtgccactggatttactggtctccacgtatcgtctaccccaaatagctaggctggacaacggcgagtgcgtcgaaggactgcgggaaaatgactatctgctgattcactcctgccggcagtggactaccataacggcccattccctggaggaggggcactatgtgatcggcccaaaaatagagatacccgtccactacgcgggccaattcaaactgctcgaacaggacagggacatcaaggagccagtgcagtacttcaactccgtggaggaagtcgccaaagcttttccagagcgagtttatgtgatggaagacataaccttcaacgttaaggttgcatctggagagtgcaatgaggatactgaagtgtataacattacactatgtacgggagacgagcttaccctcatggggcaggcagagattctctacgcgaagacttttaaagagaagtctcgtctcaataccatttttaagaagatcggcaagttgaatagcatttctaagctgggaaaggggaagatgccttgcttaatatgcatgaaccataggactaacgagtctatttctttgccttttcagtgcaaaggcaggttttccacacgtagccccttggagctccagatgcaggagggcgagcatactattcgtaacattgtcgaaaaaacaagactcccagtcaatgttaccgtaccaagcccacctccgcggaacccttatgacctccacttcatccgggagggacaccgttacaaatttgttaacatccagaccaagacggttgttgtttgttgtgttctgagaaataacaaaatactccccatgcacttcccactgcacctgaccgtgcctaagttttctctgcccgaacacctggttaagggagagtcatggccagagacattagtacatcactggctgggcatttgtcaagagcagttcgatatcgacgagtactcacgggcagtcagagacgtgaaaacagactggaatgaggagtgtaagagccccaagaaaggccgctgctccggacacaatcacgtgcctaactctctaagctacgctcgcgacgaactgacccaaagctttcataggttgtcggtgtgcgtgtatggtaataaccttcatggcaactcagaagtcaacctacacggctgtcgcgatctcggaggagattgggcaccatttccacacgacattcttccctatcaggacagcggcgacagtgggtcagactacctttttcccgaagcaagtgaagagtccgccgggatacccggaaagtcggagctcccatatgaggagctctggcttgaggaggggaagccaagccatcaacctctcacaagaagcctgtcagagaagaaccggtgcgaccagttcagggggtcggttcgatccaaatgcgccacatccccacttcccatccctggaactctgggggccgctgtaaagagttcggatactgcattgcctcccccacccgtgcctcctaaaagcgaagctgtaagagaagagtgccggctgctgaatgccccaccagtgccgcctaggagtgccaaacctctgagcacgtctcctagtatcccaccccgcacggtcaaaccagcgaggcagcagactaggagtccaagccccaccttgtcctactattcaagtggcttgcacaatatagtgaccaaaaccgacactaatcccagcgaaagcacacccgtgagctgttacccttgtaacagagtgaagacagattcagtggaccttaaatcaccattcggaagtccctcagcggaggccgtctcgtccagacttagttggccgaaccactactccggagcatcagaaagtcaaactcgaagtgacttccttctagacccctcccgcagctacagctaccctcggcagaaaacacccggtactccgaagcggaattgcccggctccatttgacttcgacggatgtgagctgttagccagcccgacttcaccagtcactgcggagttttccagcagtgtcagtggctgccccaaatctgcgtcatacagcctggagtcaaccgatgtgaagtccttggcggctggcgtgaccaaacagtcaacgagttgccccgccctgcccccccgggctcccaaactcgttgaggaaaaggtggcaagcgagacatcaccattgcccctaaaaattgatggcgccgaggaggaccctaagtccggatcacctgatctgtccgaagaccagtatttcgttaaaaaaggaatgcaagacatattcagcgcctcctaccccttctcaagtccactacacctgcaactagcgccacgctcatgtggagacggcagtccttggcaacctcccgcagacctgagcggcctcagcatagaggaggtgtccaaatcgctgcgattcatcgggctctctgaggacgtcatctctttcttcgtgactgagaaaatcgacgggaacctgctggtgcaattgaccgaggagatcctgtctgaagactttaagttgagcaaacttcaggtgaagaaaattatgcagttcattaacggttggcgaccgaagatctag

SEQ ID NO: 212997 - DNA, 7012 bp, Artificial Sequence
  derived and/or modified sequence
gcgggtggtgccggtggcggcggcgggggagcgcgggacaggaggcttcggggaagatggacccggcgccctcgctgggctgcagcctcaaggatgtgaagtggagctcggtggccgtgccgctcgacctcctggtcagcacttaccggctgccccagatcgcgcgcctggacaacggagagtgcgtagaagggctgcgggaaaatgactatctgctgattcattcctgccgccagtggaccaccatcactgcccacagcttggaggagggtcactatgtcattgggccaaagatagagattccggtacattatgcagggcaattcaagctgctggaacaagaccgagatataaaggagccagtgcaatatttcaacagtgtggaggaggtggctaaggcatttcctgaacgcgtgtacgtcatggaggatatcacattcaacgtgaaggttgcttcaggtgaatgcaatgaagacactgaagtttacaacatcaccctgtgtactggggatgaactcactctaatggggcaggcagaaatcctttatgcaaagacattcaaggaaaagtcacgactcaacacaatcttcaaaaagattgggaagctcaattccatcagcaagctgggaaaaggcaaaatgccgtgcctcatttgtatgaatcaccggaccaacgaaagcattagccttccattccagtgcaagggcagatttagcacccgaagtcccctggaacttcagatgcaagagggcgaacacaccatccgcaacattgtggagaaaaccaggcttcctgtgaatgtgactgtgccaagccctccaccgagaaacccatacgacctccacttcatccgtgaggggcaccgctataagtttgtgaacatccagaccaagacggtggtggtttgctgtgtgctgcggaacaacaagatcctccccatgcactttcctttgcacttgactgtccccaagttcagcctcccagaacacctggtgaagggagagagctggcccgaaaccctggtccatcactggctaggtatctgccaagaacagttcgacatcgatgagtattcacgggctgtccgtgatgtgaaaaccgactggaatgaagaatgcaagagccccaagaagggtcggtgctctggccacaaccacgtgcccaattcgctcagctacgcccgcgatgagctcacccagtccttccaccgactctcggtctgtgtgtatggcaacaatctccatggcaacagtgaggtgaaccttcatggttgcagggacctggggggagattgggctccctttcctcatgacatcctgccctatcaggactctggagatagtgggagcgactaccttttcccagaagctagtgaagaatcagcaggcatcccgggaaagtcagaacttccctacgaagagctgtggctggaggaaggcaagcccagccatcagcctctcactcgctctctgagcgagaagaacagatgtgatcagtttagaggttctgtccgatccaaatgtgcgacttctcctcttcccatccctgggactctgggagcagcagtgaagtcttcagatactgccctacctccacctccagtgcctcccaaatctgaagccgtcagagaagaatgccggctcctgaacgccccacctgttccaccccgaagcgcaaagcctttgtccaccagtccctccatccctcctcgcacagtcaagccagcgcggcaacagactcgctctcccagccccaccttgtcctactattcttcagggctacacaacatcgtcactaaaactgacacaaatccttctgaaagcactcctgtttcctgctatccatgtaaccgagtgaaaactgattctgtggacctgaaatccccgtttggaagtccttctgctgaagctgtgtcctctcggctctcatggcctaaccattattcaggagcatcagaaagccagaccaggagtgacttcctgctggatccaagcaggagttatagttaccctagacaaaagacgccaggcacaccaaagagaaactgcccagcaccttttgattttgatggctgtgagctcctggccagccccactagcccagtcactgcagaattcagtagcagcgtctctggttgtcccaagtcagccagctactctctggagagcacagatgtgaaatctcttgcagctggtgtgacaaagcagagtacgtcatgccctgccttaccccccagggctccaaaactagtggaagagaaggtcgcctccgaaacatctcctttgcctctgaaaattgatggtgctgaggaagaccccaagtctgggtcaccagatctctcggaggaccagtattttgttaaaaagggcatgcaggacatcttctctgcctcctaccctttctcatctccgctccatctccagctggcccccagatcctgtggcgacggttccccatggcagccacctgctgacctatcaggactctctatagaggaagtgtccaagtcactacggttcattggtttgtccgaagatgtcatatcattctttgttactgaaaagattgatgggaacctgcttgttcagctaacggaagaaatcctctcagaggatttcaaattgagcaaattgcaggtgaagaagataatgcaattcattaatggctggaggcccaaaatatagccaaataacccccggccagcatggaacaaaactgatcaatgcgtgtgctagaaggggtgggctgggacacaatttcatgtttttgcactaaaaaccttctctgtaaatagggataagagaaactcttactatgcagattacgtttttgaatggtgaacaggctattttgtacatcaataaaaatgctgtacagaacacttggaggtgtgccttgtacgtcactcaacaaacactcagcagctgctaaaagaaaaaaaggcatgtgcagagaaatcattcttacccaagtaggtttatgtgagaaggtatgatatttattacaaaatagccaaagctggaagacataaaaatctttaaaaaaaaaaaaaaaacacttttgaacaagtcccttctttcaggagggttgactttagacaattaactgtgttctgtgctctgtcattcagattgcttcttgctaattgttttactcttgtgcctgaaaatgttagtgatacgaattgacactttaatgttgtatgcttggtggggatctttttatcacaaggcattttccaagagtcatatgttgataaagggatatatgttgtccttagaaatcacacaaatcatgaccacaataatttatctgtaactgctgctaattttattgagcagagaaaaaagaatatacatatataaacatgtataggtgcatacacaatacacccggatatgttttacacataattttgattctgatattttagataacatctgttcacttttaaacaatctgttgaggttttgggactgttatctacattgattctcttaggaatagtggacagaatgactccaaagattctcagaaccctgtctcttgaagctcaatcttatttgggttcatcactgaaaacttagaacaaatcagtaaagaatcctgtattgaagaattaagtttgagtttaagcccactcaccgcagggctggtttttgcatgtaatactcccatgatgtctggggaaatgacagtttctgttgaattataattctccggtttaagggtctccttcccctggtgtctgatggtgagaggtctgaagagcatttgtcagagtacattaggcattctcaacctacttcatgctttacgagagctgagaaatcagacgcaccggcctttattattatatatgctacatctgttgagtatttttaaaataccaataagaggacttgtttatttcataaaccacttcttccctctctttcaaagaaaatacattattaccatacttttacattagtctgagaatttttgctaaatatgattaagtattccaaaatataatggcgtcattattcttgacttttttagagaatatacatcttaagactgtattagttctcagagcaaggcatcatctactcccctgcacctgagagtctggccccagattccagatgtgcggacagcccatgaccgaggtgcacacagtgccctcttgaataggaaggtcagccagtgaggcggcagcataacttgcaggatggacttatatcttaccatctcttcctgctaccaaaataaaaaaataaattgaaagacaagacccaccagtctagttttgtagacctgtgaaatgtgtctttatttcttggcattagaagaaagatatttttaatccatatcgtggttttagagttgaagtgaattgatacccaattttccatcttagatctcctttatcaaaaaaaaaagcattttttttctcctaacgtgtctcccaaaatgtaaatactataggcaaaaagagtaccctgtaaaattctcacactggagcacctcttcaaaagtcacagataactcaatgaggaagtgctggtactgcactcacaggacatgagacctatgaagctttcgtgttttgaaagcatccttctgtgtgagggggactgcctcccttagtaaagtaaacctctcagaacttctttttaaaataaaaacagacaagatgcagttactaagctgcaagttttcattggcaaacctagctgaatccgttttaaaatacttagcactcggacacaattctcaaactcaggaagaaggaacagggttggtttgggtttactataaaggttgcctcacataaacaactgactccttttagcgttttttttctttttgtaaaaactttacacaaaatagggttttaaattctttttgcttgttttggacttggtgtatttttgtcaagtttatattgattggcaacgcagagactccttgagggcagggactgtggcctttgattcacttatgctacagtctagtatcactacagtgctgagtaaaagacacagcccctgccctcttggagatcatattgtttatatttgaaatctcagttgctaagagtatgtatgtgtgagtaagaaagacgtgaagtcctatgggcagctgggtatatggagaattacgtgtgtcctgtctttaaaacgtcagcctctattaaggggtacagaacaccccaagatcactaaaacttggaatgtgttggaggcagaaagtatctctctcattgcctagtgttgttgtttttttgttttttgttttttgttttttttactgacctggaattcttttaattgtaataaatatcttctgtcacaaataaatgccacaaataaatgaaattgccattcctaagctgagcacctgtctgtgaaggaccttggtgtcctgactggacagagcattcatagctccaagagaatcatgacaagatatgcaaagcagggataataaggagaaagcccttccctttcgagaagcccttccctttcacagcccttccctgcgattctgcagtgaaaagtgatgcccagagatccacacacagaacccttctaaccagccaggtcaagacttatcatcttatctcctctggcaggtcccctgtaatcaaaagagaggaagtgtctatctaaacaagacccttttgggtccttagattcatggcaaaaatcatcatggcccccatcagaaaagaaaatcagcaataaaccaagccaagcaactaaaatgtataatgtggacctgactcatgttgggaggcagaattcagacactcacagatcaatcttgcaagttttctcttctttaagttgagctgctcaactttatgaactgtgaaatttacttacattctttcaacccacatatatcattgcagtttatgaagttgcagtgaactgcccattcagctaaattgcagtgtttattcttgtctcatgtcgaaatacaacaatcttatgggaaatattatgacagtccgttccaactgttctcagacacatgcataaacagtctctgctcacattccacagccacctgcatgttatccatacagctccctgagaagtccagggatgggaggtggggtgtggaaggatggagggtccttcattttctaaacactttgtataagtcactactcatcgtgcctagcaagtataagattaacattttgaataacaaactggaaaacaaataatccttcaaagaacctagcgaactgttcaaaggaaattttaatttcagtctaccagaaaagttaaatctgttgttggacgtagggggctttcagaaacatgcctcttatatcaatttccactatctttcaagttacctaaaggcaccaggctgcttgagcaagaagaataaaaggcctagagtgcaaattatgtgaagtagagtttttagattgtgggattgtaataatacgggattctcatggttacatcatgttaaatcacactgttcagtctttaaaacttggtgttttaaaatttgtctcattgtgatagccagaaacaaggaataaacgtgatttcagtttaaactatatacaaatatcttctgtaattttgctgctctaatttttaggctataaattttgtaatagagcttatcagatcgcaaatttcctttgtttacaatctcatgtagtagggctcagataatttcttagctataaaccttttctcccactctcatattgtttcatttaaaatatttaagctaagcctaaaaattgaaatcagttaagaatttggagagtttatcttaaatggaaatggtgtattcttttcaaagaattttgtaaccatctttacagtttctttgcttggaaaacttgggttgttaactaccagttaacaatggcattactttccaaaacgttatctaatgggcccaatgtgtacctcaagataaacacagtatgttatgtctaaaaatttccttgtctgttgatttaaatggttctgaaatgtctgta

SEQ ID NO: 212998 - DNA, 2628 bp, Artificial Sequence
  derived and/or modified sequence
atggaccctgcccccagcctgggctgcagcctgaaggatgtgaagtggagctctgtggccgtgcccctggacctgctggtgtccacctaccgcctgccccagatcgcccggctggacaacggggagtgtgtggagggcctgagagaaaatgactacctgctgatccacagctgccggcagtggaccaccatcacagcccacagcctggaggagggccactacgtgattggccccaagattgagatccctgtgcactacgccggccagttcaagctgctggagcaggaccgggacatcaaggagcctgtgcagtacttcaacagcgtggaggaggtggccaaggccttccctgagcgggtgtatgtgatggaggacatcaccttcaacgtgaaggtggccagcggggagtgcaatgaagacacagaggtgtacaacatcaccctgtgcacaggagatgagctgaccctgatgggccaggccgagatcctgtatgccaagaccttcaaggagaagagccggctgaacaccatcttcaagaagattggcaagctgaacagcatcagcaagctgggcaagggcaagatgccctgcctgatctgcatgaaccacaggaccaatgaaagcatcagcctgcccttccagtgcaagggccgcttcagcaccaggagccccctggagctgcagatgcaggagggggagcacaccatcagaaatattgtggagaagacccggctgcctgtgaatgtgacagtgcccagccccccaccaagaaacccctatgacctgcacttcatccgggagggccaccgctacaagtttgtgaacatccagaccaagacagtggtggtgtgctgcgtgctgaggaacaacaagatcctgcccatgcacttccccctgcacctgactgtgcccaagttcagcctgcctgagcacctggtgaagggggagagctggccagagaccctggtgcaccactggctgggcatctgccaggagcagtttgatattgatgagtacagcagagctgtgagagatgtgaagacagactggaatgaggagtgcaagagccccaagaagggccgctgcagcggccacaaccacgtgcccaacagcctgtcctatgccagagatgagctgacccagagcttccaccggctgtctgtgtgtgtgtatggcaacaacctgcacggcaacagcgaggtgaacctgcacggctgccgggacctgggcggggactgggcccccttcccccatgacatcctgccctaccaggacagcggggacagcggcagtgactacctgtttcctgaggccagcgaggagagcgctggcatccctgggaagtctgagctgccctatgaggagctgtggctggaggagggcaagcccagccaccagcccctgaccaggagcctgtctgagaagaacagatgtgaccagttccggggctctgtgcgcagcaaatgtgccaccagccccctgcccatccctggcaccctgggcgctgctgtgaagagcagtgacacagccctgcccccacctcctgtgccccccaagtctgaggccgtgcgggaggagtgccgcctgctgaatgcccctcctgtgccccccaggtctgccaagcccctgagcaccagccccagcatcccccccaggacagtgaagccagcccggcagcagaccaggagccccagccccaccctgagctactacagcagcggcctgcacaacatcgtgaccaagacagacaccaaccccagcgagagcacccctgtgtcctgctacccctgcaacagagtgaagacagacagcgtggacctgaagagccccttcggcagccccagcgctgaggccgtgagcagccggctgtcctggcccaaccactacagcggggccagcgagagccagaccaggagtgacttcctgctggaccccagccgcagctacagctacccccggcagaagaccccaggcacccccaagaggaactgcccagccccctttgattttgatggctgtgagctgctggccagccccaccagccctgtgacagctgagttcagcagctctgtgtctggctgccccaagagcgccagctacagcctggagagcacagatgtgaagagcctggccgccggcgtgaccaagcagagcaccagctgcccagccctgcccccccgggcccccaagctggtggaggagaaggtggccagcgagaccagccccctgcccctgaagattgatggagctgaggaggaccccaagagcggcagcccagacctgtctgaggaccagtactttgtgaagaagggcatgcaggacatcttcagcgccagctaccccttcagcagccccctgcacctgcagctggcccccaggagctgtggagatggcagcccctggcagcccccagctgacctgagcggcctgagcattgaggaggtgtccaagagcctgcgcttcatcggcctgtctgaagatgtgatctccttctttgtgacagagaagattgatggcaacctgctggtgcagctgacagaggagatcctgtctgaggacttcaagctgagcaagctgcaggtgaagaagatcatgcagttcatcaatggctggaggcccaagatctag

SEQ ID NO: 212999 - DNA, 2628 bp, Artificial Sequence
  derived and/or modified sequence
atggaccccgcccccagcctgggctgcagcctgaaggacgtgaagtggagttctgttgccgtccccttagatctgctcgtgagtacttaccggctgccccaaattgcccggctagataatggtgagtgtgtcgaggggttacgggaaaatgattatttgctcattcactcatgccggcagtggacgaccattactgcgcattccctggaggaagggcactatgtgataggacccaagatcgaaatccccgttcattacgccggacagtttaaactgcttgagcaggatcgagacatcaaagaaccagttcagtatttcaattctgtggaggaagtggccaaggcatttcccgaacgggtctacgttatggaggatattaccttcaatgtgaaggttgcttctggtgaatgcaacgaagacaccgaggtctacaatatcaccctgtgcacgggtgacgagttgaccctaatgggccaagcggagatactgtatgccaagacctttaaagaaaagtccagactgaatactatctttaaaaagataggcaagctcaattccatttctaaactggggaagggaaagatgccttgccttatctgcatgaaccaccgcaccaatgagagcattagtttgccatttcagtgcaaggggcgtttctcaacccgcagcccactggaactccagatgcaggaaggagaacacacaattagaaacatcgttgagaaaactcgacttccagttaacgtgactgtgccgagccctccaccacgcaacccctacgacctgcatttcatccgggaaggccaccgctacaaattcgtcaatatccaaactaaaacagtggtggtatgctgtgttctccgtaataataagatcctccctatgcactttcctcttcacctgacggtgcccaaattctctctccccgaacacctggtcaagggagagagctggccagaaaccctcgtacaccactggctgggaatctgccaggagcaattcgacattgatgagtactctcgcgccgtgagggatgtaaagacagattggaatgaagagtgtaaatctccaaagaaaggccgatgttccggacataaccacgtaccaaatagtctgagttacgcgcgggatgaactgactcagagtttccatcgtctcagcgtatgcgtgtacggcaataacttgcatggaaattccgaagtgaatttacatgggtgtcgcgatctcggcggagactgggcacccttcccccatgatatattgccataccaggacagtggagattcaggaagcgactatttgtttcccgaggcaagcgaagaaagcgctggtatcccaggaaagagtgagctcccgtacgaggagctttggctcgaagaggggaaaccctcacatcagcctttaacacgcagccttagcgaaaaaaatcggtgcgaccagtttagggggtccgtaagatctaagtgcgcgacgtcccccctgccgattccgggaaccctgggagcggcagtcaagtcaagcgacaccgctctcccacccccccctgtgcctccgaagagtgaagcagttagagaggaatgtcggctcctcaatgcccccccggtgcccccaaggtcggccaagccactgtccaccagccctagcattcctcccagaacggtgaaacctgccaggcaacagactagatccccctcccccactctgtcatattattcctctgggcttcacaatatcgtaaccaagaccgacaccaacccttcagaatctactcccgtgagctgttatccctgtaatcgggtaaagaccgacagtgtggatctcaagagtcccttcggatctcctagcgccgaagccgtttcctctaggctttcgtggcctaatcactattccggagctagcgaaagccagacgagaagcgacttcttgctggatccaagtcggtcttatagctaccctcgccagaagacaccaggtacccctaaacgaaattgtccagccccctttgacttcgatggctgtgaactcttggcctcaccgacctcccctgtcacagcagagttctcatctagcgtctcgggatgtcctaaatccgcatcttatagtctcgagagtacggatgtcaagagcctggccgccggtgtgaccaagcaaagcacgtcttgccctgccctgccgccccgggcccctaaactcgtcgaagaaaaagtcgccagcgaaacaagccccctgccattgaagattgacggggctgaagaggatcccaagtccggcagcccagacctctctgaggatcagtatttcgtgaagaaggggatgcaggacattttttcggcgtcgtatccgttcagttcacctcttcatctgcagcttgcacctcggtcctgcggggacggttccccctggcagcccccagctgatctgtctggtttgtcaatcgaagaagtctccaagagtctgagatttatcggactctccgaggatgtcatttctttttttgtgacagaaaaaatcgacggaaacctgttggtgcagcttacagaggagatcctgagtgaggattttaaactttccaaactccaagttaagaaaatcatgcagtttatcaatggatggcggcccaaaatatag

SEQ ID NO: 213000 - DNA, 2628 bp, Artificial Sequence
  derived and/or modified sequence
atggaccctgcgccatccctcggctgttcactcaaggacgttaaatggtcgtccgtggccgtacccctggacctgctggtgtcaacctacaggttaccccagatcgcgagactcgataatggggagtgtgtggagggcttacgtgaaaacgattaccttttgattcactcatgtaggcaatggaccacaattactgcacatagccttgaggagggccactatgtgattggacccaagattgaaatacctgtgcattatgccggacagttcaaactgctggagcaggaccgagacatcaaggagccagtacaatactttaatagcgttgaggaagtggcaaaggcctttccagagcgggtgtacgttatggaggatattacttttaacgtcaaggttgcctccggagagtgcaatgaggacacggaggtctacaacatcacgctgtgtacaggagacgagttgaccctcatgggccaggcagaaatcctctatgcaaagactttcaaggagaaatccagactgaacactatctttaagaagatcggaaaactgaatagcatctcaaagctcggaaagggaaagatgccctgcttaatttgtatgaatcatcgaaccaacgaatctattagtctgcccttccagtgcaagggtcgattctctacgagatctccattagaattgcagatgcaggaaggcgaacatactataaggaacatcgtagaaaagaccagactgcctgtgaatgtgaccgttccttcacccccacccagaaatccatacgacctgcattttatcagggagggacaccgttacaaattcgtgaatattcagactaaaaccgttgtcgtgtgttgcgtcctgcggaataacaaaatcttaccaatgcactttccactgcacctgacagtccccaaattttcgttgcctgagcacttggtgaaaggtgagtcctggccggaaacactggtgcaccattggctgggcatttgtcaggaacagtttgacatcgacgaatatagtagagcagtgagggacgttaaaaccgactggaacgaggaatgtaaatcccccaaaaagggaagatgtagcggtcataaccacgtccctaacagcctgtcctatgctcgcgacgagctgactcaaagcttccaccgtctcagcgtgtgtgtatatggaaacaatctgcatggaaattccgaagtgaacctccacgggtgccgtgatctcgggggtgactgggcaccgttcccgcacgacatcctgccatatcaggactccggggatagcggttccgactatctttttcccgaagcttccgaggagtctgccggaatcccaggaaagtctgaactcccctatgaggagctgtggttggaagaggggaagccctcccaccaaccgctgacccgatcccttagtgagaagaaccgctgcgatcagttccgaggaagtgtcaggtccaaatgtgccaccagccccctaccaatcccgggtaccctgggagctgcggtaaagtcttctgataccgctctgccccctccacccgtacccccaaaatctgaagctgtgagggaagagtgcagacttcttaacgctccgccagtgccccctcgaagcgccaagcccctgagcacaagcccttcaattcctcccagaacagttaaacctgcacgccagcaaacacggtctcccagccccacattaagctactacagtagcggtctccataacattgtgacgaaaaccgacacaaatccttccgaatcaacacctgtgtcttgttacccttgtaaccgagttaagacagactccgtggatttgaagagccctttcggctcgcctagtgctgaagccgtgtccagccgattgagctggcccaatcattactcaggggcatcggagtcccaaactaggagcgattttctcctggatccctcacgatcctatagttaccctcggcagaaaacaccgggtacacctaaaaggaactgcccagcacctttcgactttgacggatgcgaactgttggccagtcccactagtcccgtgaccgcagaattctcgtctagtgtgtccggctgccccaaaagtgcatcttattccctcgagtcgactgacgtgaagagtctcgcagctggtgtgacaaagcagagtacgagctgtcccgcactcccaccccgtgctccaaaattagtggaggagaaagttgccagcgagacctcgcccctccctttgaaaatagacggagcagaagaagatccaaaaagcggatcccccgacctgagcgaggatcagtactttgttaagaaaggcatgcaggacatcttctccgcgtcctaccctttctccagccctctgcacctccagttggccccaagatcctgtggagacgggtctccttggcagcccccagccgatctgtctggcctctctatcgaagaagtcagcaaaagtctacgcttcatcggtttaagtgaggatgtaatcagcttcttcgttaccgagaagattgacggcaaccttctggtgcagctgacggaagagatcttgagcgaggacttcaagcttagcaaactgcaggttaagaaaattatgcagttcatcaatggatggcgtccaaagatctag

SEQ ID NO: 213001 - protein, 322 aa, Artificial Sequence
  derived and/or modified sequence
MSGELPPNINIKEPRWDQSTFIGRANHFFTVTDPRNILLTNEQLESARKIVHDYRQGIVPPGLTENELWRAKYIYDSAFHPDTGEKMILIGRMSAQVPMNMTITGCMMTFYRTTPAVLFWQWINQSFNAVVNYTNRSGDAPLTVNELGTAYVSATTGAVATALGLNALTKHVSPLIGRFVPFAAVAAANCINIPLMRQRELKVGIPVTDENGNRLGESANAAKQAITQVVVSRILMAAPGMAIPPFIMNTLEKKAFLKRFPWMSAPIQVGLVGFCLVFATPLCCALFPQKSSMSVTSLEAELQAKIQESHPELRRVYFNKGL

SEQ ID NO: 213002 - protein, 194 aa, Artificial Sequence
  derived and/or modified sequence
MSGELPPNINIKEPRWDQSTFIGRANHFFTVTDPRNILLTNEQLESARKIVHDYRQGIVPPGLTENELWRAKYIYDSAFHPDTGEKMILIGRMSAQVPMNMTITGCMMTFYRTTPAVLFWQWINQSFNAVVNYTNRSGDAPLTVNELGTAYVSATTGAVATALGLNALTKHVSPLIGRFVPFAAVAAANCINIP

SEQ ID NO: 213003 - protein, 144 aa, Artificial Sequence
  derived and/or modified sequence
MSGELPPNINIKEPRWDQSTFIGRANHFFTVTDPRNILLTNEQLESARKIVHDYRQGIVPPGLTENELWRAKYIYDSAFHPDTGEKMILIGRMSAQVPMNMTITGCMMTFYRTTPAVLFWQWINQSFNAVVNYTNRSGDAPLTV

SEQ ID NO: 213004 - DNA, 969 bp, Artificial Sequence
  derived and/or modified sequence
atgagcggcgagctgccccccaacatcaacatcaaggagcccagatgggaccagagcaccttcatcggcagagccaaccacttcttcaccgtgaccgaccccagaaacatcctgctgaccaacgagcagctggagagcgccagaaagatcgtgcacgactacagacagggcatcgtgccccccggcctgaccgagaacgagctgtggagagccaagtacatctacgacagcgccttccaccccgacaccggcgagaagatgatcctgatcggcagaatgagcgcccaggtgcccatgaacatgaccatcaccggctgcatgatgaccttctacagaaccacccccgccgtgctgttctggcagtggatcaaccagagcttcaacgccgtggtgaactacaccaacagaagcggcgacgcccccctgaccgtgaacgagctgggcaccgcctacgtgagcgccaccaccggcgccgtggccaccgccctgggcctgaacgccctgaccaagcacgtgagccccctgatcggcagattcgtgcccttcgccgccgtggccgccgccaactgcatcaacatccccctgatgagacagagagagctgaaggtgggcatccccgtgaccgacgagaacggcaacagactgggcgagagcgccaacgccgccaagcaggccatcacccaggtggtggtgagcagaatcctgatggccgcccccggcatggccatcccccccttcatcatgaacaccctggagaagaaggccttcctgaagagattcccctggatgagcgcccccatccaggtgggcctggtgggcttctgcctggtgttcgccacccccctgtgctgcgccctgttcccccagaagagcagcatgagcgtgaccagcctggaggccgagctgcaggccaagatccaggagagccaccccgagctgagaagagtgtacttcaacaagggcctgtag

SEQ ID NO: 213005 - DNA, 585 bp, Artificial Sequence
  derived and/or modified sequence
atgagcggcgagctgccccccaacatcaacatcaaggagcccagatgggaccagagcaccttcatcggcagagccaaccacttcttcaccgtgaccgaccccagaaacatcctgctgaccaacgagcagctggagagcgccagaaagatcgtgcacgactacagacagggcatcgtgccccccggcctgaccgagaacgagctgtggagagccaagtacatctacgacagcgccttccaccccgacaccggcgagaagatgatcctgatcggcagaatgagcgcccaggtgcccatgaacatgaccatcaccggctgcatgatgaccttctacagaaccacccccgccgtgctgttctggcagtggatcaaccagagcttcaacgccgtggtgaactacaccaacagaagcggcgacgcccccctgaccgtgaacgagctgggcaccgcctacgtgagcgccaccaccggcgccgtggccaccgccctgggcctgaacgccctgaccaagcacgtgagccccctgatcggcagattcgtgcccttcgccgccgtggccgccgccaactgcatcaacatcccctag

SEQ ID NO: 213006 - DNA, 435 bp, Artificial Sequence
  derived and/or modified sequence
atgagcggcgagctgccccccaacatcaacatcaaggagcccagatgggaccagagcaccttcatcggcagagccaaccacttcttcaccgtgaccgaccccagaaacatcctgctgaccaacgagcagctggagagcgccagaaagatcgtgcacgactacagacagggcatcgtgccccccggcctgaccgagaacgagctgtggagagccaagtacatctacgacagcgccttccaccccgacaccggcgagaagatgatcctgatcggcagaatgagcgcccaggtgcccatgaacatgaccatcaccggctgcatgatgaccttctacagaaccacccccgccgtgctgttctggcagtggatcaaccagagcttcaacgccgtggtgaactacaccaacagaagcggcgacgcccccctgaccgtgtag

SEQ ID NO: 213007 - DNA, 969 bp, Artificial Sequence
  derived and/or modified sequence
atgtctggagagttgcctccgaacatcaatattaaggagcctcggtgggaccaatccacatttattgggcgtgccaatcatttcttcacagtgaccgacccgcggaatatcctgttgactaacgaacaacttgagtctgctaggaaaatcgtgcacgactatcgacaggggattgtgcccccagggctgaccgagaacgagttgtggcgtgcaaagtatatttatgactcggcctttcaccctgacacgggcgagaagatgattctgattggccgcatgtctgcacaggtgcctatgaacatgacaattactgggtgcatgatgaccttctaccgtaccactccagccgtactgttctggcagtggatcaatcagagcttcaacgccgtggttaattatactaatagatctggggacgccccccttactgtcaacgagctgggtaccgcatacgtgagcgcaacgaccggagccgtggctacggccctgggcctcaatgccctcactaaacacgtgtctccgctcattggacgattcgtccccttcgccgccgtggccgccgccaactgtattaatatcccactcatgcgtcagcgggagcttaaagtcgggatccccgtgactgacgagaacggcaaccgccttggcgagtcagccaacgccgctaagcaagcaattacacaagtggtcgtgagccggattctgatggctgccccaggaatggccatcccacccttcattatgaataccctggaaaaaaaagcattcctcaagagatttccttggatgtccgcgcccattcaggtgggtttggtcggcttttgcttggtattcgccacccccctgtgctgcgccttattccctcagaagtcctccatgtcagtcacttctctagaggcagagctacaagccaagatacaggaatcccacccagagttacgtagagtatacttcaacaaaggtctctag

SEQ ID NO: 213008 - DNA, 585 bp, Artificial Sequence
  derived and/or modified sequence
atgtccggagagctcccacccaatataaatataaaagagcctaggtgggatcagtccactttcatcgggcgcgccaatcacttcttcactgtgaccgacccaagaaatatcctgctcacaaatgagcagttggagtcagccaggaaaatcgttcatgactacagacagggcattgtgccccccggcttgaccgaaaacgaactctggcgggctaagtacatttacgattccgcctttcaccccgacactggggagaaaatgattctgataggacgcatgagcgcccaggtcccaatgaacatgactatcacaggatgtatgatgactttctacagaacaactcctgctgtgttgttctggcagtggattaatcagtccttcaacgcggttgtgaattataccaataggtccggcgatgcacctttgactgtcaatgagctcgggacagcctacgtgtctgccacgactggtgcagtagctacagctctggggctaaatgcgctgacgaaacatgtctctcctctcataggccgattcgtgccttttgcagcggtcgccgccgccaactgtatcaacattccatag

SEQ ID NO: 213009 - DNA, 435 bp, Artificial Sequence
  derived and/or modified sequence
atgtcgggcgaattgcctccgaatattaacatcaaggagccacgctgggaccagagcacattcataggacgtgcaaaccatttttttaccgtgaccgatccacgtaatatcctcttgaccaacgaacaactggagagcgcgagaaaaattgtccatgactatcgccagggaattgtaccccccggtctgactgaaaatgaactatggcgagccaagtacatttatgactccgcttttcatccagataccggggaaaagatgatactgattggtcgcatgagcgctcaggtaccaatgaatatgactatcaccgggtgcatgatgactttttatcggacgacacccgcggttttattctggcagtggatcaatcaatcgttcaatgccgtggtgaattacaccaacaggtctggtgacgctcctttgactgtttag

SEQ ID NO: 213010 - DNA, 969 bp, Artificial Sequence
  derived and/or modified sequence
atgtctggagagctgccccccaacatcaacatcaaggagccccgctgggaccagagcaccttcatcggccgggccaaccacttcttcaccgtgacagaccccaggaacatcctgctgaccaatgagcagctggagagcgccaggaagatcgtgcatgactaccggcagggcatcgtgcccccaggcctgacagaaaatgagctgtggagggccaagtacatctatgattctgccttccacccagacacaggagagaagatgatcctgattggccgcatgtctgcccaggtgcccatgaacatgaccatcaccggctgcatgatgaccttctaccgcaccaccccagctgtgctcttctggcagtggatcaaccagagcttcaatgctgtggtgaactacaccaacagaagtggagatgcccccctgactgtgaatgagctgggcacagcctacgtgtctgccaccaccggggctgtggccacagccctgggcctgaatgccctgaccaagcacgtgagccccctcatcggccgctttgtgccctttgctgctgtggccgccgccaactgcatcaacatccccctgatgaggcagcgggagctgaaggtgggcatccctgtgacagatgaaaatggaaaccggctgggggagagcgccaatgctgccaagcaggccatcacccaggtggtggtgagccgcatcctgatggccgcccctggcatggccatcccccccttcatcatgaacaccctggagaagaaggccttcctgaagcgcttcccctggatgtctgcccccatccaggtgggcctggtgggcttctgcctggtgtttgccacccccctgtgctgtgccctcttcccccagaagagctccatgtctgtgaccagcctggaggccgagctgcaggccaagatccaggagagccaccctgagctgcggcgggtgtacttcaacaagggcctgtag

SEQ ID NO: 213011 - DNA, 585 bp, Artificial Sequence
  derived and/or modified sequence
atgtctggagagctgccccccaacatcaacatcaaggagccccgctgggaccagagcaccttcatcggccgggccaaccacttcttcaccgtgacagaccccaggaacatcctgctgaccaatgagcagctggagagcgccaggaagatcgtgcatgactaccggcagggcatcgtgcccccaggcctgacagaaaatgagctgtggagggccaagtacatctatgattctgccttccacccagacacaggagagaagatgatcctgattggccgcatgtctgcccaggtgcccatgaacatgaccatcaccggctgcatgatgaccttctaccgcaccaccccagctgtgctcttctggcagtggatcaaccagagcttcaatgctgtggtgaactacaccaacagaagtggagatgcccccctgactgtgaatgagctgggcacagcctacgtgtctgccaccaccggggctgtggccacagccctgggcctgaatgccctgaccaagcacgtgagccccctcatcggccgctttgtgccctttgctgctgtggccgccgccaactgcatcaacatcccctag

SEQ ID NO: 213012 - DNA, 435 bp, Artificial Sequence
  derived and/or modified sequence
atgtctggagagctgccccccaacatcaacatcaaggagccccgctgggaccagagcaccttcatcggccgggccaaccacttcttcaccgtgacagaccccaggaacatcctgctgaccaatgagcagctggagagcgccaggaagatcgtgcatgactaccggcagggcatcgtgcccccaggcctgacagaaaatgagctgtggagggccaagtacatctatgattctgccttccacccagacacaggagagaagatgatcctgattggccgcatgtctgcccaggtgcccatgaacatgaccatcaccggctgcatgatgaccttctaccgcaccaccccagctgtgctcttctggcagtggatcaaccagagcttcaatgctgtggtgaactacaccaacagaagtggagatgcccccctgactgtgtag

SEQ ID NO: 213013 - DNA, 969 bp, Artificial Sequence
  derived and/or modified sequence
atgagcggcgagctgccccccaacatcaacatcaaggagccccggtgggatcagtccactttcatcgggcgagccaaccactttttcaccgtgaccgatccgagaaatattctactgaccaacgagcaactggaaagtgctcggaagatcgtccacgattatcggcaggggattgttcccccgggccttacggaaaacgaactgtggagagccaagtatatttatgacagcgccttccatcctgatactggcgaaaagatgattctaataggacggatgagcgcacaagtgccaatgaacatgaccataacaggatgtatgatgactttttataggaccacgccggctgtgctattctggcagtggataaatcagtcctttaacgccgttgtgaactacaccaatcgcagtggagatgcaccactcacagtaaacgaattaggcacggcctatgtctctgccaccaccggggccgtggctaccgcgctagggctcaatgccctgaccaaacatgtttcccccctcatcgggcggtttgtgccttttgcagccgtggctgcggcgaactgtattaacatacccctcatgaggcagcgggagctgaaggtagggatccctgtaaccgatgaaaacggaaacagactgggggaaagtgcaaacgccgccaaacaggcgatcacgcaggtagtggtgagtcgtatcctcatggcagcacctggaatggccataccacccttcataatgaacacactcgagaagaaggcttttctaaaacgcttcccatggatgtccgcaccaatccaggttgggctggtggggttctgtctcgtgtttgcgactcccctatgctgcgccctcttcccacagaaatcctcaatgtctgtcaccagccttgaagcggaactccaggccaaaatacaggagagccacccagagttgcgaagagtctacttcaacaaagggctctag

SEQ ID NO: 213014 - DNA, 585 bp, Artificial Sequence
  derived and/or modified sequence
atgagcggcgagctgccccccaacatcaacatcaaggagccccggtgggaccagtccacttttataggtagagcaaatcattttttcactgttacagatccaagaaatattctcttgaccaatgagcagttggagtctgcgcgaaaaatcgtgcatgattatagacagggcatagtgccacctggtctgactgaaaacgagctatggagagctaagtacatatatgattcagcattccacccggatactggggaaaagatgatcctgatcggccgaatgagtgcgcaggtgcccatgaacatgaccattactggatgcatgatgaccttttataggactaccccggcggtgttattctggcaatggatcaaccagagctttaacgcggtcgtcaactatacgaacagaagtggggacgcacccctgacggttaacgagctgggaacagcatacgtgtccgcaacaactggcgcggtagctacagctttgggtctgaacgctcttacgaaacacgtgagccccctgattgggaggttcgttccattcgcagcggtggcggcagccaactgcattaacatcccctag

SEQ ID NO: 213015 - DNA, 435 bp, Artificial Sequence
  derived and/or modified sequence
atgagcggcgagctgccccccaacatcaacatcaaggagccccggtgggaccaaagcacctttatagggcgagcaaaccatttctttacagttacagatccacggaacatcctccttacgaacgagcagttggagtctgcccggaagatcgtacatgactatcgtcaggggatagtgccccctggcctgacagagaacgagttatggagagccaaatacatctacgacagcgccttccaccccgataccggggaaaagatgatcctgatcggaagaatgtcagcccaggttcctatgaacatgactatcaccggctgcatgatgaccttttaccgcactactcccgctgtcctgttctggcagtggatcaaccagagttttaatgccgttgtgaactacactaacaggagcggcgacgctcctctgactgtgtag

SEQ ID NO: 213016 - DNA, 969 bp, Artificial Sequence
  derived and/or modified sequence
atgagtggggaactaccccctaacataaacattaaggagccacggtgggaccaatcgacatttattggccgagccaaccattttttcaccgtgacggatccaagaaacatcttactcacaaacgaacagcttgaatctgctaggaagattgtccatgactaccgtcagggtatcgtcccacccggattgaccgagaacgaattgtggagggcaaaatatatttatgatagcgcattccatccagatacgggggaaaagatgatcttgataggtaggatgagcgctcaagtcccaatgaacatgaccatcactgggtgtatgatgactttctatcgcaccaccccagccgtcctgttctggcagtggatcaaccagtcttttaacgcagtcgtcaactacaccaacagaagtggcgatgctccgttgaccgtcaacgaactggggacggcctacgtttcagccacaacgggcgcagttgccacagcccttggtttgaacgcccttacaaagcatgtgtctccgctcatcggaaggttcgtcccatttgccgcagtggctgctgccaactgtatcaatattccactgatgagacaacgggagctcaaggtcgggatacctgtgaccgatgagaacggaaatcggctgggcgaaagcgcaaatgctgccaaacaggccattactcaggtggtagtgtcccgcatcctgatggccgctccgggtatggccataccaccttttatcatgaacactttggaaaagaaagcttttcttaagcggttcccctggatgtcagctcccatccaggtagggctggtcgggttttgtctcgtgtttgcaaccccactgtgctgcgcactgttcccacagaagtcatctatgagtgtgacatctctggaggctgaactgcaggcaaaaattcaggagtctcaccctgaattgaggcgggtgtactttaacaaggggttatag

SEQ ID NO: 213017 - DNA, 585 bp, Artificial Sequence
  derived and/or modified sequence
atgtctggggaactaccacccaacattaacatcaaagagcccaggtgggatcaaagcacctttattggcagggctaaccatttcttcactgtgactgatccgcgaaatatactgctgactaacgaacagcttgaaagcgctcgaaaaatcgtccacgattatcgacagggaatagttccgcctggcctgaccgaaaacgagttatggcgggcaaagtatatctacgacagtgcctttcacccagataccggagaaaaaatgattctgatcggccgaatgtccgcccaggtgcctatgaacatgactataaccggttgtatgatgaccttctaccgcactacccctgctgttctcttctggcagtggataaatcaatcattcaacgcggtggtcaattacaccaaccgcagtggggatgcacccctcaccgtgaatgagctgggaaccgcttatgtgtctgccaccaccggtgctgtcgcgacggctttgggactcaacgcgctgacgaaacatgtatctccattgatcggacgcttcgtaccctttgctgctgtggcggctgctaactgtatcaacataccgtag

SEQ ID NO: 213018 - DNA, 435 bp, Artificial Sequence
  derived and/or modified sequence
atgagtggggaattacccccaaatattaatatcaaggagcctagatgggaccagtctacatttataggacgcgcaaatcattttttcacagtgaccgatcctagaaacatactgctcaccaatgaacagctggagagcgcccgtaaaatcgtccatgattacaggcagggtatcgtccccccaggcctgaccgaaaacgaactgtggagagcaaagtacatatatgattctgccttccatcctgacaccggtgagaaaatgatcttaatcgggaggatgagtgcccaggtcccaatgaatatgactattactggctgcatgatgacgttctaccgcacaacccccgctgtcctgttctggcagtggattaatcagagttttaatgccgtggtaaactacaccaacaggtctggagacgcacccttgactgtctag

SEQ ID NO: 213019 - DNA, 4231 bp, Artificial Sequence
  derived and/or modified sequence
ggcgcggtcgctaagccagaagcggagtcgcgggcgcggggcggggcctggacccgggcctggacccggagggcgggtccctgggcctcgtagctcccgggcccggacgcgcgctcacaggcgcgcgcgaggacgcgctccggggacgcgcgaggacgccgtggcgggagaagcgtttccggtggcggcggaggctgcactgagcgggacctgcgagcagcgcgggcggcagcccgggggaagcgtccgggaccatgtctggagaactaccaccaaacattaacatcaaggaacctcgatgggatcaaagcactttcattggacgagccaatcatttcttcactgtaactgaccccaggaacattctgttaaccaacgaacaactcgagagtgcgagaaaaatagtacatgattacaggcaaggaattgttcctcctggtcttacagaaaatgaattgtggagagcaaagtacatctatgattcagcttttcatcctgacactggtgagaagatgattttgataggaagaatgtcagcccaggttcccatgaacatgaccatcacaggttgtatgatgacgttttacaggactacgccggctgtgctgttctggcagtggattaaccagtccttcaatgccgtcgtcaattacaccaacagaagtggagacgcacccctcactgtcaatgagttgggaacagcttacgtttctgcaacaactggtgccgtagcaacagctctaggactcaatgcattgaccaagcatgtctcaccactgataggacgttttgttccctttgctgccgtagctgctgctaattgcattaatattccattaatgaggcaaagggaactcaaagttggcattcccgtcacggatgagaatgggaaccgcttgggggagtcggcgaacgctgcgaaacaagccatcacgcaagttgtcgtgtccaggattctcatggcagcccctggcatggccatccctccattcattatgaacactttggaaaagaaagcctttttgaagaggttcccatggatgagtgcacccattcaagttgggttagttggcttctgtttggtgtttgctacacccctgtgttgtgccctgtttcctcagaaaagttccatgtctgtgacaagcttggaggccgagttgcaagctaagatccaagagagccatcctgaattgcgacgcgtgtacttcaataagggattgtaaagcagggaggaaacctctgcagctcattctgccactgcaaagctggtgtagccatgctggtgagaaaaatcctgttcaacctgggttctcccagttacggaaaccttttaaagatccacattagccttttagaataaagctgctactttaacagagcacctggcgtgggccaagtgcctgatactcccttacactgaatcatgttatgatttatagaaatacctttcctgtagcttttatagtcattgtttttcaaagacgatataccagccctcacccaggttttaaaaaagcactggtaggcatagaataggtgctcagtatatggtcagtaaatgttctattgattatcaatcagtgaaaaaagaaatctgtttaaaatactgaattttcatctcactcccattgcaaatcaaggagatctcagcagtgaactgggaaaatacaaaagctctgggctaatctataaaaacttaccctgaaatattaagggcagtttgcttctagtttggggattgcgctagcccaatgaaggtgatgaagcttttggatttggagggtaaaagctccttcacaccccttccaaaagtcagtcacagaccactgcaacatgccttccctgctggatcattatatacattcagattgtgagtggattgccttggttgacttttaatttattgttttttgttcttataaagatgataatcttaccttgcagttattgactttatattcaattatttacatcaaataatgaaataactgaaatgtacaaatgtcaaattttggaagtatattcaataccaatgctgtatgagtgggctgaatccagttcattgttttttttttggtaagaagtgagactacagttccagctacctacatgtcttttcttgtcatccttatagatctctttggctttcagaaagatacagtgataatgtgtgtatgaatcagtcacaatgaattttacttgaatattgtatgttgcattccacttcatttgaaaataatgaaaccatgtaccactgtttacatcatctgtagtgatttcatagataatatatttaatatgacagattatgtttcaactctgtagatgtttaacgtcatagacagttggccctctgtatccgtgagctctatatctgtgaattcaaccaagtttggatggaaaattttttttttttttttttttttgagacggagtctcgctctgtcacccaggctggagtgcagtggcgtagtctcggctcactgcaagctccgcctcccgggttcacgccgttctcctgcctcagcctctctgagaagctgggactacaggcgcccgccaccacgcccggctaatttttttgtatttttagtagagacggggtttcactgtggtctcgatctcctgacctcgtgatccgcccgccttggcctcccaaggtgctgggattacaagcgtgagccaccgcacccggcctgaaaatattttctaaaaagataaaaaatatacataacgatgaaaaataatacaaatttaaaaaccaatacagtataacaactatttacatagtgcttacattgtattaggtgttataagcaatctagagatgatttagcaagtatacaggaggatgtgcctaggttatatgcaaatactgtgccattttatatcaggaacttgagcatctgcagatattggtatcggagggcggtcctggaaccaagcatccacggatactgaggggtgacatttcatgaagtgtagatcattgtattcagagattgtaaatgaaaaaaatatagaaactatttagttttggtagattttttttctgacaatgtgaccagactgaatttcctcataaagaaaaaatggcgtgccttgtgtctgtgtttctcttttctctgaaaggattaatagatctgaagctttgggccactcagagccttccttgatgctgccagagtcttcttatttagattttctgtcttaaaccattggaagcaaaacggttttcccatgacattctggccttggacagattctgttgtcctcgacgcgtctctttataaagtggtaaaagcctgaaattcagggcagctctccatgaggtgctgaagggctcttttcataagaagctaaggcactgctgcctgccccaggtgtcccgctcctctcagagtcctccccctaccaggtagtgtgtagctccatttcagaatgttaacctccagtgaagagctaatgactggttagaagattgacaaactaaccaaaattttacacactccggttatgtgtgtgaaaggttataaaaggaatggccgggtgcggtggctcacccctgtaatcccagcactttgggaggccgaggcgggtggatcacctgaggtcaggagtttgagaccagcctggccaacatggagaaaccccgcctctactaaaaatacaaaaaattagccaggcatggaggcacatgcctataatcccagctactcgggaggctgaggtaggagaatcgcttgaatccgggagctggaggttgcagtgagccaagatcgcaccattgcactccagcctgggcaacaagagcgaaactccatctcaaaaaaaaaaaaaagagattataaaagggatgatgaacatggagctgcatctttttaaacgttgttttttgatgcttcagactcttaatgcttttatataaagctatcaactgtatgttgatcacagtttataagaaagaacaaatcaagattggcaatccttgccgatcttttagaaataccttttctggagaaaaaaaaatccacatgaagtgcaataagcttataaagctaagtagttattaatatttctattaacatgatacaaaggatgatgattgtaagtgtttactgactggcagcttttatttcagtattagcacagcgtcttgccagtgttggaggccatgtattatttcagttcaactggatgaaatgttaaataaactcagaatgaaaataaa

SEQ ID NO: 213020 - DNA, 796 bp, Artificial Sequence
  derived and/or modified sequence
cactgagcgggacctgcgagcagcgcgggcggcagcccgggggaagcgaggcatggtcttgctttgtcacccaggctggagtgcagcggcatgatgatagctcactacagctccaactcttgggctcaagcgatccccacaccccactgccacctcagcctcctgagtagctgcaactataggcgtgcaccaccatgcccggataatccgggaccatgtctggagaactaccaccaaacattaacatcaaggaacctcgatgggatcaaagcactttcattggacgagccaatcatttcttcactgtaactgaccccaggaacattctgttaaccaacgaacaactcgagagtgcgagaaaaatagtacatgattacaggcaaggaattgttcctcctggtcttacagaaaatgaattgtggagagcaaagtacatctatgattcagcttttcatcctgacactggtgagaagatgattttgataggaagaatgtcagcccaggttcccatgaacatgaccatcacaggttgtatgatgacgttttacaggactacgccggctgtgctgttctggcagtggattaaccagtccttcaatgccgtcgtcaattacaccaacagaagtggagacgcacccctcactgtcaatgagttgggaacagcttacgtttctgcaacaactggtgccgtagcaacagctctaggactcaatgcattgaccaagcatgtctcaccactgataggacgttttgttccctttgctgccgtagctgctgctaattgcattaatattcc

SEQ ID NO: 213021 - DNA, 572 bp, Artificial Sequence
  derived and/or modified sequence
ctcactctatcacctaggttggagtgcagtggcacaatctcagccgactgcaacctccacatcccaggctccagcaatcctgctacctcagcctcctgagtagctgggaccatacgccaccatgcccagtccgggaccatgtctggagaactaccaccaaacattaacatcaaggaacctcgatgggatcaaagcactttcattggacgagccaatcatttcttcactgtaactgaccccaggaacattctgttaaccaacgaacaactcgagagtgcgagaaaaatagtacatgattacaggcaaggaattgttcctcctggtcttacagaaaatgaattgtggagagcaaagtacatctatgattcagcttttcatcctgacactggtgagaagatgattttgataggaagaatgtcagcccaggttcccatgaacatgaccatcacaggttgtatgatgacgttttacaggactacgccggctgtgctgttctggcagtggattaaccagtccttcaatgccgtcgtcaattacaccaacagaagtggagacgcacccctcactgtcaa

SEQ ID NO: 213022 - protein, 232 aa, Artificial Sequence
  derived and/or modified sequence
MEGMDVDLDPELMQKFSCLGTTDKDVLISEFQRLLGFQLNPAGCAFFLDMTNWNLQAAIGAYYDFESPNISVPSMSFVEDVTIGEGESIPPDTQFVKTWRIQNSDVIWVILSVEVGGLLGVTQQLSSFETEFNTQPHRKVEGNFNPFASPQKNRQSDENNLKDPGGSEFDSISKNTWAPAPDTWAPAPDQTEQDQNRLSQNSVNLSPSSHANNLSVVTYSKGLHGPYPFGQS

SEQ ID NO: 213023 - DNA, 699 bp, Artificial Sequence
  derived and/or modified sequence
atggagggaatggatgtcgatcttgaccccgagctaatgcagaagttcagttgcctcggtacaacagataaggatgtgctgattagcgagttccagagactgctgggtttccagttaaatccggctgggtgtgccttctttcttgatatgaccaactggaatcttcaagccgccatcggggcctattatgacttcgaatcacccaatattagcgtgccgagtatgagctttgtggaagatgtcactattggcgagggtgagtccattcccccggatactcagttcgtcaaaacatggagaattcagaattcagacgtcatatgggttatcttgagtgtcgaagtgggcgggctgctcggtgtcacacagcagctgagcagcttcgaaactgagtttaatacacagcctcacaggaaggtagaaggcaacttcaacccatttgccagtccccagaagaaccgccagagtgatgaaaacaacctcaaggaccccggagggagtgagttcgactctatcagcaagaacacctgggccccggcgcccgatacttgggcgcccgcgcccgaccaaaccgagcaggaccagaacagattgtctcagaactcagtgaacctaagccctagcagtcacgccaataacctgtcggtggttacatattctaaaggactacacggaccttatcccttcggccaaagctag

SEQ ID NO: 213024 - DNA, 699 bp, Artificial Sequence
  derived and/or modified sequence
atggagggcatggatgtggacctggaccctgagctgatgcagaagttcagctgcctgggcaccacagacaaggatgtgctgatcagcgagttccagaggctgctgggcttccagctgaacccagctggctgtgccttcttcctggacatgaccaactggaacctgcaggccgccatcggggcctactatgactttgagagccccaacatctctgtgcccagcatgagctttgtggaggatgtgaccatcggggagggggagagcatccccccagacacccagtttgtgaagacctggaggatccagaacagtgatgtgatctgggtgatcctgtctgtggaggtgggcggcctgctgggcgtgacccagcagctgagcagctttgaaacagagttcaacacccagccccacaggaaggtggagggcaacttcaacccctttgccagcccccagaagaaccggcagagtgatgagaacaacctgaaggaccccggcggcagcgagtttgacagcatcagcaagaacacctgggccccagccccagacacctgggccccagccccagaccagacagagcaggaccagaaccggctgagccagaacagcgtgaacctgagccccagcagccacgccaacaacctgtctgtggtgacctacagcaagggcctgcacggcccctaccccttcggccagagctag

SEQ ID NO: 213025 - DNA, 699 bp, Artificial Sequence
  derived and/or modified sequence
atggagggcatggacgtggacctggaccccgagctgatgcagaagttctcatgtctgggaaccactgataaggatgtgctgatatccgagtttcaacgacttctgggcttccagctgaacccagccggctgtgccttcttcctcgacatgactaattggaatctccaagccgccataggagcctattacgacttcgagtctccaaatatcagcgttcccagtatgtcattcgtcgaagacgtcacaattggggaaggcgaaagtattccgcccgacacccagtttgtgaaaacatggaggatccagaacagtgatgtaatatgggtgatactgagcgtcgaagtcggggggctgctgggcgttacccagcagctttccagttttgaaacagagttcaacacccagcctcataggaaagtagaaggaaattttaacccctttgcctctccgcagaagaatcgacagagtgatgagaacaacctgaaggaccccgggggtagcgaatttgactctatttcgaagaatacttgggcccctgccccagacacttgggcccccgcccctgatcagactgaacaggaccagaatcgtctctcacaaaacagtgtcaatctgtccccttcttcgcacgcaaacaatctgtcagttgtgacctattccaagggtttgcatggcccctacccctttgggcagtcttag

SEQ ID NO: 213026 - DNA, 699 bp, Artificial Sequence
  derived and/or modified sequence
atggaggggatggacgtggatttggatcccgagctcatgcaaaagtttagttgtctcggcacaacggataaagacgtgttgatatcagaattccagcggctgctcggattccaactcaaccccgctgggtgcgccttctttctggacatgactaattggaacctccaagctgcaataggagcctactatgacttcgagtccccgaatatcagcgtcccctcgatgtccttcgtggaggatgttaccatcggagagggggagagcatacccccagacacccaattcgtaaagacatggagaatccagaacagcgacgtaatctgggttatcctgtccgtggaagtgggagggttactgggggtcacccagcagctttcctcctttgagaccgagtttaatactcagccccaccgtaaagttgagggaaatttcaatcctttcgccagtcctcagaaaaaccggcaatccgatgagaacaatctgaaggaccctggcggaagcgagttcgattcaatctccaagaatacctgggctcctgctccagatacttgggccccagctcccgatcaaaccgagcaggatcagaatcggctatcacagaactcagtgaatctcagccctagttcacatgcaaataatctgtctgttgtgacttattcaaaaggactgcatggcccttatccatttggacagtcctag

SEQ ID NO: 213027 - DNA, 4232 bp, Artificial Sequence
  derived and/or modified sequence
ggaggcggaggcggcggagtggcgagaggcgagaggcggcggaggcggcggagctggggggggtgggaggggggggagagtgagtgagtggcagagtgagtttacccctatgagactgtgagaggcccggggcctacctcaaaggagcggggtcgcgaagctagctagcagcggcccccctccaggtccccgggcccggcggcgcggcggcggcttggttgtgaagaggcggggaagcgggtgtccggtccccgccatggagggcatggacgtagacctggacccggagctgatgcagaagttcagctgcctgggcaccaccgacaaggacgtgctcatctccgagttccagaggctgctcggcttccagctcaatcctgccggttgcgccttcttcctggacatgaccaactggaacctacaagcagcaattggcgcctattatgactttgagagcccaaacatcagtgtgccctctatgtcctttgttgaagatgtcaccataggagaaggggagtcaatacctccggatactcagtttgtaaaaacatggcggatccagaattctgatgtcatctgggtgattctcagtgtggaggtgggtggacttttaggagtaacgcagcagctgtcatcttttgaaacggagttcaacacacagccgcatcgtaaggtagaaggaaacttcaacccttttgcctctccccaaaagaaccgacaatcagatgaaaacaacttaaaagaccctgggggctccgagttcgactcgatcagcaaaaacacatgggctcctgctcctgacacatgggctcctgctcctgaccaaactgagcaagaccagaatagactgtcacagaactctgtaaatctgtctcccagcagtcacgcaaacaacttatcagtagtgacttacagtaaggggctccatgggccttaccccttcggccagtcttaaacgggtgtcagcaagaagaaaaattaacaaaagacagaaggcctgactttggggggttagggcaaggggttcctctggattgcagaccacatcgcacagacccctggctctgaccccctctcatcccggaagaagaggaagaagcagaacagactagttttgagtaaactcagtatgcatgtgtgaatgctgaatcacaggaatggtgttgaggctaccaagaagaaatccatgcagccactttgggttttgttataggcatcagtctaacaagtcattaggtcactcgggaagggggaaaaagtttaaaatgggggaaaaaaagccatctttttaaacaaaaattattttgcctacagaaaggttgtagttttgagcacatgttaatttttttccctctttccccacttttatttttttaaataagggataacatattctttatagaatagtgcttgttctggaagagattcaggtgaaaagttggcgtggcatgtttgaggactctgcggatcagtgctacaggagtacatctgccctgccacatgactccagaagtctctgaccccatttgtttttaatggcatcagccaatgagttatcacccttttcctcctcttttctctttaatcttctgttgatttacacctttgacatttgtattcgtcaaccctgtggcttgttagcatcagaacctctctgaagaccaaacttccctgtgtggccagcagaggaagccttgaggatagatctcgggtgacgtgggattttctaagcctgagaggtgtccttctgcacacccttgtaacaattaaaattgcttttcttccatgtttctcttggcagagagaaatgccatcatgcttactgctcttttggattcttcatgcagtggcttcccatttgctctgggaacagtgcctctgtgctggttatatgtatgcaccacatgtgcacacacgggtgttggtgcaactcaccagcaggtgtgcagtaggcaagcttgaaggtggcccatgcttctctgttgtcacacaacacctttccctgtttctcttcagttgtcctctgatattttcacagcctgttagtggcggctgatctgtagaggtatgaaaatacagccccaaagggggaatttgtcatggggaagggccagccactgactacttgatcttggagaccacatttagatggaaatgagaggacctccacagccccgcctccctgccaggatgctagattattggctgggaggtgggcaagtggcagcccagctgaagcaagaggctgattgactggctgctcactcaggcaggtggcctgccctggcatcctgtagattctgagcaggttgagatgtggatatctccatgggaagcttgaaccaggctagaacagctgtctgccaaagatacaagaatatgcaaagtccctcttacccccctccttccctcaagtcttagttggtttgagagccagggatatggatccagggtgctgttgcagggtcacctgcctgttaccacacccccatccagctgggtggtgggtgagggtgtgagacaggcagggagaccaggtaatgagtggctgcaaggagtcatatagcctgggtgtgggtgagggtctgcctgcctgtttctgtctgggtgtctgagttccaaaaaatgtgtgttgtttgttcctcctcatcctcttctgagactgttgtttttttagagcttgattgtgggagaaaagcttgtgtgaaattccctcttcacctccccaccccccaaaaaataaaagggggcataaactttattccactggagaagccctgggggtggctggagccagcctgctgagaagcgtggtgcagctgggtctgggacttcactagagcttactctggagcacctattttctgtgcacatgggagtgctccactccctagcagagcagagggaagtctctgccaggtacccacgccacaggcctcaggatggctttttgtctgagggcctcattaggcccagactgctgctgctggtaccagtctcctgagacactgcctccctggagcccatgcatgcccagctgttcttactgcttagtagccttgaagcagcacatctccactgtccctggcaggattgtgggaggcttcacaacccctgctttcctgacttcctcttctgcccaacactgggtgccccttcccagtttcccagcaggggcttcatgggccaccgtcagtgggtctgggcctgccagagtcgtcttgctcttcctcttgcttctaggcaaccacacttggcaagttaaatgtcccaagcaccttgtctcccttcccaagaacaaaccatttctgtgcacatccttggaggcgagatgagctccttgcagagggccagagtaagtgcaagtcatggagtgcaggcagaggggtccatggcttccccagcccagggagggtatcagtatcattcattctctctcccctcactggtatgggttcagagcaatgcctagggcccctctctgctcccctgcctagtggggtggtagtggctacctctcagccccaatagtccctgctcctcttagaatcttcaccaagtggcaggccacctctgggcaggaccacctgcgtctggcacccaggaggtgaggcagacaccatggttaggtgatagggtctgaacccagttggggagacagaggggttcagacttgggaagaatctgtcagtgtgcatggagtgaggtgtgtgtgtgtggatggatgtgcacgtgtgcatgctttttttctttttgccgtgaggacagttgaatttggggcatttttctacaagaagcagtcagccttctctcccccataaggactggctgtaaccttaagcccatcaaagttacttccagcctggagagaacctcaccaaacagctggtgtggcctgagggtggccatggtgggaaatgggcatgagaataaatacctccccaaattcaatctgagcccagcaggagaggatggtagggttgccagggctcagaagtgcaagctgattactcaccccaccctgcctcgccgcacctttcctttgtttccttgggtgaatgcaggagcagcagtggctgcccttcccacctggacagtggtgtgtgtagaaagccagctggatgtttgtggtggggcctcatggtgcctaggaggagataaagatgaggaggtttttccttattgtataaatgaatatttgtatgattaaattaacacacacaccaaaaaaa

SEQ ID NO: 213028 - DNA, 699 bp, Artificial Sequence
  derived and/or modified sequence
atggagggcatggacgtggacctggaccccgagctgatgcagaagttcagctgcctgggcaccaccgacaaggacgtgctgatcagcgagttccagagactgctgggcttccagctgaaccccgccggctgcgccttcttcctggacatgaccaactggaacctgcaggccgccatcggcgcctactacgacttcgagagccccaacatcagcgtgcccagcatgagcttcgtggaggacgtgaccatcggcgagggcgagagcatcccccccgacacccagttcgtgaagacctggagaatccagaacagcgacgtgatctgggtgatcctgagcgtggaggtgggcggcctgctgggcgtgacccagcagctgagcagcttcgagaccgagttcaacacccagccccacagaaaggtggagggcaacttcaaccccttcgccagcccccagaagaacagacagagcgacgagaacaacctgaaggaccccggcggcagcgagttcgacagcatcagcaagaacacctgggcccccgcccccgacacctgggcccccgcccccgaccagaccgagcaggaccagaacagactgagccagaacagcgtgaacctgagccccagcagccacgccaacaacctgagcgtggtgacctacagcaagggcctgcacggcccctaccccttcggccagagctag

SEQ ID NO: 213029 - protein, 537 aa, Artificial Sequence
  derived and/or modified sequence
MGATGAAEPLQSVLWVKQQRCAVSLEPARALLRWWRSPGPGAGAPGADACSVPVSEIIAVEETDVHGKHQGSGKWQKMEKPYAFTVHCVKRARRHRWKWAQVTFWCPEEQLCHLWLQTLREMLEKLTSRPKHLLVFINPFGGKGQGKRIYERKVAPLFTLASITTDIIVTEHANQAKETLYEINIDKYDGIVCVGGDGMFSEVLHGLIGRTQRSAGVDQNHPRAVLVPSSLRIGIIPAGSTDCVCYSTVGTSDAETSALHIVVGDSLAMDVSSVHHNSTLLRYSVSLLGYGFYGDIIKDSEKKRWLGLARYDFSGLKTFLSHHCYEGTVSFLPAQHTVGSPRDRKPCRAGCFVCRQSKQQLEEEQKKALYGLEAAEDVEEWQVVCGKFLAINATNMSCACRRSPRGLSPAAHLGDGSSDLILIRKCSRFNFLRFLIRHTNQQDQFDFTFVEVYRVKKFQFTSKHMEDEDSDLKEGGKKRFGHICSSHPSCCCTVSNSSWNCDGEVLHSPAIEVRVHCQLVRLFARGIEENPKPDSHS

SEQ ID NO: 213030 - DNA, 4450 bp, Artificial Sequence
  derived and/or modified sequence
ccgcctcccgccgcccgccgcccgccgcccgggccactgcaggggccgctaacggtccggcgcccctcggcgtccgcgcgcccccagcctggcggacgagcccggcggcggagatgggggcgacgggggcggcggagccgctgcaatccgtgctgtgggtgaagcagcagcgctgcgccgtgagcctggagcccgcgcgggctctgctgcgctggtggcggagcccggggcccggagccggcgcccccggcgcggatgcctgctctgtgcctgtatctgagatcatcgccgttgaggaaacagacgttcacgggaaacatcaaggcagtggaaaatggcagaaaatggaaaagccttacgcttttacagttcactgtgtaaagagagcacgacggcaccgctggaagtgggcgcaggtgactttctggtgtccagaggagcagctgtgtcacttgtggctgcagaccctgcgggagatgctggagaagctgacgtccagaccaaagcatttactggtatttatcaacccgtttggaggaaaaggacaaggcaagcggatatatgaaagaaaagtggcaccactgttcaccttagcctccatcaccactgacatcatcgttactgaacatgctaatcaggccaaggagactctgtatgagattaacatagacaaatacgacggcatcgtctgtgtcggcggagatggtatgttcagcgaggtgctgcacggtctgattgggaggacgcagaggagcgccggggtcgaccagaaccacccccgggctgtgctggtccccagtagcctccggattggaatcattcccgcagggtcaacggactgcgtgtgttactccaccgtgggcaccagcgacgcagaaacctcggcgctgcatatcgttgttggggactcgctggccatggatgtgtcctcagtccaccacaacagcacactccttcgctactccgtgtccctgctgggctacggcttctacggggacatcatcaaggacagtgagaagaaacggtggttgggtcttgccagatacgacttttcaggtttaaagaccttcctctcccaccactgctatgaagggacagtgtccttcctccctgcacaacacacggtgggatctccaagggataggaagccctgccgggcaggatgctttgtttgcaggcaaagcaagcagcagctggaggaggagcagaagaaagcactgtatggtttggaagctgcggaggacgtggaggagtggcaagtcgtctgtgggaagtttctggccatcaatgccacaaacatgtcctgtgcttgtcgccggagccccaggggcctctccccggctgcccacttgggagacgggtcttctgacctcatcctcatccggaaatgctccaggttcaattttctgagatttctcatcaggcacaccaaccagcaggaccagtttgacttcacttttgttgaagtttatcgcgtcaagaaattccagtttacgtcgaagcacatggaggatgaggacagcgacctcaaggagggggggaagaagcgctttgggcacatttgcagcagccacccctcctgctgctgcaccgtctccaacagctcctggaactgcgacggggaggtcctgcacagccctgccatcgaggtcagagtccactgccagctggttcgactctttgcacgaggaattgaagagaatccgaagccagactcacacagctgagaagccggcgtcctgctcacaaactgggaaagtgtgaaaactatttaagataattattacagaccaattatgttgatatatacatttaaatgtagaaatttatttttgatagttaaatcttgattttagaagaaaacccttttgtcaacaattttgtgtacatatttggcattttcagttctgtacgcatctgcgggttgcagcccacgccgcttactctcagcggatgcagctgctcacttgggggcactggcctcttaggttttaacgatgtcaacagtgtagtttagaaaatggcccgttagtggctctattgcaataatgttagggacattatatgatttccacgcaggtcacaccatctgggcctgaggtagcagtgggtcactttgatccactttgcaggacttattctgtaacggtttgtggccaagttttgggaagtggttgattctctttgccttcatttcaccttcctcttcgtttacggttaggacatcgctgcttgatccttacaatactgtgcaactgcaatgcaacgtggccctgcttcaggtgatccgcgggaggggcctccacgccagcgccgggaaggctgctggggcctccacacctgcctcatcacggcggcgaggctacgacaatccggctgggagcatgaccttggcgtctgttctgggagcacggatgataagctctggaagctggcagtgtgtaaagcactggcaagtttgttactgttaaaatgtcaaataccaatgctttatatcgacgcgaagtgcttaacacagccgggcttgggggcagtcaggaggaagctggccatccgtggaggaggggccggtcctggactcccgcaggactcctctgaggcagggcctgaagtctgtacacgtggtccagatttgtccttgtcttttcttcacactgagttctctatatttattgaacatcttgtccttttaagccagagtagtgtaaactgcgtctcggatgtctgtcttttgcctcgaagccacgatggatcgctggtttcctctgcagcgcgagggctccggcgaccagaggattcttcccggaaggcattcctgccgcgctccccggggcacccctcaattgtgtactacgtccttgtttagtgtgtatccgtgcccacgtagatgatgtctgtaacgtagttttgtttgaaatatgagaatatgcggcttaaactttgatctgtaaggagcggggccgtggccgtttggagcacgctgtagacaccgttcctcatgctgccgggtgggttttgcagaagctcccttagtgatttcatgtttaacaggcagcatccattttcagaatttcctggcattgatttatattttgaagcatacaggaaacttctcgtttcctcgtttagccccacccagatcaggtgaaagggcagctttaatggtggtttttatggaccacattatcagagagcactgtgcaagccaaatggttcaataatgaatgaaaattctgggtgtaaagagtaaatatgccctggctctttctaccaatgtttgctcctggttggaaagaaaccaaagatttaagacgggctgctcttccagactggctgtgcctgcctgtgcccagcaacctgtgcagccggcagtgtgcctggtgtcacgccaggaggctgtggctgctgtgggccctctggaattgtgctcctcacaaagtttccccaaaaggttcttctaagcctttattgtccctggtaaatgtttcccggctgggcgcggtggctcacgcctgtaatcccagcactttgggaggccgaggcgggtggatcacctaaggtcaggagtttgagatcagcctgcccaacatggtgaaacctcgtctctactaaaaatacacaacttagccagtcttgttggcgcacgcctgtaatctcagctactagggatgctgaggcaggagaatcgcttgaacccaagaaagaggtggaggttgcggtgagccaagattgcgccactgcactccagcctgggcaaacagagggagactccatcgccccccccaacaaaaaaaaaagtttcccatacactggcctgccccaaaacccactaacaattttagcaaaacagtccaggccaaagaggaagcatttcatgttcaataagaaacccagccattccgcatggctggttcctgagtggctctggtgatactctccagccacctgctgacattcagaatctcagacctcgggactgctgttgcggtaccgtgtgtctgacacctgccagcagccctttgctatctgcgcgcaggatgggggtgactgcccagacattcccgctagataggctctgatttccggggcagcctttcagatgcggcagacatacaacacctgtactttagagttttaagggaaaaaaaatcagaagtgctggttagatagtaaaaacttaggataacttagaaaggctagttttagcttcctttgtggctccctggtgcaaaacaattagcagttatgcaatggacctgattctagtttattctaattaagaagtgaggccgagtttgacttcgttcctgaatacaatcttgagtaactgggaaagtctgagtgaaaggatggcctcattctctttctaatcttgctggtttcaagattagaaaatggcattatttgatctgaaatgtttgagaagacacgaataaagttacttgggcag

SEQ ID NO: 213031 - DNA, 1755 bp, Artificial Sequence
  derived and/or modified sequence
gtccggcgcccctcggcgtccgcgcgcccccagcctggcggacgagcccggcggcggagatgggggcgacgggggcggcggagccgctgcaatccgtgctgtgggtgaagcagcagcgctgcgccgtgagcctggagcccgcgcgggctctgctgcgctggtggcggagcccggggcccggagccggcgcccccggcgcggatgcctgctctgtgcctgtatctgagatcatcgccgttgaggaaacagacgttcacgggaaacatcaaggcagtggaaaatggcagaaaatggaaaagccttacgcttttacagttcactgtgtaaagagagcacgacggcaccgctggaagtgggcgcaggtgactttctggtgtccagaggagcagctgtgtcacttgtggctgcagaccctgcgggagatgctggagaagctgacgtccagaccaaagcatttactggtatttatcaacccgtttggaggaaaaggacaaggcaagcggatatatgaaagaaaagtggcaccactgttcaccttagcctccatcaccactgacatcatcgcatcgtctgtgtcggcggagatggtatgttcagcgaggtgctgcacggtctgattgggaggacgcagaggagcgccggggtcgaccagaaccacccccgggctgtgctggtccccagtagcctccggattggaatcattcccgcagggtcaacggactgcgtgtgttactccaccgtgggcaccagcgacgcagaaacctcggcgctgcatatcgttgttggggactcgctggccatggatgtgtcctcagtccaccacaacagcacactccttcgctactccgtgtccctgctgggctacggcttctacggggacatcatcaaggacagtgagaagaaacggtggttgggtcttgccagatacgacttttcaggtttaaagaccttcctctcccaccactgctatgaagggacagtgtccttcctccctgcacaacacacggtgggatctccaagggataggaagccctgccgggcaggatgctttgtttgcaggcaaagcaagcagcagctggaggaggagcagaagaaagcactgtatggtttggaagctgcggaggacgtggaggagtggcaagtcgtctgtgggaagtttctggccatcaatgccacaaacatgtcctgtgcttgtcgccggagccccaggggcctctccccggctgcccacttgggagacgggtcttctgacctcatcctcatccggaaatgctccaggttcaattttctgagatttctcatcaggcacaccaaccagcaggaccagtttgacttcacttttgttgaagtttatcgcgtcaagaaattccagtttacgtcgaagcacatggaggatgaggacagcgacctcaaggagggggggaagaagcgctttgggcacatttgcagcagccacccctcctgctgctgcaccgtctccaacagctcctggaactgcgacggggaggtcctgcacagccctgccatcgaggtcagagtccactgccagctggttcgactctttgcacgaggaattgaagagaatccgaagccagactcacacagctgagaagccggcgtcctgctcacaaactgggaaagtgtgaaaactatttaagataattattacagaccaattatgttgatatatacatttaaatgtagaaatttatttttgatagttaaatcttgattttagaagaaaacccttttgtc

SEQ ID NO: 213032 - DNA, 1614 bp, Artificial Sequence
  derived and/or modified sequence
atgggcgctaccggtgcagccgaaccacttcagagtgttctgtgggtgaaacagcaacgatgtgctgtgagcctcgagcccgctcgagcacttctgcggtggtggaggtctccagggcccggcgctggcgcacctggcgccgacgcatgtagtgtaccagtatccgagatcatcgccgttgaggaaacggatgtgcacggaaagcaccagggctcaggcaaatggcagaagatggaaaaaccctacgccttcacagtccactgcgttaagcgcgcgcggcgtcaccgttggaagtgggcacaagtcacattctggtgcccggaggagcagctctgtcatctgtggctgcagactctacgagagatgctcgagaaactgacaagtcgccccaagcaccttctggtgtttataaacccttttggcggcaagggccagggtaagcgtatctacgaaagaaaggtggcccctctctttacactagcgtcaattacgaccgacattatcgtcacggagcatgctaaccaagcaaaggagactctgtatgagatcaatatcgacaagtacgacgggattgtctgcgtgggcggcgacggcatgttctcagaggtgctgcacggcctgataggccgcacccaacggtctgcgggagtggaccagaatcaccctagggccgtgctggtaccctcatcactgaggatcgggatcatcccagctgggagtaccgactgcgtctgctatagcactgtgggcacaagtgatgcggagacctccgccttgcacatagtcgtcggggactcactcgccatggacgtctcaagcgtccatcacaactccaccctgctgcgatatagcgtgtccctgctcgggtacggcttctacggagacataattaaggatagcgagaagaagagatggctcggcctcgctcgctatgattttagcggactgaagacttttctgtctcaccactgttacgaaggcacagtcagctttttgcctgcgcagcacacagttggttcccctcgggataggaaaccctgtagggcgggttgcttcgtttgtcgacagtccaagcaacagttggaggaagaacagaagaaggctctatatggactggaggccgcagaggacgtcgaagagtggcaggtggtttgcggcaaattcctggctatcaatgcgacaaacatgtcttgcgcatgtcgacggtccccacgaggactttctccagcggcccacctgggggatgggagctctgacctgatcctgattagaaaatgcagccggttcaatttcctgcggtttttgataagacacaccaatcagcaggaccagttcgattttacctttgttgaggtttatagagtcaagaaattccagtttacatccaagcacatggaagacgaggatagcgacttgaaagagggtggaaaaaaacgctttgggcatatatgtagctctcacccgtcttgttgttgcacagtttctaatagctcctggaactgtgatggcgaggtgctccactctccagctatcgaggttagggtgcactgtcagttggtccgcttattcgctaggggtatagaagagaaccccaagccggactcccacagttag

SEQ ID NO: 213033 - DNA, 1614 bp, Artificial Sequence
  derived and/or modified sequence
atgggcgccaccggggctgctgagcccctgcagagcgtgctgtgggtgaagcagcagagatgtgctgtgtccctggagcccgcccgggccctgctgcgctggtggaggagccctggccctggggccggggcccctggagcagatgcctgcagcgtgcctgtgtctgagatcatcgctgtggaggagacagatgtgcacggcaagcaccagggcagcggcaagtggcagaagatggagaagccctatgccttcaccgtgcactgtgtgaagagggcccggcggcaccgctggaagtgggcccaggtgaccttctggtgcccagaggagcagctgtgccacctgtggctgcagaccctgcgggagatgctggagaagctgaccagccggcccaagcacctgctggtgttcatcaacccctttggaggcaagggccagggcaagaggatctatgaaaggaaggtggcccccctcttcaccctggccagcatcaccacagacatcatcgtgacagagcacgccaaccaggccaaggagaccctgtatgagatcaacatcgacaagtatgatggcatcgtgtgtgtgggcggagatggcatgttttctgaggtgctgcacggcctcatcggccgcacccagaggtctgctggggtggaccagaaccaccccagggctgtgctggtgcccagcagcctgagaattggcatcatcccagctggcagcacagactgtgtgtgctacagcacagtgggcaccagtgatgctgagaccagcgccctgcacatcgtggtgggggacagcctggccatggatgtgtcctctgtgcaccacaacagcaccctgctgcgctacagcgtgtccctgctgggctacggcttctatggagacatcatcaaggacagcgagaagaagcgctggctgggcctggcccgctatgacttcagcggcctgaagaccttcctgagccaccactgctatgagggcaccgtgtccttcctgcctgcccagcacacagtgggcagcccccgggacaggaagccctgcagagctggctgctttgtgtgccggcagagcaagcagcagctggaggaggagcagaagaaggccctgtatggcctggaggccgcagaagatgtggaggagtggcaggtggtgtgtgggaagttcctggccatcaatgccaccaacatgagctgtgcctgcagaagaagcccccggggcctgagccctgctgcccacctgggagatggcagcagtgacctgatcctgatcaggaagtgcagccgcttcaacttcctgcgcttcctgatccgccacaccaaccagcaggaccagtttgacttcacctttgtggaggtgtacagagtgaagaagttccagttcaccagcaagcacatggaggatgaggacagcgacctgaaggagggcggcaagaagcgcttcggccacatctgcagcagccaccccagctgctgctgcaccgtgagcaacagctcctggaactgtgatggagaggtgctgcacagccctgccatcgaggtgcgggtgcactgccagctggtgcggctgtttgcccggggcatcgaggagaaccccaagccagacagccacagctag

SEQ ID NO: 213034 - DNA, 1614 bp, Artificial Sequence
  derived and/or modified sequence
atgggcgccaccggcgccgccgagcccctgcagagcgtgctgtgggtgaagcagcagcggtgcgccgtgtcgttagagcccgccagagcactgcttcgctggtggcgaagtccaggacccggagccggggcccccggagctgacgcgtgcagcgtgccagtgagcgagataatcgccgtcgaggaaacagatgtacacggcaagcaccagggctctggaaagtggcagaaaatggagaagccctatgcctttacagtccattgtgtgaagcgcgctcgcagacacagatggaaatgggctcaggtgactttctggtgccccgaggagcagctgtgtcacttgtggctgcaaacgttaagggaaatgttggagaagctgactagccgcccgaaacaccttttagtgttcatcaaccccttcgggggcaagggccagggaaaacggatttatgaacgaaaagtagcccctttatttaccctcgcttccatcacaacggatatcattgtgacggagcacgccaaccaggcaaaggaaaccctgtacgagatcaatatcgacaaatatgacggaattgtatgcgttgggggggatggaatgtttagcgaggtgctccacggtctcatcggaagaacacagaggagtgctggcgttgaccaaaaccaccctcgggccgtcctggtgccgagctccctgcgcatcgggatcatcccagcaggttctacagattgcgtttgttacagcaccgtggggaccagtgatgcagagacaagcgcactccacattgttgttggcgattccctggccatggatgtgagctcagtccaccataacagtacactactaaggtacagtgtttcccttctcggctacggattttacggagatattatcaaagatagtgagaagaaacgatggctgggtctggcccgttacgacttttctggattaaaaacattcttgtcacaccattgctacgaggggacagtgtcatttttaccagcccaacatactgtgggttccccccgggacaggaaaccctgccgtgcggggtgttttgtatgccggcagagtaaacaacagttggaagaagagcagaaaaaggcactgtacggattagaggccgcggaggacgtggaggaatggcaggtggtttgcgggaaattcctcgcgattaacgccacaaacatgagttgtgcttgccgacgatcaccaaggggactatcgcccgcagcgcacctgggagacgggtcctctgatttaatcctgatcagaaaatgtagtcgattcaatttcctccggttcttaatccgccataccaatcagcaggatcagttcgattttacctttgttgaagtataccgagttaagaagttccagttcacttcgaagcacatggaggatgaggacagtgacctgaaagagggggggaagaagcggttcggacatatctgctccagccaccctagctgctgttgtaccgtctctaattctagttggaactgcgatggcgaggtactgcactcaccagccatcgaggtacgagtgcattgtcaactcgtgcggctctttgctcggggaatcgaagagaatccaaagcctgatagccattcctag

SEQ ID NO: 213035 - DNA, 1614 bp, Artificial Sequence
  derived and/or modified sequence
atgggagcgacaggagcggctgagccgcttcagagtgtgctgtgggtgaaacaacaaaggtgcgcagtttccttggagccagctcgggctctgctccggtggtggcgctcacctggaccaggggcaggggctcctggagccgacgcgtgctcagtgccggtgtccgagatcatcgcagtagaggagacggatgtgcacggaaagcatcaggggtcgggcaaatggcagaaaatggaaaagccatacgctttcacggtccattgcgtgaaacgggctcggaggcatcgctggaaatgggcacaggtgactttttggtgtcctgaggaacaactgtgccacctgtggctgcagacattgcgcgagatgctagaaaagttgacgtctcggccaaagcatctactagtgttcattaaccctttcgggggtaagggccagggcaaaaggatctatgagaggaaagtggccccactgttcacgttggcctccatcacgactgatatcattgtcacagagcacgctaaccaagctaaggaaacgctgtatgagattaacatagataaatacgatggcattgtgtgcgtggggggagatggcatgttcagcgaagtccttcacggactgattgggcgtacccagcgcagcgccggagtggatcagaaccatcctagggccgtgctagtcccaagtagcttacgcatcggcataatccccgcaggctcaacagattgtgtgtgttatagtaccgtgggcacatcagacgctgaaacatcagcgctgcacatcgtcgtcggcgattctctggcgatggatgtgtcttctgtccaccataactcaacactcctcaggtattctgtgtctctgttaggttatgggttttatggagacatcatcaaggattctgagaaaaagaggtggctcgggctcgcacgctacgacttttctggactgaaaacctttctgtctcatcattgctacgaaggtacggtcagtttcctaccagctcaacataccgtaggttctccccgtgacagaaagccctgtcgagctgggtgttttgtgtgcaggcaaagcaaacagcagctggaggaagagcagaagaaagccctgtatggtcttgaggccgcagaggatgtcgaggagtggcaggttgtttgtggaaaatttctggcaattaacgcgaccaatatgtcttgtgcatgtagaaggagcccacgcggattatctcccgcagcacacctgggcgatggcagtagcgatctgatcctgatccgcaagtgctcaagatttaactttctgcgattcctgatcaggcacactaatcaacaagatcagtttgactttacttttgttgaggtttatcgggtgaagaagtttcaattcacatcaaaacacatggaagatgaagatagcgaccttaaagaaggcggtaagaaacgattcggacacatatgcagttctcacccttcatgttgctgcactgtgtccaactccagctggaactgcgacggggaggtcctccatagccctgcgatagaggtacgagtgcattgtcagttggtaaggctgtttgctagggggatcgaagaaaatcccaagccggacagtcattcctag

SEQ ID NO: 213036 - DNA, 1614 bp, Artificial Sequence
  derived and/or modified sequence
atgggcgccaccggcgccgccgagcccctgcagagcgtgctgtgggtgaagcagcagagatgcgccgtgagcctggagcccgccagagccctgctgagatggtggagaagccccggccccggcgccggcgcccccggcgccgacgcctgcagcgtgcccgtgagcgagatcatcgccgtggaggagaccgacgtgcacggcaagcaccagggcagcggcaagtggcagaagatggagaagccctacgccttcaccgtgcactgcgtgaagagagccagaagacacagatggaagtgggcccaggtgaccttctggtgccccgaggagcagctgtgccacctgtggctgcagaccctgagagagatgctggagaagctgaccagcagacccaagcacctgctggtgttcatcaaccccttcggcggcaagggccagggcaagagaatctacgagagaaaggtggcccccctgttcaccctggccagcatcaccaccgacatcatcgtgaccgagcacgccaaccaggccaaggagaccctgtacgagatcaacatcgacaagtacgacggcatcgtgtgcgtgggcggcgacggcatgttcagcgaggtgctgcacggcctgatcggcagaacccagagaagcgccggcgtggaccagaaccaccccagagccgtgctggtgcccagcagcctgagaatcggcatcatccccgccggcagcaccgactgcgtgtgctacagcaccgtgggcaccagcgacgccgagaccagcgccctgcacatcgtggtgggcgacagcctggccatggacgtgagcagcgtgcaccacaacagcaccctgctgagatacagcgtgagcctgctgggctacggcttctacggcgacatcatcaaggacagcgagaagaagagatggctgggcctggccagatacgacttcagcggcctgaagaccttcctgagccaccactgctacgagggcaccgtgagcttcctgcccgcccagcacaccgtgggcagccccagagacagaaagccctgcagagccggctgcttcgtgtgcagacagagcaagcagcagctggaggaggagcagaagaaggccctgtacggcctggaggccgccgaggacgtggaggagtggcaggtggtgtgcggcaagttcctggccatcaacgccaccaacatgagctgcgcctgcagaagaagccccagaggcctgagccccgccgcccacctgggcgacggcagcagcgacctgatcctgatcagaaagtgcagcagattcaacttcctgagattcctgatcagacacaccaaccagcaggaccagttcgacttcaccttcgtggaggtgtacagagtgaagaagttccagttcaccagcaagcacatggaggacgaggacagcgacctgaaggagggcggcaagaagagattcggccacatctgcagcagccaccccagctgctgctgcaccgtgagcaacagcagctggaactgcgacggcgaggtgctgcacagccccgccatcgaggtgagagtgcactgccagctggtgagactgttcgccagaggcatcgaggagaaccccaagcccgacagccacagctag

SEQ ID NO: 213037 - protein, 325 aa, Artificial Sequence
  derived and/or modified sequence
MVPREAPESAQCLCPSLTIPNAKDVLRKRHKRRSRQHQRFMARKALLQEQGLLSMPPEPGSSPLPTPFGAATATEAASSGKQCLRAGSGSAPCSRRPAPGKASGPLPSKCVAIDCEMVGTGPRGRVSELARCSIVSYHGNVLYDKYIRPEMPIADYRTRWSGITRQHMRKAVPFQVAQKEILKLLKGKVVVGHALHNDFQALKYVHPRSQTRDTTYVPNFLSEPGLHTRARVSLKDLALQLLHKKIQVGQHGHSSVEDATTAMELYRLVEVQWEQQEARSLWTCPEDREPDSSTDMEQYMEDQYWPDDLAHGSRGGAREAQDRRN

SEQ ID NO: 213038 - protein, 327 aa, Artificial Sequence
  derived and/or modified sequence
MVPREAPESAQCLCPSLTIPNAKDVLRKRHKRRSRQHQRFMARKALLQEQGLLSMPPEPGSSPLPTPFGAATATEAASSGKQCLRAGSGSAPCSRRPAPGKASGPLPSKCVAIDCEMVGTGPRGRVSELARCSIVSYHGNVLYDKYIRPEMPIADYRTRWSGITRQHMRKAVPFQVAQKEILKLLKGKVVVGHALHNDFQALKYVHPRSQTRDTTYVPNFLSEPGLHTRARVSLKDLALQLLHKKIQVGQHGHSSVEDATTAMELYRLVEVQWEQQEARSLWTCPEDREPDSSTDMEQYMEDQSTQYWALKQKSEKQDSGLNSGAFV

SEQ ID NO: 213039 - DNA, 978 bp, Artificial Sequence
  derived and/or modified sequence
atggtaccacgcgaagcacctgagagcgcacaatgtttgtgccctagcctgactattcctaacgccaaggacgtgctgaggaaacggcacaaacgaaggagcaggcagcaccagcggttcatggcccgaaaagcactcctccaggaacagggcctgctgtctatgcctcctgagcccggctccagtcctctaccaactccttttggcgcagccacagcaacagaagccgcctcctcaggcaagcagtgcctccgcgctggaagtggctctgctccctgcagtcggcgaccagccccagggaaagcgtctggcccattaccctctaagtgcgtagccattgactgtgaaatggtgggtaccggcccccgcggtcgagtcagtgagcttgcgcgatgcagtatagtgtcctatcacggcaacgtcctttacgataagtatataaggcccgagatgccaattgctgactataggacccgatggagtggcattacccgacaacacatgcgaaaagcagtaccctttcaggtggcccagaaggagatcctgaaacttttgaaaggcaaagtggtcgttggacacgccctgcacaatgacttccaggcactcaagtacgtacaccctcgatcccagaccagggacactacgtatgtccccaacttcctcagtgagcctggtctgcacacacgcgcccgcgtctctctcaaggatctggctctccagctgctgcataagaagattcaagttggccaacacgggcattcctcggttgaggacgctactacagccatggagctgtatcggctcgtggaggtgcagtgggagcaacaggaggctagaagtttgtggacctgccccgaagacagggaacccgacagctctaccgacatggaacaatatatggaagaccaatattggccagatgatcttgcacacggtagtcgcggcggcgcccgtgaagcgcaagatcgacgtaactag

SEQ ID NO: 213040 - DNA, 984 bp, Artificial Sequence
  derived and/or modified sequence
atggtgccacgcgaggcccctgaatctgctcaatgtctgtgtcccagcctgaccatcccaaacgcgaaagatgttcttcgaaagagacacaaaaggaggtctaggcagcatcagagatttatggcccgtaaggcacttttgcaggagcagggcctcttgagtatgcctccagagcccggctcatctccattgccaacccccttcggcgctgccaccgccaccgaggcagcttcttctgggaagcagtgcctgcgggctggcagtgggagtgccccttgctcaagaagaccagcccctgggaaggcttctgggccactgcctagtaagtgcgtggcaattgactgtgagatggtagggacagggccacgcggccgggtgtcagaactggcgcgctgctctatcgtttcttatcatgggaacgttctgtacgataaatacatcagacctgaaatgcccattgccgattataggacacggtggagtggcattacacgacagcacatgcgtaaagcggtgcctttccaagttgcccagaaggaaattctgaagctgctaaaagggaaggttgtcgtgggccacgctcttcacaacgattttcaggcgttgaagtacgttcaccccaggagtcagacccgcgacaccacctatgttcctaattttctctctgagccagggctgcatacccgggcccgcgtctccttgaaggacctcgccttgcagctcctgcacaagaagattcaggtaggccagcatggtcactcctctgtggaagatgccacaaccgctatggaattatatagactcgttgaggtgcagtgggaacagcaagaagccaggagcctgtggacatgccccgaagatagagaacccgacagtagtactgacatggagcaatatatggaggaccagtccactcagtactgggcactgaagcagaagagtgagaaacaggatagcgggctcaactccggcgctttcgtgtag

SEQ ID NO: 213041 - DNA, 978 bp, Artificial Sequence
  derived and/or modified sequence
atggtgccccgggaggcccctgagagcgcccagtgcctgtgccccagcctgaccatccccaatgccaaggatgtgctgaggaagaggcacaagaggaggagccggcagcaccagcgcttcatggccaggaaggccctgctgcaggagcagggcctgctgtccatgcctcctgagcccggcagcagccccctgcccaccccatttggagctgccacagccacagaggccgccagcagcggcaagcagtgcctgcgggccggcagcggcagcgccccctgcagcagaagacctgcccctgggaaggccagcggccccctgcccagcaaatgtgtggccatcgactgtgagatggtgggcaccggcccccggggccgggtgtctgagctggcccgctgcagcatcgtgtcctaccacggcaatgtgctgtatgacaagtacatccggcctgagatgcccatcgctgactaccgcacccgctggagcggcatcacccggcagcacatgaggaaggctgtgcccttccaggtggcccagaaggagatcctgaagctgctgaagggcaaggtggtggtgggccacgccctgcacaatgacttccaggccctgaagtatgtgcaccccaggagccagacccgggacaccacctacgtgcccaacttcctgtctgagcccggcctgcacacccgggcccgggtgtccctgaaggacctggccctgcagctgctgcacaagaagatccaggtgggccagcacggccacagctctgtggaggatgccaccacagccatggagctgtaccgcctggtggaggtgcagtgggagcagcaggaggcccggagcctgtggacctgcccagaggaccgggagccagacagcagcacagacatggagcagtacatggaggaccagtactggccagatgacctggcccacggcagcagaggaggagcccgggaggcccaggacagaagaaattag

SEQ ID NO: 213042 - DNA, 984 bp, Artificial Sequence
  derived and/or modified sequence
atggtgccccgggaggcccctgagagcgcccagtgcctgtgccccagcctgaccatccccaatgccaaggatgtgctgaggaagaggcacaagaggaggagccggcagcaccagcgcttcatggccaggaaggccctgctgcaggagcagggcctgctgtccatgcctcctgagcccggcagcagccccctgcccaccccatttggagctgccacagccacagaggccgccagcagcggcaagcagtgcctgcgggccggcagcggcagcgccccctgcagcagaagacctgcccctgggaaggccagcggccccctgcccagcaaatgtgtggccatcgactgtgagatggtgggcaccggcccccggggccgggtgtctgagctggcccgctgcagcatcgtgtcctaccacggcaatgtgctgtatgacaagtacatccggcctgagatgcccatcgctgactaccgcacccgctggagcggcatcacccggcagcacatgaggaaggctgtgcccttccaggtggcccagaaggagatcctgaagctgctgaagggcaaggtggtggtgggccacgccctgcacaatgacttccaggccctgaagtatgtgcaccccaggagccagacccgggacaccacctacgtgcccaacttcctgtctgagcccggcctgcacacccgggcccgggtgtccctgaaggacctggccctgcagctgctgcacaagaagatccaggtgggccagcacggccacagctctgtggaggatgccaccacagccatggagctgtaccgcctggtggaggtgcagtgggagcagcaggaggcccggagcctgtggacctgcccagaggaccgggagccagacagcagcacagacatggagcagtacatggaggaccagagcacccagtactgggccctgaagcagaagtctgagaagcaggacagcggcctgaacagcggggcctttgtgtag

SEQ ID NO: 213043 - DNA, 978 bp, Artificial Sequence
  derived and/or modified sequence
atggtgccccgggaggcccccgagagcgcccagtgcctgtgcccctctctgactataccgaatgcgaaggacgttctccggaagaggcacaaacgacgcagcagacagcaccagcggttcatggcccggaaggcccttttgcaggaacagggcctcttaagtatgccacctgagccagggtctagcccgctccctacaccgtttggcgcagctaccgctaccgaagccgcgtctagcggcaaacagtgtctgagagctggttctggaagcgccccttgctcaaggagaccggctcccggcaaggcttctgggcctctgcctagcaaatgcgtggcgattgactgtgaaatggtaggcactgggccgcgtgggcgcgtgtcagaactggcgcggtgttccatcgtcagctatcacggaaacgttctctacgacaagtatatcagacccgagatgcctattgccgattaccgtacccgatggtccggaatcacaaggcagcatatgagaaaagcagtgcctttccaggttgcccaaaaggagattctgaagttgttgaaaggaaaggttgtggtcgggcacgcgctgcataatgactttcaggctttgaagtatgtccacccacgcagtcagacccgagacacaacatatgtgccgaattttcttagcgagcccggcctgcatacccgggcgcgcgtatctctcaaggatctcgccttgcagctgctgcacaaaaaaatccaggtcgggcaacatggtcactcgagtgtcgaggacgcaaccactgctatggagctctatcggttggtggaagtccagtgggagcaacaggaggccagatctttgtggacttgcccagaagacagggaaccagacagcagcaccgacatggagcagtatatggaagatcaatattggcctgacgacctagcacatggttcgaggggcggggctagggaggctcaggaccggcggaactag

SEQ ID NO: 213044 - DNA, 984 bp, Artificial Sequence
  derived and/or modified sequence
atggtgccccgggaggcccccgagagcgcccagtgcctgtgcccctcactgaccattcctaatgcaaaagatgtcctgaggaagcgccacaagcgacggtcgagacagcatcagcgcttcatggcccggaaagctctcctgcaagagcaaggtttactatcgatgcctccagagcccggaagcagccccttacccacccctttcggagccgcgactgccactgaagctgctagctccgggaaacagtgcctcagggccggctccggctctgctccatgttcccgccgtccagcaccaggtaaggcttcaggccccctgcctagtaagtgtgtcgcaattgattgcgaaatggttggaaccgggccacggggacgcgtttcagagctggcgaggtgctccattgtaagctaccacgggaacgttttatacgacaaatacatacggcccgaaatgccaattgcagactatagaactcgctggtccgggattacccggcagcacatgagaaaagccgtgccctttcaagtggctcaaaaggaaattcttaaactactgaaggggaaggttgttgtcggtcacgccttgcataatgacttccaagccctgaaatacgttcaccctcgatcacagacgcgtgatacaacgtatgtacccaactttctctccgaacccggactgcacacaagagctcgcgtgtctctgaaggatctggccctgcaactgcttcataagaagatccaggtcggccaacacgggcattcaagcgtagaggacgccactacagcgatggaactctacaggctcgtagaagtacaatgggagcagcaggaggcgaggtccctatggacatgtcccgaagaccgggaacccgatagtagcactgatatggagcagtatatggaagaccaatccacccaatactgggctttaaaacagaagagtgagaagcaggactccggtcttaattccggcgctttcgtatag

SEQ ID NO: 213045 - DNA, 978 bp, Artificial Sequence
  derived and/or modified sequence
atggtacctagagaagccccagagagcgcccaatgtctgtgcccgagtcttactatccctaatgccaaggatgtgctgagaaaacgacacaagcggcgaagccgtcagcaccagagattcatggcccgtaaggcactgctccaggagcagggtctcttaagtatgccgcctgagccaggaagtagcccactcccgacgcccttcggcgcagcaactgccactgaggccgcatcctctggcaagcagtgcctgagggcgggatcaggctccgcaccctgttcacggagaccagctcccggaaaagcaagcggacccttgccctcaaagtgtgtagccatcgactgcgagatggtcggaaccggcccacgcggacgtgtgagcgagctggctagatgcagcatcgtatcttaccatggcaatgtcctgtacgacaaatatatccgccctgaaatgcctatagccgattatcgcaccagatggtccgggataaccagacagcacatgcggaaagcagtgcccttccaggtagcacagaaggaaatactgaagctgctcaaagggaaagtggtagtgggacatgccctccataatgactttcaggcgctgaagtatgtgcatccccgatcccagaccagagacaccacctacgtacctaatttcctatcagagcctggacttcacactcgcgctcgtgtgtcactgaaggacctcgcgctccagctgctgcacaagaaaatccaagtaggacagcacggtcacagctcagtcgaggatgctacgacggcaatggaactctaccggctagtggaggtccagtgggaacagcaggaggcacgatctctgtggacatgcccggaggaccgggagccagacagctcaacagatatggagcaatatatggaggatcagtattggccggacgacttggctcatggtagccggggtggggctcgggaggcgcaggaccggcgaaactag

SEQ ID NO: 213046 - DNA, 984 bp, Artificial Sequence
  derived and/or modified sequence
atggtgccacgcgaagcccctgagagtgctcagtgtctttgtccgtccctgactatcccgaacgcgaaggacgtccttcgcaagcggcacaaacggcgtagccgacaacaccagcggtttatggctaggaaggccctcctgcaggagcagggcttactttcaatgccgccagaacccggatcaagtcccctcccgacccctttcggcgcagccaccgccaccgaagccgctagcagtggcaagcaatgtctgagggctggttcaggatctgcaccatgttcaaggaggccggctccaggcaaggcctcaggccctctgccgtctaaatgcgtagccattgattgcgagatggtgggaaccggacctcgagggagggtgtcggagctagcacggtgctcaattgtatcataccacggaaacgtcctgtatgacaagtacatcaggccggagatgccaatagccgattaccgcacccgctggagcgggatcaccaggcagcacatgcgcaaggctgtcccatttcaggtcgcccagaaagagatcctgaagctattgaagggcaaggttgttgttggtcacgctcttcacaacgatttccaggccctgaagtacgtacaccctcgatctcagacacgggacacaacctatgtcccaaacttcctgtctgagcctggattgcacacgcgagccagggtctcacttaaagatctcgccctccagctactgcacaaaaagattcaagtgggtcagcatggacactcgtccgtcgaagatgctaccacagcgatggaactgtaccggttggtcgaagttcaatgggaacagcaagaagcaaggtctctgtggacatgcccggaggacagggaaccggactcgagcacggatatggaacaatatatggaggaccaaagtacccagtattgggccctcaaacaaaagagcgagaaacaagactcaggcctgaacagcggagcttttgtatag

SEQ ID NO: 213047 - DNA, 3117 bp, Artificial Sequence
  derived and/or modified sequence
agtcggagccgggcttgcccgggcatgtgggagctgccggctttccggacgccacgtgcagaccggaagagacacgcggggcttcaggctgctgccccattggaagattactccccaggcttcccttgccccaagcagtgagctgactggaatggtaccccgggaggcccctgagtctgctcagtgcctgtgcccttccctcaccatcccaaatgccaaggatgtgcttcggaagaggcacaagagaaggagccgacagcaccagcggttcatggcccggaaggccttgctgcaggagcaggggctgctgagcatgcctccagaaccagggtcctccccactgcccacccctttcggggcagcgacagcaactgaagctgccagcagtgggaagcagtgtctgagggctggatctggcagtgccccatgcagcagaaggcctgctcccgggaaagcctcagggcccttgcccagcaagtgtgtggctatcgactgtgagatggtgggcacgggaccccgagggcgggtaagcgagctggcccgctgttccattgtgagctaccatggcaatgtcctctatgacaagtacatcaggcctgagatgcccatcgctgactaccgtacccgctggagtggcatcactcggcagcacatgcgcaaggctgtccccttccaggtggcccagaaagagatccttaagctcctgaagggcaaggtggtggtggggcacgcgctgcacaacgacttccaggcgctcaagtatgtccaccctcggagccagacccgggatacgacctatgtcccaaacttcctcagcgagcccggcctccacacccgggcccgggtctctctaaaggacctggccctgcagctgctgcacaagaagatccaggtgggccagcacgggcactcatcagtagaagatgccacgacagccatggagctctaccggctggtggaggtgcagtgggaacagcaggaggcccgcagcctctggacctgccccgaggacagagaacctgacagcagcacagacatggaacagtacatggaggaccagtactggcccgatgacctggcccacggcagcagaggaggagccagggaggcacaggacagaaggaattgagaagggggcggggctccctggctgggcttccggtgtggccggtaggaagtgggggccaggagagcagcgggcactccttcctgggcagggtggggcaggatgcagtgagccagccccagggccagaggagtaggggtcatctgttaccttgacaccctctgcacacagcatagccctctctctctccagggctgttggttctttcttctgactcctgtggttttgctaatggcactttacagactccatggagatgtcaggtggaccatcttctagggcccagcaggagtagggaatgtgccaacagactgcccaggttgccgtggccttccccaccccccagatctcctgagtcatcatgctgtgctaatgaaagggatcatatcatcctctctggggatggtgggtgggggtgtcaatatcctggagctcccttaccccaactcaatgacttgggggtaaagttctcttccttttgttgcctacctcttcctccactcatttgggttcagaataaacatgtcctgaagttaaagaggagttaagtcctaaaggaggcatttcttccccacctccctgacctggaactctggctacagccattgtaggaactccgtgcctggcctgtcagctccctgctaggctacagtggaatagcagagcccacaggcttctcgtggggagttggctccttaacatttcttggcaacagaaagccccaggcacagctcagggaggagggaaggcaggtaagctttggacgagaactggcatatttattttgacccaaatcagggatttccccagtccacccagtactgggctcttaagcaaaagtctgagaaacaagacagtggtttgaattctggggcctttgtgtaggattgtgcctgacctttatttatttattaacagcagggccactcgtctagggcagtggagtctgcgtgtctcctggggctggggcagggcattggcagttacgcagtggccctgaacctggtctggtgcccccgaacctggtctgatgccccctcagctctttgacaatcactgtggctgttgggttttctcctatttctaaaaatgttctcttctttcctaagtgacagttttgaagtattggataaccaagagctcaggtcacacagaccttggagccccatctttgcttgcagcttagctttgagatactaagcaagcgagggacttcactcttgaggctgttttttcctcatctgtaaagtggggatagtggtacggcctacctcatagggttgtaatgagcactaaatgtgaagtgcttggcacagtgcctggcacatggtgagccacagctactgtgagtttctgtttatcccccttttttttttttaagcccattgtttattctttgagaatttgttgtaacttcttcaggataacacctgagtccacaggctgagcagctgtggcccagacagaactgctccggcttggctgttccagcaggtggggcgctggcctcggtgagggcacagcagcaaggttcacggatatccgtgtgtcttgtctgtggccaccaggcacaggtttggcttccggtcagtgtcccgacactgtgcgggaggtgacaacagagcaaagcagcgcaggggtcagggaggtacagacactgctgaaatcacactaccccaccctcagctgaagccccacgttccacaaacttggggtcatagattgtccagtcactggctccctccctgtcagcacagcacagaggaaggggctaactgaatcttttaccacttctggcctggctccagaactttgttctagattccttaaaagtcggtagctgatgtcaaactcaattgagcagtagctttgatcccttggtctgggggtcgaaggaagatggtgctgttatcagcggggaaatgtactatttaagatcagctttgttgtaaaaccatttgttctagaataaaactcaattggaaacgtgg

SEQ ID NO: 213048 - DNA, 1067 bp, Artificial Sequence
  derived and/or modified sequence
gagacacgcggggcttcaggctgctgccccattggaagattactccccaggcttcccttgccccaagcagtgagctgactggaatggtaccccgggaggcccctgagtctgctcagtgcctgtgcccttccctcaccatcccaaatgccaaggatgtgcttcggaagaggcacaagagaaggagccgacagcaccagcggttcatggcccggaaggccttgctgcaggagcaggggctgctgagcatgcctccagaaccagggtcctccccactgcccacccctttcggggcagcgacagcaactgaagctgccagcagtgggaagcagtgtctgagggctggatctggcagtgccccatgcagcagaaggcctgctcccgggaaagcctcagggcccttgcccagcaagtgtgtggctatcgactgtgagatggtgggcacgggaccccgagggcgggtaagcgagctggcccgctgttccattgtgagctaccatggcaatgtcctctatgacaagtacatcaggcctgagatgcccatcgctgactaccgtacccgctggagtggcatcactcggcagcacatgcgcaaggctgtccccttccaggtggcccagaaagagatccttaagctcctgaagggcaaggtggtggtggggcacgcgctgcacaacgacttccaggcgctcaagtatgtccaccctcggagccagacccgggatacgacctatgtcccaaacttcctcagcgagcccggcctccacacccgggcccgggtctctctaaaggacctggccctgcagctgctgcacaagaagatccaggtgggccagcacgggcactcatcagtagaagatgccacgacagccatggagctctaccggctggtggaggtgcagtgggaacagcaggaggcccgcagcctctggacctgccccgaggacagagaacctgacagcagcacagacatggaacagtacatggaggaccagtccacccagtactgggctcttaagcaaaagtctgagaaacaagacagtggtttgaattctggggcctttgtgtag

SEQ ID NO: 213049 - DNA, 978 bp, Artificial Sequence
  derived and/or modified sequence
atggtgcccagagaggcccccgagagcgcccagtgcctgtgccccagcctgaccatccccaacgccaaggacgtgctgagaaagagacacaagagaagaagcagacagcaccagagattcatggccagaaaggccctgctgcaggagcagggcctgctgagcatgccccccgagcccggcagcagccccctgcccacccccttcggcgccgccaccgccaccgaggccgccagcagcggcaagcagtgcctgagagccggcagcggcagcgccccctgcagcagaagacccgcccccggcaaggccagcggccccctgcccagcaagtgcgtggccatcgactgcgagatggtgggcaccggccccagaggcagagtgagcgagctggccagatgcagcatcgtgagctaccacggcaacgtgctgtacgacaagtacatcagacccgagatgcccatcgccgactacagaaccagatggagcggcatcaccagacagcacatgagaaaggccgtgcccttccaggtggcccagaaggagatcctgaagctgctgaagggcaaggtggtggtgggccacgccctgcacaacgacttccaggccctgaagtacgtgcaccccagaagccagaccagagacaccacctacgtgcccaacttcctgagcgagcccggcctgcacaccagagccagagtgagcctgaaggacctggccctgcagctgctgcacaagaagatccaggtgggccagcacggccacagcagcgtggaggacgccaccaccgccatggagctgtacagactggtggaggtgcagtgggagcagcaggaggccagaagcctgtggacctgccccgaggacagagagcccgacagcagcaccgacatggagcagtacatggaggaccagtactggcccgacgacctggcccacggcagcagaggcggcgccagagaggcccaggacagaagaaactag

SEQ ID NO: 213050 - DNA, 984 bp, Artificial Sequence
  derived and/or modified sequence
atggtgcccagagaggcccccgagagcgcccagtgcctgtgccccagcctgaccatccccaacgccaaggacgtgctgagaaagagacacaagagaagaagcagacagcaccagagattcatggccagaaaggccctgctgcaggagcagggcctgctgagcatgccccccgagcccggcagcagccccctgcccacccccttcggcgccgccaccgccaccgaggccgccagcagcggcaagcagtgcctgagagccggcagcggcagcgccccctgcagcagaagacccgcccccggcaaggccagcggccccctgcccagcaagtgcgtggccatcgactgcgagatggtgggcaccggccccagaggcagagtgagcgagctggccagatgcagcatcgtgagctaccacggcaacgtgctgtacgacaagtacatcagacccgagatgcccatcgccgactacagaaccagatggagcggcatcaccagacagcacatgagaaaggccgtgcccttccaggtggcccagaaggagatcctgaagctgctgaagggcaaggtggtggtgggccacgccctgcacaacgacttccaggccctgaagtacgtgcaccccagaagccagaccagagacaccacctacgtgcccaacttcctgagcgagcccggcctgcacaccagagccagagtgagcctgaaggacctggccctgcagctgctgcacaagaagatccaggtgggccagcacggccacagcagcgtggaggacgccaccaccgccatggagctgtacagactggtggaggtgcagtgggagcagcaggaggccagaagcctgtggacctgccccgaggacagagagcccgacagcagcaccgacatggagcagtacatggaggaccagagcacccagtactgggccctgaagcagaagagcgagaagcaggacagcggcctgaacagcggcgccttcgtgtag

SEQ ID NO: 213051 - protein, 619 aa, Artificial Sequence
  derived and/or modified sequence
MAASPGSGSANPRKFSEKIALHTQRQAEETRAFEQLMTDLTLSRVQFQKLQQLRLTQYHGGSLPNVSQLRSSASEFQPSFHQADNVRGTRHHGLVERPSRNRFHPLHRRSGDKPGRQFDGSAFGANYSSQPLDESWPRQQPPWKDEKHPGFRLTSALNRTNSDSALHTSALSTKPQDPYGGGGQSAWPAPYMGFCDGENNGHGEVASFPGPLKEENLLNVPKPLPKQLWETKEIQSLSGRPRSCDVGGGNAFPHNGQNLGLSPFLGTLNTGGSLPDLTNLHYSTPLPASLDTTDHHFGSMSVGNSVNNIPAAMTHLGIRSSSGLQSSRSNPSIQATLNKTVLSSSLNNHPQTSVPNASALHPSLRLFSLSNPSLSTTNLSGPSRRRQPPVSPLTLSPGPEAHQGFSRQLSSTSPLAPYPTSQMVSSDRSQLSFLPTEAQAQVSPPPPYPAPQELTQPLLQQPRAPEAPAQQPQAASSLPQSDFQLLPAQGSSLTNFFPDVGFDQQSMRPGPAFPQQVPLVQQGSRELQDSFHLRPSPYSNCGSLPNTILPEDSSTSLFKDLNSALAGLPEVSLNVDTPFPLEEELQIEPLSLDGLNMLSDSSMGLLDPSVEETFRADRL

SEQ ID NO: 213052 - DNA, 1860 bp, Artificial Sequence
  derived and/or modified sequence
atggcagcgtcaccaggaagcggctctgctaacccccgcaaattcagcgagaaaattgccctccatacccagcggcaagcagaagaaacaagggccttcgagcagcttatgaccgaccttactctgtcaagggtacagtttcagaagcttcaacagcttcgactgacccaatatcatgggggcagcctacccaatgtgtcccaactacgaagctccgcaagtgagtttcaacctagtttccatcaggccgacaacgtccgaggaactcgccatcacgggttggtagaacgccccagcaggaatcgctttcacccactccatcgcagatcgggagacaaaccgggccgtcagtttgacggctccgcttttggcgccaattattcaagtcagccactggacgagtcatggccacggcagcagcccccctggaaggatgagaagcatcctgggtttcggcttacttcagcactaaatcgcaccaacagcgactcagccttgcacaccagcgccctgagcactaagcctcaagatccgtacggtgggggcggtcagtccgcatggcccgccccctatatggggttctgcgatggcgagaataatgggcatggtgaggtggcctcgttccctggccccctaaaggaagaaaatctgctgaatgttcctaagcccttgcccaaacagctctgggagactaaggaaattcagtcactgtcaggtcgtccccgatcttgcgatgtggggggtggcaatgcgttcccacataacgggcagaatctggggctgagcccattcctgggtacactcaacacaggaggaagcctgcccgacctgaccaatttacattacagtacacctctcccagcatctctcgacaccaccgatcaccacttcggaagtatgagtgttggaaactcagtgaataatatcccagccgctatgacacacttgggaataaggtcctcttctggcctgcagagctcgcgctctaacccttcaatccaggccaccctgaacaagacagtgctgtcatcctcacttaataaccacccacagacaagcgtgccaaatgcttcagcactgcacccatccctcaggctcttttctctgtctaaccctagtctctcgacaactaatctgtccggcccctcccgcagaaggcaaccgcccgtttcccccctgacgctgagccctgggcccgaagcgcaccaaggattttcccggcaactgtctagtacctcaccattagcaccgtaccctacctctcagatggtttctagcgataggtctcagctctctttcttgccaacagaagcgcaggcacaagtgtccccaccccccccctacccagccccacaggaactgacgcagccgctgctccagcaacccagggcccctgaggccccggcccagcaaccgcaagcagcttcctcactgccgcagagtgattttcagcttctgcctgctcaggggagctccttgaccaacttctttccagatgttggtttcgaccagcagagcatgcggcctggacctgcctttccccagcaggttccactggtccagcaggggtcccgggagctccaggatagttttcatttgcggccatccccctactccaactgtggctctcttcctaacacaattttacccgaagactcatccacctctctttttaaggacctgaatagtgccctcgccggactgccagaagtatctctgaatgtggataccccatttccgcttgaggaggagctccagattgaaccactttccctggatgggttaaacatgctctcagacagttccatgggcctgctagaccccagcgtcgaagagactttcagggcagatcggctatag

SEQ ID NO: 213053 - DNA, 1860 bp, Artificial Sequence
  derived and/or modified sequence
atggccgccagccctggcagcggcagcgccaaccccaggaagttcagcgagaagatcgccctgcacacccagaggcaggccgaggagacccgggcctttgagcagctgatgacagacctgaccctgagccgggtgcagttccagaagctgcagcagctgcggctgacccagtaccatggaggcagcctgcccaacgtgtcccagctgcggagcagcgccagcgagttccagcccagcttccaccaggccgacaacgtgcggggcaccaggcaccacggcctggtggagcggcccagcaggaaccgcttccaccccctgcaccggcgcagcggggacaagccaggccggcagtttgatggcagcgcctttggagccaactacagcagccagcccctggatgagagctggccccggcagcagcccccctggaaggatgagaagcaccctggcttccggctgaccagcgccctgaacagaaccaacagcgacagcgccctgcacaccagcgccctgagcaccaagccccaggacccctatggaggcggcggccagagcgcctggccagccccctacatgggcttctgtgatggagagaacaacggccacggggaggtggccagcttccctggccccctgaaggaggagaacctgctgaatgtgcccaagcccctgcccaagcagctgtgggagaccaaggagatccagagcctgagcggccggcccaggagctgtgatgtgggcggcggcaatgccttcccccacaacggccagaacctgggcctgagccccttcctgggcaccctgaacacaggaggcagcctgcctgacctgaccaacctgcactacagcacccccctgcctgccagcctggacaccacagaccaccacttcggctccatgtctgtgggcaacagcgtgaacaacatcccagctgccatgacccacctgggcatccgcagcagcagcggcctgcagagcagccgcagcaaccccagcatccaggccaccctgaacaagacagtgctgagcagcagcctgaacaaccacccccagacctctgtgcccaatgccagcgccctgcaccccagcctgcggctcttcagcctgagcaaccccagcctgagcaccaccaacctgagcggccccagcagaagacggcagccccctgtgagccccctgaccctgagccctggccctgaggcccaccagggcttcagccggcagctgagcagcaccagccccctggccccctaccccaccagccagatggtgtccagtgacaggagccagctgtccttcctgcccacagaggcccaggcccaggtgagccccccaccaccctacccagccccccaggagctgacccagcccctgctgcagcagccccgggcccctgaggccccagcccagcagccccaggccgccagcagcctgccccagagcgacttccagctgctgcctgcccagggcagcagcctgaccaacttcttcccagatgtgggctttgaccagcagagcatgaggcctggccctgccttcccccagcaggtgcccctggtgcagcagggcagccgggagctgcaggacagcttccacctgcggcccagcccctacagcaactgtggcagcctgcccaacaccatcctgcctgaggacagcagcaccagcctcttcaaggacctgaacagcgccctggccggcctgcctgaggtgtccctgaatgtggacacccccttccccctggaggaggagctgcagatcgagcccctgagcctggatggcctgaacatgctgagtgacagctccatgggcctgctggaccccagcgtggaggagaccttccgggctgaccggctgtag

SEQ ID NO: 213054 - DNA, 1860 bp, Artificial Sequence
  derived and/or modified sequence
atggccgccagccccggcagcggcagcgccaacccccggaagttctcagaaaaaatcgctctgcatactcagcggcaggctgaggagactcgagctttcgaacagctcatgacagacctgactcttagccgagtgcaattccagaaactccagcaactgcgcctcacccagtaccacggcggcagcctgccaaacgtatcccaactgaggtccagtgccagcgaattccagccaagcttccatcaagccgacaatgttagagggactcgtcatcacggactggtagaaagaccgtcgaggaaccgcttccacccacttcaccgtcggtcaggtgataagccaggcaggcagttcgacgggtcagcatttggggcaaactacagctcacaacccctggacgagtcctggcctagacagcagcctccttggaaggacgagaagcaccctggtttccggctcaccagcgctcttaaccgtaccaactctgactccgccctacacacatctgccctgtccacaaaaccccaggatccatacgggggagggggacagagcgcctggccggccccatatatggggttttgcgacggcgagaataacggccacggcgaagtggcgtcgtttcctggacccttgaaggaggaaaatctcctgaacgtccccaagcctctgcccaaacagctctgggagaccaaggaaattcagagcctgagcgggcgccctagatcctgtgacgtcgggggaggtaatgccttcccacacaacgggcagaacctgggcttatcaccttttctaggaacgctgaataccggggggtccctacccgaccttaccaatttacattattccacaccattgcccgccagcctggacaccaccgaccaccactttgggtcaatgagcgtgggtaactcagtgaataacatcccggcagccatgactcacctgggcattcgttccagttccgggctccagtcaagccgtagcaatcccagcatccaggcaaccctcaacaagaccgtgctcagtagtagcctaaataatcatccgcagacctccgtccctaatgcttcagctctccatcctagtttgcgactgttcagcttatcaaacccctccctctctacaacaaacctgtctgggccatctcggagaaggcagcctccagtgagtccgctgacactgtctcctggtcccgaggcccatcagggtttcagccgccagcttagttccacgtcaccattggccccttatccaacaagccagatggttagttccgatagaagccagctcagcttcctgcccactgaggctcaagcacaagtgagcccccctccaccttatcccgctccgcaggaactgactcaacctctgttacaacagccccgggcaccagaggctccagcacagcagccacaggcagcctccagcctaccacaatcggattttcagctcctgcctgcccagggcagcagcctcacaaacttttttcccgatgtgggcttcgatcagcagagcatgaggcctggccccgctttccctcaacaggtgccactggtgcagcaggggagcagagagcttcaggactcttttcacctgaggccctctccctattccaactgtggaagcctcccgaatactatccttcctgaagactcctcaacctcactgtttaaggacctgaacagcgccctagccggcctgcctgaggtgagtctcaacgtagatacacccttccctctcgaagaagagttacagatcgagcctctcagcctggacggcctcaacatgctgagcgattcctcaatgggtctccttgacccatctgtggaagaaactttcagagccgacagactgtag

SEQ ID NO: 213055 - DNA, 1860 bp, Artificial Sequence
  derived and/or modified sequence
atggcagcgtcccccggatccggctctgctaatcctaggaagttctccgagaaaatcgccctccacacacaaagacaggcggaagagacccgggcttttgagcagctgatgaccgacctgactttgtcaagggtgcagttccagaaattgcagcagctgcggcttacacagtatcatggcggatccctgccgaatgtgtcccagctgagatcttccgcctctgaattccagccctctttccaccaggcagacaacgtccggggaactcggcatcacggccttgttgagagaccatcacggaatcgtttccacccgctgcacagacggtcaggagataagcctgggagacaatttgacggctctgcctttggggcaaactactcgtcgcagcctctcgacgaatcgtggcctcggcagcagccaccctggaaggacgagaaacaccccggattcaggctgacatcagcactgaacagaacaaatagtgattccgcactgcacacttcagctttgagcactaagccccaggatccttacggcggaggaggtcagtccgcctggccagccccttatatgggcttttgcgacggagaaaacaacggtcacggcgaggttgccagctttccaggaccattgaaggaggaaaaccttctcaatgttccaaagccactgcctaaacagctatgggaaactaaagagatccaatccctttccggccgtccaagaagttgtgatgttgggggtggtaatgccttcccacacaacggacagaacctgggacttagcccctttctcggcaccctgaataccggcggatctctcccagaccttacgaacctgcactattcaacccccctgccagcaagcctggacacaacggatcatcatttcggctcgatgtccgtggggaactctgtgaacaatattccggctgctatgacacatctcggaattagatcctcgagcggtcttcaatcatctcgcagtaacccatccattcaggcaacactgaataagaccgtcctgtccagttccttaaacaatcacccacaaactagtgtgcccaacgccagtgccttacatccatcgctgaggctgtttagcctatctaatccaagcctgtcaactacaaatttatcagggccatccaggcggcgacagccccctgtaagtcctctgaccttgagccccggaccggaagcgcaccaggggttttcacggcagctgtccagcaccagcccactcgccccataccccacaagtcaaatggtgtcatctgatagatcacagcttagcttcctgccgacagaggcccaagctcaggtaagccctccacccccttacccagcccctcaggagctgactcagccactcttgcagcagcctcgtgctcccgaggcccctgcacagcaacctcaagccgcaagctctctgcctcagtcagattttcagttattgccagcccaaggtagctctctaacaaacttttttccagatgtgggatttgaccagcagtcaatgcgacccggaccagcatttccgcagcaggtccctctggtgcagcaaggcagccgggagttgcaagactcatttcacctgcgccctagcccctactcaaattgtggctccctgccaaacaccatcctccccgaagacagctccacaagcctctttaaggatctcaacagtgcactggccggtctcccagaagtgtccttgaacgtagacacccctttccctttagaggaggaacttcaaatagagcccctcagcctggacggcctgaatatgctaagcgactcctccatgggacttctcgatccaagtgttgaggagactttccgcgcagacagactatag

SEQ ID NO: 213056 - DNA, 2537 bp, Artificial Sequence
  derived and/or modified sequence
cgccatggccgcctcgccgggctcgggcagcgccaacccgcggaagttcagtgagaagatcgcgctgcacacgcagagacaggccgaggagacgcgggccttcgagcagctcatgaccgacctcaccctgtcgcgggttcaatttcagaagcttcagcaactgcgccttacacagtaccatggaggatccttaccaaatgtgagccagctgcggagcagtgcgtcagagtttcagccgtcatttcaccaagctgataatgttcggggaacccgccatcacgggctggtggagaggccatccaggaaccgcttccaccccctccaccgaaggtctggggacaagccagggcgacaatttgatggtagtgcttttggagccaattattcctcacagcctctggatgagagttggccaaggcagcagcctccttggaaagacgaaaagcatcctgggttcaggctgacatctgcacttaacaggaccaattctgattctgctcttcacacgagtgctctgagtaccaagccccaggacccctatggaggagggggccagtcggcctggcctgccccatacatgggtttctgtgatggtgagaataatggacatggggaagtagcatctttccctggcccattgaaagaagagaatctgttaaatgttccgaagccactgccaaaacaactgtgggagaccaaggagattcagtccctgtcaggacgccctcgatcctgtgatgttggaggtggcaatgcttttccacataatggtcaaaacctaggcctctcacccttcttggggaccttgaacactggagggtcattgccagatctaaccaacctccactactcgacacccctgccagcctccctggacaccaccgaccaccactttggcagtatgagtgtggggaatagtgtgaacaacatcccagctgctatgacccacctgggtataagaagctcctctggtctccagagttctcggagtaacccctccatccaagccacgctcaataagactgtgctttcctcttccttaaataaccacccacagacatctgttcccaacgcatctgctcttcacccttcgctccgtctgttttcccttagcaacccatctctttccaccacaaacctgagcggcccgtctcggcgtcggcagcctcccgtcagccctctcacgctttctcctggccctgaagcacatcaaggtttcagcagacagctgtcttcaaccagcccactggccccatatcctacctcccagatggtgtcctcagaccgaagccaactttcctttctgcccacagaagctcaagcccaggtgtcgccgccacccccttaccctgcaccccaggagctcacccagcccctcctgcagcagccccgcgcccctgaggcccctgcccagcagccccaggcagcctcctcactgccacagtcagactttcagcttctcccggcccagggctcatctttgaccaacttcttcccagatgtgggttttgaccagcagtccatgaggccaggccctgcctttcctcaacaggtgcctctggtgcaacaaggttcccgagaactgcaggactcttttcatttgagaccaagcccgtattccaactgcgggagtctcccgaacaccatcctgccagaagactccagcaccagcctgttcaaagacctcaacagtgcgctggcaggcctgcctgaggtcagcctgaacgtggacactccatttccactggaagaggagctgcagattgaacccctgagcctggacggactcaacatgttaagtgactccagcatgggcctgctggacccctctgttgaagagacgtttcgagctgacagactgtgaacagaaggcagtggaacagaagaatgtttttctgcaacagccaaaatagaatggaatagaatgaagccagctgataccacgggctttcgttatcttgacatagaaggaagcaatgccacggctccagggtttcagatgagatcccatctcagacactgtggcttcctccagatcacacagctttgtactgcctctcccgcctgtggccaaagtcgtgttgcagcaggcaggctgcttggagcttcccatgaactggaaagctcacctccactgcatctttttactggccatccagtcagccgatgtgtaagagtaggaaatactgtgtcactggaggcctccgtagcattgtgtagtgtgctcagaaccactgatctccgtccgcaccgaaggcgggcccggagtgggaggctcggcctggggcggcggcaccggagagggcacctcgatgcctgctctgacctgacccagagggcgaggccctccagcgggggacattcccaggctgagtggaccccacggctctctcccacgcctggattacgacatgaagtttttaccacaagcccgagggcaggcttgagttaggcagactgaaggctaattttcattttctcccagctggtttctgctgcttcagaaaagtacaccttttccttatggaccagaggaa

SEQ ID NO: 213057 - DNA, 1860 bp, Artificial Sequence
  derived and/or modified sequence
atggccgccagccccggcagcggcagcgccaaccccagaaagttcagcgagaagatcgccctgcacacccagagacaggccgaggagaccagagccttcgagcagctgatgaccgacctgaccctgagcagagtgcagttccagaagctgcagcagctgagactgacccagtaccacggcggcagcctgcccaacgtgagccagctgagaagcagcgccagcgagttccagcccagcttccaccaggccgacaacgtgagaggcaccagacaccacggcctggtggagagacccagcagaaacagattccaccccctgcacagaagaagcggcgacaagcccggcagacagttcgacggcagcgccttcggcgccaactacagcagccagcccctggacgagagctggcccagacagcagcccccctggaaggacgagaagcaccccggcttcagactgaccagcgccctgaacagaaccaacagcgacagcgccctgcacaccagcgccctgagcaccaagccccaggacccctacggcggcggcggccagagcgcctggcccgccccctacatgggcttctgcgacggcgagaacaacggccacggcgaggtggccagcttccccggccccctgaaggaggagaacctgctgaacgtgcccaagcccctgcccaagcagctgtgggagaccaaggagatccagagcctgagcggcagacccagaagctgcgacgtgggcggcggcaacgccttcccccacaacggccagaacctgggcctgagccccttcctgggcaccctgaacaccggcggcagcctgcccgacctgaccaacctgcactacagcacccccctgcccgccagcctggacaccaccgaccaccacttcggcagcatgagcgtgggcaacagcgtgaacaacatccccgccgccatgacccacctgggcatcagaagcagcagcggcctgcagagcagcagaagcaaccccagcatccaggccaccctgaacaagaccgtgctgagcagcagcctgaacaaccacccccagaccagcgtgcccaacgccagcgccctgcaccccagcctgagactgttcagcctgagcaaccccagcctgagcaccaccaacctgagcggccccagcagaagaagacagccccccgtgagccccctgaccctgagccccggccccgaggcccaccagggcttcagcagacagctgagcagcaccagccccctggccccctaccccaccagccagatggtgagcagcgacagaagccagctgagcttcctgcccaccgaggcccaggcccaggtgagccccccccccccctaccccgccccccaggagctgacccagcccctgctgcagcagcccagagcccccgaggcccccgcccagcagccccaggccgccagcagcctgccccagagcgacttccagctgctgcccgcccagggcagcagcctgaccaacttcttccccgacgtgggcttcgaccagcagagcatgagacccggccccgccttcccccagcaggtgcccctggtgcagcagggcagcagagagctgcaggacagcttccacctgagacccagcccctacagcaactgcggcagcctgcccaacaccatcctgcccgaggacagcagcaccagcctgttcaaggacctgaacagcgccctggccggcctgcccgaggtgagcctgaacgtggacacccccttccccctggaggaggagctgcagatcgagcccctgagcctggacggcctgaacatgctgagcgacagcagcatgggcctgctggaccccagcgtggaggagaccttcagagccgacagactgtag

SEQ ID NO: 213058 - protein, 691 aa, Artificial Sequence
  derived and/or modified sequence
MAAAGVVSGKIIYEQEGVYIHSSCGKTNDQDGLISGILRVLEKDAEVIVDWRPLDDALDSSSILYARKDSSSVVEWTQAPKERGHRGSEHLNSYEAEWDMVNTVSFKRKPHTNGDAPSHRNGKSKWSFLFSLTDLKSIKQNKEGMGWSYLVFCLKDDVVLPALHFHQGDSKLLIESLEKYVVLCESPQDKRTLLVNCQNKSLSQSFENLLDEPAYGLIQAGLLDRRKLLWAIHHWKKIKKDPYTATMIGFSKVTNYIFDSLRGSDPSTHQRPPSEMADFLSDAIPGLKINQQEEPGFEVITRIDLGERPVVQRREPVSLEEWTKNIDSEGRILNVDNMKQMIFRGGLSHALRKQAWKFLLGYFPWDSTKEERTQLQKQKTDEYFRMKLQWKSISQEQEKRNSRLRDYRSLIEKDVNRTDRTNKFYEGQDNPGLILLHDILMTYCMYDFDLGYVQGMSDLLSPLLYVMENEVDAFWCFASYMDQMHQNFEEQMQGMKTQLIQLSTLLRLLDSGFCSYLESQDSGYLYFCFRWLLIRFKREFSFLDILRLWEVMWTELPCTNFHLLLCCAILESEKQQIMEKHYGFNEILKHINELSMKIDVEDILCKAEAISLQMVKCKELPQAVCEILGLQGSEVTTPDSDVGEDENVVMTPCPTSAFQSNALPTLSASGARNDSPTQIPVSSDVCRLTPA

SEQ ID NO: 213059 - DNA, 1338 bp, Artificial Sequence
  derived and/or modified sequence
atgatcggcttcagcaaggtgaccaactacatcttcgacagcctgagaggcagcgaccccagcacccaccagagaccccccagcgagatggccgacttcctgagcgacgccatccccggcctgaagatcaaccagcaggaggagcccggcttcgaggtgatcaccagaatcgacctgggcgagagacccgtggtgcagagaagagagcccgtgagcctggaggagtggaccaagaacatcgacagcgagggcagaatcctgaacgtggacaacatgaagcagatgatcttcagaggcggcctgagccacgccctgagaaagcaggcctggaagttcctgctgggctacttcccctgggacagcaccaaggaggagagaacccagctgcagaagcagaagaccgacgagtacttcagaatgaagctgcagtggaagagcatcagccaggagcaggagaagagaaacagcagactgagagactacagaagcctgatcgagaaggacgtgaacagaaccgacagaaccaacaagttctacgagggccaggacaaccccggcctgatcctgctgcacgacatcctgatgacctactgcatgtacgacttcgacctgggctacgtgcagggcatgagcgacctgctgagccccctgctgtacgtgatggagaacgaggtggacgccttctggtgcttcgccagctacatggaccagatgcaccagaacttcgaggagcagatgcagggcatgaagacccagctgatccagctgagcaccctgctgagactgctggacagcggcttctgcagctacctggagagccaggacagcggctacctgtacttctgcttcagatggctgctgatcagattcaagagagagttcagcttcctggacatcctgagactgtgggaggtgatgtggaccgagctgccctgcaccaacttccacctgctgctgtgctgcgccatcctggagagcgagaagcagcagatcatggagaagcactacggcttcaacgagatcctgaagcacatcaacgagctgagcatgaagatcgacgtggaggacatcctgtgcaaggccgaggccatcagcctgcagatggtgaagtgcaaggagctgccccaggccgtgtgcgagatcctgggcctgcagggcagcgaggtgaccacccccgacagcgacgtgggcgaggacgagaacgtggtgatgaccccctgccccaccagcgccttccagagcaacgccctgcccaccctgagcgccagcggcgccagaaacgacagccccacccagatccccgtgagcagcgacgtgtgcagactgacccccgcctag

SEQ ID NO: 213060 - DNA, 2076 bp, Artificial Sequence
  derived and/or modified sequence
atggccgccgccggcgtggtgagcggcaagatcatctacgagcaggagggcgtgtacatccacagcagctgcggcaagaccaacgaccaggacggcctgatcagcggcatcctgagagtgctggagaaggacgccgaggtgatcgtggactggagacccctggacgacgccctggacagcagcagcatcctgtacgccagaaaggacagcagcagcgtggtggagtggacccaggcccccaaggagagaggccacagaggcagcgagcacctgaacagctacgaggccgagtgggacatggtgaacaccgtgagcttcaagagaaagccccacaccaacggcgacgcccccagccacagaaacggcaagagcaagtggagcttcctgttcagcctgaccgacctgaagagcatcaagcagaacaaggagggcatgggctggagctacctggtgttctgcctgaaggacgacgtggtgctgcccgccctgcacttccaccagggcgacagcaagctgctgatcgagagcctggagaagtacgtggtgctgtgcgagagcccccaggacaagagaaccctgctggtgaactgccagaacaagagcctgagccagagcttcgagaacctgctggacgagcccgcctacggcctgatccaggccggcctgctggacagaagaaagctgctgtgggccatccaccactggaagaagatcaagaaggacccctacaccgccaccatgatcggcttcagcaaggtgaccaactacatcttcgacagcctgagaggcagcgaccccagcacccaccagagaccccccagcgagatggccgacttcctgagcgacgccatccccggcctgaagatcaaccagcaggaggagcccggcttcgaggtgatcaccagaatcgacctgggcgagagacccgtggtgcagagaagagagcccgtgagcctggaggagtggaccaagaacatcgacagcgagggcagaatcctgaacgtggacaacatgaagcagatgatcttcagaggcggcctgagccacgccctgagaaagcaggcctggaagttcctgctgggctacttcccctgggacagcaccaaggaggagagaacccagctgcagaagcagaagaccgacgagtacttcagaatgaagctgcagtggaagagcatcagccaggagcaggagaagagaaacagcagactgagagactacagaagcctgatcgagaaggacgtgaacagaaccgacagaaccaacaagttctacgagggccaggacaaccccggcctgatcctgctgcacgacatcctgatgacctactgcatgtacgacttcgacctgggctacgtgcagggcatgagcgacctgctgagccccctgctgtacgtgatggagaacgaggtggacgccttctggtgcttcgccagctacatggaccagatgcaccagaacttcgaggagcagatgcagggcatgaagacccagctgatccagctgagcaccctgctgagactgctggacagcggcttctgcagctacctggagagccaggacagcggctacctgtacttctgcttcagatggctgctgatcagattcaagagagagttcagcttcctggacatcctgagactgtgggaggtgatgtggaccgagctgccctgcaccaacttccacctgctgctgtgctgcgccatcctggagagcgagaagcagcagatcatggagaagcactacggcttcaacgagatcctgaagcacatcaacgagctgagcatgaagatcgacgtggaggacatcctgtgcaaggccgaggccatcagcctgcagatggtgaagtgcaaggagctgccccaggccgtgtgcgagatcctgggcctgcagggcagcgaggtgaccacccccgacagcgacgtgggcgaggacgagaacgtggtgatgaccccctgccccaccagcgccttccagagcaacgccctgcccaccctgagcgccagcggcgccagaaacgacagccccacccagatccccgtgagcagcgacgtgtgcagactgacccccgcctag

SEQ ID NO: 213061 - DNA, 1338 bp, Artificial Sequence
  derived and/or modified sequence
atgataggcttctccaaagtcacgaattacatcttcgactccctccggggtagtgatccgagcacacaccagaggccccctagtgagatggctgatttcctctctgatgctatacccggtttgaagattaaccagcaggaggaaccagggttcgaggtgattacccggatcgacttaggagagaggcccgttgtgcaaagaagagaacccgtgtcgttagaggagtggacaaagaacatcgatagcgaaggtagaatcctcaatgtagataacatgaaacaaatgattttcaggggggggctcagccacgcactgagaaagcaagcatggaagttcttactgggctactttccttgggacagtactaaagaggagcgaacccagctgcagaaacagaaaaccgacgagtatttccgaatgaagcttcagtggaagagcatttcacaggagcaagagaaaagaaattcccggctccgcgactatagatctttgatcgaaaaggacgtgaaccggaccgataggacaaacaagttctacgaggggcaggataaccctggccttattcttctgcatgacattctaatgacgtattgtatgtatgactttgatctggggtacgtgcagggaatgtctgatttgctgtctccactgctctatgtgatggaaaatgaggtcgacgcgttttggtgtttcgcatcatacatggatcagatgcatcaaaatttcgaagagcagatgcagggaatgaagacccaactaatacaactctctactctcctgcggcttctggactctggcttttgttcttatctcgagtctcaggacagcggatatctttatttttgttttagatggctgcttatccggttcaaacgcgaattttcattcctcgacatcctccgcctctgggaagtgatgtggactgaacttccctgtactaatttccacctgttgctttgttgcgctatcctggaatcagagaagcagcaaatcatggaaaagcactacggctttaatgaaattttgaagcacatcaatgagctgagcatgaagattgacgtggaagatattttgtgtaaggccgaggccatctcccttcagatggtgaaatgtaaagaactgccccaggcggtctgcgagatccttggcctgcagggatcagaagtgacaacacccgatagcgatgtcggagaagacgaaaatgtagtgatgacaccttgcccaacgtctgcattccagagcaatgccttgccaacactttccgcctccggcgccagaaacgattcccccacacaaatcccggtgtcgtccgacgtttgccgcctgaccccagcctag

SEQ ID NO: 213062 - DNA, 2076 bp, Artificial Sequence
  derived and/or modified sequence
atggctgctgcgggcgtggtatcaggcaagattatctatgaacaggagggggtgtatatccacagctcatgtggcaagacgaacgaccaagacggcttgattagtggcattctgagagtactggagaaggatgccgaagtgattgtcgattggagaccattggacgatgctctggactcttcctcaatcctttacgcgagaaaggactcctcctccgtggtagagtggacgcaggctccgaaggaaaggggccaccgcgggtccgagcatcttaattcctatgaggcagaatgggatatggttaatacagtgtccttcaaaagaaaaccacataccaatggcgatgccccctcccataggaatggcaagtcaaagtggtccttccttttctctctgactgacctgaaatctataaagcagaacaaggagggcatgggttggagttacctggtgttttgcctcaaagatgacgtcgtgctccccgcgttacacttccaccagggcgatagcaaactactgatcgaatctctcgagaaatacgttgtactgtgtgaaagcccccaagacaagcgtactctccttgtcaactgtcagaataaatccctctcccaatcttttgagaatctactagacgaaccagcctacggccttattcaagctggcctcctggatcgtaggaaacttctttgggctatacaccattggaagaaaatcaagaaggatccatacacagcgacgatgatcggatttagtaaggtcacaaactatatcttcgattccttgaggggaagtgatccaagcacacaccagcgccctccatcagaaatggccgattttctgagcgatgctatcccgggtctcaaaatcaaccaacaggaagagcccgggtttgaggtgattacacgaatagatctcggagaacgtccagtggttcagcggagagaacctgtgtcactcgaggaatggactaagaacatcgattccgagggccggatcctgaacgtggataacatgaaacagatgatctttcgagggggactctcccacgccttaagaaagcaggcatggaagttcctgctgggatatttcccttgggattctacaaaggaagagcgaactcagctccagaagcagaaaacggatgagtactttcggatgaagctgcaatggaaaagtatttcacaggagcaggagaagagaaatagtcgcttgagagattatcgaagcctgatcgaaaaagatgtcaacaggaccgacaggaccaacaagttttacgaggggcaggacaacccggggctaattctgctacatgatattttaatgacatactgcatgtatgactttgatctgggctacgtgcagggaatgtccgacttattatcccctcttctgtatgtaatggagaacgaggtggatgccttttggtgtttcgcgtcatacatggaccagatgcaccagaatttcgaagagcagatgcaagggatgaaaacgcaactgattcagttgtcaaccttgctaaggttactggactctggattttgctcttatctagaatcacaagacagtggctatttatacttctgttttaggtggcttcttatccggttcaaacgcgagttttcattcctagacatcttgcggctttgggaggtaatgtggaccgagctgccgtgcacgaacttccatctgctcctttgttgcgctatcttggaaagcgagaaacagcaaatcatggaaaaacactacggctttaatgagattctgaaacatatcaacgagctttcaatgaagatcgacgtagaggacatcctgtgcaaggccgaggccatttctctgcaaatggtgaagtgcaaagaactgcctcaggccgtctgtgagatccttgggctccagggcagtgaagtcactacgcccgattccgacgtaggggaagatgagaatgtggtgatgactccctgccctacttcggccttccagtccaacgccctaccgaccctgagtgcgtccggggcgcgcaatgactctccaactcagattccggtgtccagtgacgtctgtcgacttacaccggcttag

SEQ ID NO: 213063 - DNA, 1338 bp, Artificial Sequence
  derived and/or modified sequence
atgattggcttcagcaaggtgaccaactacatctttgacagcctgcggggcagtgaccccagcacccaccagaggcctcccagcgagatggctgacttcctgagtgatgccatccctggcctgaagatcaaccagcaggaggagcccggctttgaagtcatcaccagaattgacctgggggagaggcctgtggtgcagaggcgggagcctgtgtccctggaggagtggaccaagaacatcgacagcgagggccgcatcctgaatgtggacaacatgaagcagatgatcttccggggcggcctgagccacgccctgaggaagcaggcctggaagttcctgctgggctacttcccctgggacagcaccaaggaggagaggacccagctgcagaagcagaagacagatgagtacttcaggatgaagctgcagtggaagagcatcagccaggagcaggagaagaggaacagccggctgcgggactaccgcagcctgattgagaaggatgtgaacagaacagacaggaccaacaagttctatgagggccaggacaaccctggcctcatcctgctgcatgacatcctgatgacctactgcatgtatgactttgacctgggctacgtgcagggcatgtctgacctgctgagccccctgctgtatgtgatggagaatgaggtggatgccttctggtgctttgccagctacatggaccagatgcaccagaactttgaggagcagatgcagggcatgaagacccagctgatccagctgagcaccctgctgcggctgctggacagcggcttctgcagctacctggagagccaggacagcggctacctgtacttctgcttccgctggctgctgatccgcttcaagcgggagttctccttcctggacatcctgcggctgtgggaggtgatgtggacagagctgccctgcaccaacttccacctgctgctgtgctgtgccatcctggagagcgagaagcagcagatcatggagaagcactacggcttcaatgagatcctgaagcacatcaatgagctgtccatgaagattgatgtggaggacatcctgtgcaaggccgaggccatcagcctgcagatggtgaagtgcaaggagctgccccaggccgtgtgtgagatcctgggcctgcagggcagcgaggtgaccaccccagacagtgatgtgggggaggatgaaaatgtggtgatgaccccctgccccaccagcgccttccagagcaatgccctgcccaccctgagcgccagcggggccagaaatgacagccccacccagatccctgtgtccagtgatgtgtgccgcctgaccccagcctag

SEQ ID NO: 213064 - DNA, 2076 bp, Artificial Sequence
  derived and/or modified sequence
atggctgctgctggggtggtgtctgggaagatcatctatgagcaggagggcgtgtacatccacagcagctgtgggaagaccaatgaccaggacggcctcatcagcggcatcctgcgggtgctggagaaggatgctgaggtgattgtggactggaggcccctggatgatgccctggacagcagcagcatcctgtatgccaggaaggacagcagctctgtggtggagtggacccaggcccccaaggagcggggccaccggggcagcgagcacctgaacagctatgaggccgagtgggacatggtgaacacagtgtccttcaagaggaagccccacaccaatggagatgcccccagccacagaaatggcaagagcaagtggagcttcctgttcagcctgacagacctgaagagcatcaagcagaacaaggagggcatgggctggagctacctggtgttctgcctgaaggatgatgtggtgctgcctgccctgcacttccaccagggcgacagcaagctgctgattgagagcctggagaagtatgtggtgctgtgtgagagcccccaggacaagaggaccctgctggtgaactgccagaacaagagcctgagccagagctttgagaacctgctggatgagcccgcctacggcctcatccaggccggcctgctggacaggaggaagctgctgtgggccatccaccactggaagaagatcaagaaggacccctacacagccaccatgattggcttcagcaaggtgaccaactacatctttgacagcctgcggggcagtgaccccagcacccaccagaggcctcccagcgagatggctgacttcctgagtgatgccatccctggcctgaagatcaaccagcaggaggagcccggctttgaagtcatcaccagaattgacctgggggagaggcctgtggtgcagaggcgggagcctgtgtccctggaggagtggaccaagaacatcgacagcgagggccgcatcctgaatgtggacaacatgaagcagatgatcttccggggcggcctgagccacgccctgaggaagcaggcctggaagttcctgctgggctacttcccctgggacagcaccaaggaggagaggacccagctgcagaagcagaagacagatgagtacttcaggatgaagctgcagtggaagagcatcagccaggagcaggagaagaggaacagccggctgcgggactaccgcagcctgattgagaaggatgtgaacagaacagacaggaccaacaagttctatgagggccaggacaaccctggcctcatcctgctgcatgacatcctgatgacctactgcatgtatgactttgacctgggctacgtgcagggcatgtctgacctgctgagccccctgctgtatgtgatggagaatgaggtggatgccttctggtgctttgccagctacatggaccagatgcaccagaactttgaggagcagatgcagggcatgaagacccagctgatccagctgagcaccctgctgcggctgctggacagcggcttctgcagctacctggagagccaggacagcggctacctgtacttctgcttccgctggctgctgatccgcttcaagcgggagttctccttcctggacatcctgcggctgtgggaggtgatgtggacagagctgccctgcaccaacttccacctgctgctgtgctgtgccatcctggagagcgagaagcagcagatcatggagaagcactacggcttcaatgagatcctgaagcacatcaatgagctgtccatgaagattgatgtggaggacatcctgtgcaaggccgaggccatcagcctgcagatggtgaagtgcaaggagctgccccaggccgtgtgtgagatcctgggcctgcagggcagcgaggtgaccaccccagacagtgatgtgggggaggatgaaaatgtggtgatgaccccctgccccaccagcgccttccagagcaatgccctgcccaccctgagcgccagcggggccagaaatgacagccccacccagatccctgtgtccagtgatgtgtgccgcctgaccccagcctag

SEQ ID NO: 213065 - DNA, 1338 bp, Artificial Sequence
  derived and/or modified sequence
atgatcggcttcagcaaggtgaccaactacatcttcgacagcctgagagggagcgacccaagtacccatcagagacccccctctgaaatggccgacttcctgagcgacgcaatcccaggtctgaagattaaccaacaggaagaacccggtttcgaagtgatcacgagaattgatctgggcgaacgccccgtagtgcagcgccgggagcccgtgagtctggaagaatggacgaagaacatcgactcagaaggacggattttaaatgtggataatatgaaacagatgatttttcgtggcggcctgagccacgcacttcgcaagcaggcctggaagttcctgctcgggtatttcccctgggactctactaaggaggagaggacgcagctccaaaaacagaaaaccgatgaatactttaggatgaagctgcaatggaagagcatatcccaggagcaggagaagaggaatagtaggctgagagattacaggagtttgatcgagaaagacgtaaacagaacagaccggacaaataagttctatgaagggcaggacaaccccggcctgatcctgctgcacgatatcctaatgacctattgcatgtatgatttcgaccttggttacgtgcaggggatgagcgacctcctaagtccgctactatacgtgatggaaaacgaagtggatgctttttggtgcttcgcttcttacatggatcagatgcaccagaacttcgaggaacagatgcagggaatgaaaacacagctgatccagctgagtacacttttgagactacttgacagcgggttctgttcctatttggagagtcaggattctggttacttgtacttttgtttcaggtggctcctgatacgctttaaacgcgagttttctttcctagatatcctcagactgtgggaggtaatgtggacggaacttccctgcactaacttccacctgctgttatgttgcgccatacttgagtcggaaaaacagcagattatggagaagcattatgggtttaacgaaatcctgaaacacatcaatgaattgtcaatgaagattgacgtcgaggatatcctctgcaaagcagaagcgattagcctgcaaatggtgaagtgtaaggagctgccccaggcagtttgcgaaattctgggattgcagggctcggaagtaacaacccccgactccgacgtgggggaggatgaaaacgtagtgatgaccccctgcccaacctccgcatttcagtcgaacgcccttcctacactgagcgcaagcggcgccaggaacgattctccaacacagatccctgtatccagtgacgtgtgccggttaacgcctgcatag

SEQ ID NO: 213066 - DNA, 2076 bp, Artificial Sequence
  derived and/or modified sequence
atggccgccgccggcgtggtgagcggcaagatcatctacgagcaggagggcgtgtacatacactcgagttgcggcaagaccaacgaccaggacggcctcatatccgggattcttcgcgtcctcgagaaagatgctgaggttatcgtggattggagaccattggacgatgcactcgacagcagttcaatcctctacgctagaaaggattctagctcagtcgtagagtggacccaggcacctaaggaaagaggccatagaggatctgaacatctcaacagttacgaggcggagtgggacatggtgaacaccgtgtcatttaagagaaaaccacacacgaacggagacgccccctcgcataggaatggtaaatctaagtggtccttcttgttctcactgacggatctcaagtctatcaagcagaacaaggaggggatggggtggagttacctggtattttgtttgaaggatgatgtagtgctaccagccctgcattttcaccaaggggattccaagctactgatcgagtctcttgaaaagtacgtagtattgtgcgagtccccacaggataaaaggacactcttagtcaactgtcagaacaagtcgctaagccaatcttttgagaatctattggacgagcccgcgtacggactgattcaggccggattactggatcgacggaaactactctgggcgattcaccactggaagaaaataaaaaaggatccctacacagccactatgatcgggttcagcaaggtgaccaactatatattcgatagtttaaggggctctgatccctctactcatcagcgtcccccgagcgagatggcagattttctgtctgatgcaatccccggtctgaaaataaaccagcaagaggagcctggcttcgaggtcattaccaggatcgacctgggagagcgaccagtggtgcagcgcagggagcctgttagtctggaggagtggactaaaaatatagactcagagggtagaattctgaacgtggacaacatgaagcagatgattttccgcggaggccttagccatgccctgaggaaacaagcctggaagtttctgctgggctatttcccctgggattccacaaaggaagagagaactcagcttcagaagcagaagaccgatgagtactttcgaatgaaactgcagtggaagagcatctcccaagagcaggaaaaaagaaattctcgcctacgggactatcggtcccttattgagaaagacgtaaaccgtactgaccggacaaataagttttatgaaggacaggataatcctggactcatactgttacacgacattctgatgacctattgcatgtacgactttgacttgggatacgtgcagggcatgtccgatttgctcagtccactgctgtacgtgatggagaacgaagtggacgcgttttggtgtttcgcttcctacatggatcagatgcaccagaatttcgaggagcagatgcaaggaatgaaaactcagctaatccagctgagcaccttgctgaggcttctggacagcggcttctgctcgtatctggaaagtcaagactcaggatatctctacttttgcttccgctggttgttgattcggttcaaacgcgaattttcatttcttgacattctgagactttgggaggtgatgtggaccgagttgccttgcactaactttcatctgctactgtgttgcgccatactggagtctgagaaacagcagatcatggaaaagcactacggttttaatgaaatactgaaacacatcaatgaactgtcaatgaagatcgacgtggaagatatcctgtgtaaggctgaggcaatttccttacaaatggttaagtgtaaggagctgccccaagctgtctgcgaaattttaggactgcaggggtctgaagtcaccaccccagacagcgatgtaggagaggacgagaacgtggttatgactccctgccctacgtccgctttccagtctaatgccctgcccaccttatcagcttcaggtgctcgaaatgattctcccacccagatccccgtgagtagcgacgtttgtaggctgacccctgcctag

SEQ ID NO: 213067 - DNA, 1338 bp, Artificial Sequence
  derived and/or modified sequence
atgatcggcttctctaaagtgacaaattatatctttgacagtctccgcggatctgaccccagtactcatcagcgcccaccatcagaaatggcggacttcctgtcggacgcgattcccggtctgaaaattaaccagcaggaggagcctggttttgaggtcataaccagaatcgacttaggtgagagacccgtcgtgcaacgacgggaaccagtctcactggaggagtggacaaaaaacatcgactcagaagggaggattctcaacgtggacaacatgaaacagatgatatttaggggcggtctctctcacgccctgcggaagcaggcctggaaatttctattgggctatttcccatgggactctactaaggaggagcgcacccaattgcaaaagcaaaaaactgacgaatatttccgcatgaagctacagtggaagagtatcagtcaggagcaggagaaacgaaactcccggcttagagattatcggtctctaatagaaaaagacgttaaccgcacagaccggaccaataaattttacgaggggcaggataatcctggactgatcctcctgcacgatatcctgatgacatactgcatgtacgacttcgacctggggtatgtccaggggatgagtgatctgctcagcccattactctatgttatggagaatgaagtggatgccttttggtgctttgcctcttatatggatcagatgcaccagaactttgaggaacagatgcaaggcatgaagacccagctgattcagttgagcacactgctccggctgctcgattctggcttttgcagctatctagagtctcaagatagtggttacctctacttttgttttagatggttgcttatcagattcaaacgtgagttcagctttctggacatactcaggctctgggaagtaatgtggacggagctgccctgtaccaatttccacctcctcctttgttgcgcaattttggagtcagagaaacagcagatcatggaaaagcactatgggttcaatgaaatcctgaaacacatcaacgagctctcaatgaaaatagatgtcgaggacattttgtgtaaagcggaagcgattagcctacagatggtgaagtgcaaggaactccctcaagccgtgtgtgagatcttagggctccaaggctcggaggtgactactcctgactccgatgtgggcgaggatgagaacgtggtcatgacaccctgtcctaccagcgctttccaatccaacgcgctgccaaccctgagcgcatccggggctaggaacgacagtcccacgcagatccctgtatcctccgatgtgtgtaggctgaccccagcttag

SEQ ID NO: 213068 - DNA, 2076 bp, Artificial Sequence
  derived and/or modified sequence
atggccgctgcaggtgtggtcagtggcaaaatcatctacgagcaggaaggagtatacatacactcatcatgtggaaaaacaaatgaccaggatggtttaatcagcggaatcctaagagtgctcgaaaaggacgccgaagtgatcgtcgactggaggccacttgatgacgccctggattctagttccattttatacgccagaaaggacagctccagtgttgtagagtggacccaggctcctaaggaacgagggcatcgtggctccgaacatctgaatagctacgaggccgaatgggacatggtcaatactgtttcgttcaagcgaaagccccatacaaacggagacgcccctagtcacaggaatgggaaatccaaatggagctttttattttcactgactgatctcaagagtatcaagcaaaacaaagaggggatggggtggtcttatttggtcttttgcctcaaggacgacgttgtcttgcccgcactgcatttccatcagggagattcaaaactgctcatcgagtctttagaaaaatacgtggtactgtgtgagtcccctcaggacaaacgaactctcctagtgaactgccagaacaagagtctgtcccagtccttcgaaaacttactggacgagccggcttacggactgattcaggcaggcctcttggatcgaaggaagctgctctgggctatacaccactggaaaaagattaagaaggatccttatactgcaacaatgatcggattttccaaggtgacaaactacattttcgatagcctgcgcggttcagatccttcaacacaccagagaccacctagcgagatggctgacttcttatctgacgccatacccggactaaaaatcaaccagcaggaggaacctgggttcgaagtaataacacggatagatttgggcgagaggccagtcgtccaacgacgtgaaccggtgagtcttgaggagtggaccaagaacatcgattcagaaggtcggatcctcaacgtggacaatatgaaacagatgatcttccgcggtgggctgtctcatgccctgcgcaagcaggcctggaagtttcttctcgggtatttcccatgggactctacaaaagaagagaggacccagttgcagaaacagaagaccgatgaatacttccggatgaaacttcaatggaaaagcatctcacaggagcaggagaaaagaaactcaaggctgcgggactacaggtctttgatcgagaaagatgtgaatcgtaccgatcggacaaacaagttctatgagggtcaggacaaccccggacttattttgttacacgacatcttaatgacctattgtatgtacgactttgacttgggatatgttcagggcatgagcgatttactgtcacctctgctctacgtgatggaaaacgaggtcgacgctttctggtgcttcgcttcctatatggaccagatgcaccaaaatttcgaggagcagatgcaaggaatgaagactcagctgatccagctgagtaccctgttacgcctgcttgatagcggcttctgctcctatctggagagccaggacagcggctatctatatttctgtttccgctggctcctgatacgctttaaacgcgaattctcattcctcgacatccttcgcctgtgggaggttatgtggacggagctgccatgcacaaattttcatctcctgctctgttgtgctatccttgagagtgagaaacagcaaattatggaaaaacactacggcttcaatgaaattcttaagcatatcaacgaattaagcatgaaaatcgatgttgaggacattttgtgcaaagctgaggctattagtctgcaaatggttaagtgcaaagagctcccccaggccgtgtgtgagattctgggtctccaggggagtgaggtgaccacacccgattctgatgtcggcgaagatgagaatgttgttatgacaccctgccctacgagtgccttccagagtaacgctctgccgaccctgtcagcttccggcgctcgcaatgactcaccaactcagattcctgtgagttctgacgtgtgtcgtttgaccccggcttag

SEQ ID NO: 213069 - DNA, 1338 bp, Artificial Sequence
  derived and/or modified sequence
atgatcggcttctccaaggtaacaaattatattttcgatagccttagaggaagtgaccctagtacacatcaaaggccaccaagcgagatggccgattttctgtctgatgccattcctggccttaaaatcaaccaacaggaagaaccaggatttgaggtgattactcgcatcgatctgggtgagagacccgtcgttcagagaagagaacctgtgtcccttgaagaatggactaagaacattgacagcgagggtcgaattctgaacgtggacaacatgaagcagatgatttttcgaggcgggttatctcatgccttacggaaacaagcatggaaatttttgctcggttattttccatgggacagtaccaaggaagagagaactcagctacagaaacagaaaaccgacgagtactttcgaatgaaactgcagtggaagagcattagccaagaacaggaaaaacgaaattcacgattacgtgactacagaagtctgattgaaaaggatgtaaatcgcacagatagaaccaataagttttatgagggacaggacaatcctggcctgatcctccttcacgacatcctgatgacttactgtatgtacgactttgatctggggtacgtccagggtatgagcgacctcttgtcacccttattatacgtgatggaaaatgaggtggacgcattttggtgcttcgcttcctacatggatcaaatgcaccagaattttgaggagcaaatgcaaggcatgaaaacccagctcatccagcttagcacactgctccgtctactggactcaggcttctgctcatatttagagtctcaggacagcggttacctgtatttctgctttagatggctgctgattcgttttaaacgcgagttcagttttctggacattctgagactatgggaagtaatgtggacagagctcccttgcaccaactttcacctgcttctgtgttgcgccatcctggaatcagagaagcagcagatcatggagaagcactacggattcaacgagatattgaaacacatcaacgagttaagtatgaagattgacgtcgaggacatactatgcaaggcagaagcaatctctctgcagatggtcaagtgcaaagaactacctcaggctgtttgcgaaattcttggactgcagggatccgaggtgactacccccgattctgacgtgggcgaagatgaaaatgttgtgatgaccccatgtccaacaagcgcatttcagtcaaatgcactgccgacactttccgctagcggggcacgcaacgactctccgacccagattcctgtgagctctgacgtctgtagattgacccctgcctag

SEQ ID NO: 213070 - DNA, 2076 bp, Artificial Sequence
  derived and/or modified sequence
atggcagccgcgggagtggtcagcgggaaaattatctatgagcaggagggggtatatatccactccagttgcggtaagacaaacgaccaggatggacttattagtgggatcctgagggttcttgaaaaagatgcagaggtaattgtggattggcgccctcttgacgatgcgcttgatagctccagcatcctatacgcgcgaaaagatagcagctccgtggtagaatggacacaggcacccaaggagagggggcacagagggtcagaacatctcaattcatacgaagcagaatgggatatggtgaacactgtgtcttttaaaaggaaaccccatacgaacggcgacgcaccctctcaccgcaatggcaaatccaaatggtctttcttattctctctgaccgacctaaagtccatcaagcagaacaaggaggggatgggatggtcttacctggtcttctgcctgaaagatgacgtagtgttgccagcactccacttccatcagggagattctaagctgttgattgaatcactcgaaaagtacgtcgtgttatgtgagtcgccccaggacaagaggacccttctcgtcaattgtcaaaataaaagcctaagccagtcatttgagaatctactggacgaacccgcgtatggcctgattcaagctggcctgttagaccggcggaagttgctgtgggctatccaccactggaaaaagatcaaaaaggacccttacaccgcaaccatgatcgggttttctaaagtgactaactacatcttcgattcattacgcgggtctgatccaagcacacaccagagacccccttcagagatggcggattttctgtccgacgcaatccctggactgaaaataaatcaacaggaggagccgggtttcgaggtgatcaccaggatcgatttaggggagcggccagtcgtccagagacgggaacccgtctctctcgaagagtggactaagaacatcgactccgagggccgaatactaaatgtggataatatgaagcagatgatatttcgcgggggactgtctcatgcactgagaaagcaagcctggaaatttttattaggatattttccctgggattcaactaaggaagagaggactcagctgcagaagcaaaagacagatgagtactttaggatgaagctacaatggaagagtataagccaagaacaggaaaagcgcaactctaggcttcgtgattataggtctctgatagaaaaagatgtaaataggactgaccggacaaataaattctacgagggccaggacaaccctggcttaatcttactgcatgacattctgatgacttactgcatgtacgacttcgacctgggatatgtacagggaatgtccgacctcttgtcacctctattgtacgtgatggagaacgaagtggatgccttttggtgttttgccagctacatggaccagatgcaccaaaactttgaggagcagatgcagggaatgaagactcaactgatccagctgagcaccctcctgaggctcttagacagtggcttttgcagctacctggagagccaggactcagggtacttatacttctgctttcgctggctgttaatccgatttaagagggaattctctttcctagatatcttgagactctgggaggtaatgtggactgaacttccttgtacaaatttccacttgctcttatgttgcgccatcttggagtctgagaaacaacagatcatggagaaacactatggatttaatgagatactcaagcacatcaacgaattgagtatgaaaattgacgttgaggatatcctctgtaaagctgaggctatatctctgcaaatggtgaagtgcaaggagctcccgcaggctgtctgtgagattctgggactgcagggcagtgaagttactactcccgattccgacgtgggcgaagacgaaaatgttgtgatgaccccatgcccaacatctgcatttcagtccaatgccctcccaaccctgtctgcctccggcgcgaggaatgactctcccacccagatcccggtgagctccgatgtgtgcagactgaccccagcatag

SEQ ID NO: 213071 - DNA, 1338 bp, Artificial Sequence
  derived and/or modified sequence
atgattggtttttcaaaggtcaccaactacattttcgattccctgagaggatccgatccatctacgcatcaaagacccccatctgagatggccgacttcctttctgacgcaatccccggcttgaagataaatcagcaggaagaaccaggctttgaagttatcaccagaattgacttaggtgagcgtcccgtcgtacagcggagagagccggtttcattagaggaatggacaaagaacatcgattcagaaggacgtattctgaacgtagataacatgaagcaaatgatcttcaggggaggattatcacatgccttgaggaaacaagcatggaagttcctcctcggttacttcccctgggactccacaaaggaagagcgtacacagctgcagaaacaaaaaacagacgagtactttagaatgaaactacagtggaaatccatttcacaggaacaggagaaacgtaacagccggctacgagattacaggagcctgattgaaaaagatgtgaaccgcacggatagaaccaacaaattttatgaagggcaggataacccaggtctgatattgctgcatgatatcttaatgacctattgtatgtatgatttcgaccttggctatgtgcaaggaatgtctgaccttttgtccccgctactgtatgtgatggaaaatgaggtagatgctttttggtgttttgcgtcttacatggatcaaatgcatcagaacttcgaggaacaaatgcagggaatgaagactcagttgatccagctatccacactccttcgtctattggattcaggattttgttcgtacctggagagccaggactcaggatacctctatttctgcttcaggtggttgcttattagattcaaaagggaattttcatttttggatatccttagactgtgggaggtgatgtggaccgaactaccatgcactaattttcacctcctactttgctgcgcaatacttgaatccgagaagcaacagataatggagaagcactacgggttcaatgaaatcctgaaacatattaatgaactcagcatgaagatcgacgtggaagatatactgtgtaaggcagaagccataagtttgcaaatggttaaatgcaaagaactgccacaggccgtatgcgagatactaggcctacaaggttctgaagtcacaacacctgattccgatgtcggagaggacgaaaatgttgtgatgacaccatgccccacctctgccttccaaagtaacgccctgcccacactcagtgcctctggcgcgcgcaacgattctccaacacaaatccccgtatcttcagatgtctgcaggctgacccccgcctag

SEQ ID NO: 213072 - DNA, 2076 bp, Artificial Sequence
  derived and/or modified sequence
atggcagcggcaggcgtggtgtcaggcaagatcatctacgaacaggaaggcgtttacatacattcttcatgtggaaaaactaatgatcaggacggactcatctctggaatactgagagttctggaaaaggacgcggaagttatagtagactggagaccactggatgacgctctggatagctcgagtatcctctatgcaagaaaggatagttcttctgtggtagaatggactcaagctcctaaggaacgaggacacagaggttcagaacacctgaattcgtacgaggcagagtgggatatggtgaatacagtttcttttaagcggaagccgcacaccaatggcgatgcaccgtcccatcgaaatggcaagagcaaatggtccttccttttttccttaactgatctaaaatcaatcaagcagaataaagaaggtatgggctggagttacttggtcttctgtctcaaagatgatgtcgttttacccgccctccacttccaccagggcgactcaaagcttctcattgagtctttagaaaaatacgtagtcctgtgtgagagtccccaagataagcgcaccttgctggtgaactgccagaataagtctctatcacaaagtttcgagaatctgttagacgaacctgcttacggactgatacaagctgggttgctggaccggaggaagctcctctgggctattcaccattggaagaaaatcaaaaaagacccttacactgctacaatgattggcttttctaaggtaaccaattacatatttgactctcttagaggctccgatccctccacacatcaaagacctccatccgaaatggccgactttctatccgatgccatccctggcctcaaaatcaatcaacaggaggaaccgggttttgaggttatcacccgcatcgatctaggagagagacctgtggtgcagagacgagaacccgtgtcattagaggagtggaccaagaacatcgatagcgaaggtcggattctaaatgtggacaacatgaaacagatgatatttagggggggacttagccacgccttaagaaagcaggcctggaaatttctgctcggctattttccttgggactcaacaaaagaggagagaacgcagctgcaaaaacaaaagacagatgaatactttaggatgaaattacagtggaaaagcatttcacaggagcaggaaaaacgtaacagtcgcctacgggactaccgaagtttgatagaaaaagacgtgaatcgaaccgacaggaccaacaagttttatgaaggccaggacaatcccggcttgattctactgcacgacatcttgatgacttattgtatgtatgattttgacttggggtacgttcaaggtatgtccgacttactgagccctcttctgtacgtgatggagaatgaggtggacgctttttggtgtttcgcatcttacatggaccagatgcatcagaatttcgaagagcaaatgcagggaatgaaaacccagctgatacagctgtcaacactgctgagactcttagacagtggtttctgtagctacctggagagtcaagactcgggttacctatatttttgttttaggtggcttctaattagattcaaacgcgagttctcctttctggacattttacgcttatgggaagtgatgtggacagagctgccctgcaccaactttcacttattgttatgctgcgcaatcctcgaaagcgaaaaacagcagattatggaaaagcactatggcttcaatgaaattctcaaacacatcaatgaactgtccatgaagatcgatgtcgaagacattttgtgtaaagcagaagcaatctcactgcagatggtgaaatgcaaggaacttcctcaggcagtttgtgagatcctgggccttcaaggatctgaggttacaacccccgattccgacgtgggcgaagatgaaaatgtcgtaatgacgccctgccccacttctgcctttcagtctaatgccctgccaaccctcagcgcctccggcgcccgcaacgattctcctacccagatacccgtgagctcagatgtgtgtcggttaacccccgcttag

SEQ ID NO: 213073 - DNA, 5785 bp, Artificial Sequence
  derived and/or modified sequence
gttgttgtatgtccgagagacacgtgaggttctgctacgtcattaccaggcacgcgcaggaaacatggcggcggcgggtgttgtgagcgggaagattatatatgaacaagaaggagtatatattcactcatcttgtggaaagaccaatgaccaagacggcttgatttcaggaatattacgtgttttagaaaaggatgccgaagtaatagtggactggagaccattggatgatgcattagattcctctagtattctctatgctagaaaggactccagttcagttgtagaatggactcaggccccaaaagaaagaggtcatcgaggatcagaacatctgaacagttacgaagcagaatgggacatggttaatacagtttcatttaaaaggaaaccacataccaatggagatgctccaagtcatagaaatgggaaaagcaaatggtcattcctgttcagtttgacagacctgaaatcaatcaagcaaaacaaagagggtatgggctggtcctatttggtattctgtctaaaggatgacgtcgttctccctgctctacactttcatcaaggagatagcaaactactgattgaatctcttgaaaaatatgtggtattgtgtgaatctccacaggataaaagaacacttcttgtgaattgtcagaataagagtctttcacagtcttttgaaaatcttcttgatgagccagcatatggtttaatacaagcaggactgctagacagaagaaagctgttgtgggccattcaccactggaaaaaaattaaaaaggacccttatacggcaactatgataggattttccaaagtcacaaactacatttttgacagtttgagaggcagcgatccctctacacatcaacgaccaccttcagaaatggcagattttcttagtgatgctattccaggtctaaagataaatcaacaagaagaaccaggatttgaagtcatcacaagaattgatttgggggaacgccctgttgttcaaaggagagaaccggtatcactggaagaatggactaagaacattgattctgaaggaagaattttaaatgtagataatatgaagcagatgatatttagagggggacttagtcatgcattgagaaagcaagcatggaaatttcttctgggttattttccctgggacagtaccaaggaggaaagaacccaattacaaaagcaaaaaactgatgaatacttcagaatgaaactgcagtggaaatccatcagccaggaacaagagaaaagaaattcgaggttaagagattatagaagtcttatcgaaaaagatgttaacagaacagatcgaacaaacaagttttatgaaggccaagataatccagggttgattttacttcatgacattttgatgacctactgtatgtatgattttgatttaggatatgttcaaggaatgagtgatttactttcccctcttttatatgtgatggaaaatgaagtggatgccttttggtgctttgcctcttacatggaccaaatgcatcagaattttgaagaacaaatgcaaggcatgaagacccagctaattcagctgagtaccttacttcgattgttagacagtggattttgcagttacttagaatctcaggactctggatacctttatttttgcttcaggtggcttttaatcagattcaaaagggaatttagttttctagatattcttcgattatgggaggtaatgtggaccgaactaccatgtacaaatttccatcttcttctctgttgtgctattctggaatcagaaaagcagcaaataatggaaaagcattatggcttcaatgaaatacttaagcatatcaatgaattgtccatgaaaattgatgtggaagatatactctgcaaggcagaagcaatttctctacagatggtaaaatgcaaggaattgccacaagcagtctgtgagatccttgggcttcaaggcagtgaagttacaacaccagattcagacgttggtgaagacgaaaatgttgtcatgactccttgtcctacatctgcatttcaaagtaatgccttgcctacactctctgccagtggagccagaaatgacagcccaacacagataccagtgtcctcagatgtctgcagattaacacctgcatgatcactgttcttgcttttttgggaagagacactttgttgcaaccctttttcaagtacttgaaagttgaaaatttgaaatcttggtattgatcatgctttaaggtttatgtaaagaaagtgtactgatgttcttacattaaagctttacaaagatttaaactaattatttttgtagttacttctaccaaatagcctttccttttcgataacattcctcagtatttttatagccaagtacattttattttcttgctgatgaactggaattggataaatattgcaagtggatgagttggaaattatgcactttgaaaaacattcactttgtttaagcttattgggtttcagatttgattaaattaaatgtggaggctttctatagcattctaagctgagaagtagattgttacccagtaatgaaataaaaaataaaaataaaaggatttttttctctattgtttacgacagtactcagcttaaatatttatgctggtcaaatgtgatttaaattggacattttcatcaatgcagtctaatgtgtagataaatatttcaaccataataagtggattggcagtatattttttacattgaacttttcttcacttgtatataaagattatatataagtacttatttatgagtataagaaaggttaggcatattttcattaactgaataaacgacttgatttatataacctggtttatcaaaatttaacatggcttcagtatgagatctttttcaaaactattttcttaaacatttatttcatgagattatgttcaaccctgtacctggtgtaattttaaaattaattgcttgtaacctcactttactaataatgtttattatctttcctaataatgcattaactgattaatcaggtgtttaaatttttataaaatactcttgcaaaaagtttatttgaaaaatttctagatggtctcatgagtttcaaaataataatttttgtgtatgaacaaagctgttgtttttaccatgcagtattgcatgattttaagttatgtggaattaacataactgattttgttttaattgtaagttgttaactcctgtatatatcattaaaataaatctgaagttgaagtagtgtttttagttaaattatacttagaaatagtctgcttttttaaaattttttttcttgagaaagagtcttgctctgttgcccaggctggagtgcagtggcgcagtcctggctcactgcagcctccgccttctgggttcaagcgattctcctgtctcagcctcccgagcagctgggactacaggcttgtgccatcgcgcctgactaatttttgtattttgagtagagatggggtttcaccatgttggccaggctggtctcgaactcttgacctcaagtgatccactcgcttcagcctcccaaagtgctgagattacaggtgtgagccactgtgcccggctaattctttaatagaagaaaaaacatccaagatggacctcaattcatctcttatttttatatgattaaaatgataatctggccgggcgcggtggctcacgcctgtaatcccagcactttgggaggccgaggcgggcggatcacgaggtcaggagatcgagaccatcccggctaaaacggtgaaaccccgtctctactaaaaatacaaaaaattagccgggcgtagtggcgggcgcctgtagtcccagctacttgggaggctgaggcaggagaatggcgtgaacccgggaggcggagcttgcagtgagccgagatcccgccactgcactccagcctgggcgacagagcgagactccgtctcaaaaaaaaaaaaaaaaaaatgataatctgaataagttatggaaatgaaaaccatcctttttataactgaaaaaaaattttcattagcatggaaatgggcacagtgttgccttgaaagatacagttatttgactcagtaaagcagcttattacaactgatgctaatagtatagagaaaaaagttgtgcagttctaaaatggtcctagagattgacttttttcccccaagaaagttagggaacaaaacgaacttttttcctggttgagcattaactgacaatcacgacagtagaaccgttagagtttagtttttaatattatgtgtgttatctttcatcagttaataatgagtaagcctattcagaaaaagaacataaactgatcaaaaactcagcatctccagcctttcatttcctgctattcaggaaattgcttagaacatcttgatgtcctccttgttcttcctggacagtgactttttgggagtttgttcctgctgcgtaatgtgatacccacttcagattttttttttatcaatacatttagtaagttgaacttctgtcaagttttattacaaaattacttgttaaaacaatttttactaaactgcatttctatctagcatatttttgatatggaagtgatagtatagtatagttccaggagaagtcttaaatcagtccacagagtccagttagcaaatactctgtgccattaagattgctaaaatacacagttcaggtaaatttactagtgttttttaaaggtttatttgttttcacaagatgctctgtccacacccttataacatgtaaaatattgtgtgctgtattatgtggtaaagttgttaaaattcagtttctaacattaacttaaaagtacagacaatctaacatgatgatttgacttacaaactttcaactaaatttatgatggctttaaagcagtgcactgaatagaaaccatactttgagtacccatacagccatttttcacttttactacaatattctataaatcacatgagatatttaacactttattataaaataggctttgtgttagatgattttgcccaaatgtaaactaatgtagtgttctgagcatgtttaagttagggtaggctaaactatgtttggtaggttagatgtattaaaagcatttttgattaatgatgtcttcaatttatgatgtgtttattggaacataacctcaatataagttgaaaagcatatgtattttcaattctggcatgaacctatgggaatcttttgcatttaagaacctccccattttaataatttcatgggtctaagattcttcatctgtttataaggaactttagtcttagtgattagagactaaatttttttttgagcagtaagaaaacagccttttgggacagatagtgagtgattcttaggaacttgacattgccaagaaattttatagatgccgaagaattcttatgtgaaattcacataagcatgcccattactaaagacagtttgtataaagtaaccctaaatgtttattgaggaacctacagcttcaactgacttacgtgcagatatgtaccaggagaacatcattttagcttgggcgtctttacttggggttttcagaggatccaggaacctcactgtatgcaaagtcttgtggatgtacctgaatgtttttggaggcaggtcacatagtttctgaaagtgttctcttattttcctcaaatgtaggtaaccattgttacaagttatttaacaggagaatagtaacaatgtctaacttatgctaatgattttgtgtgctgagctcccattaattaaaatgtcttcagaa

SEQ ID NO: 213074 - protein, 715 aa, Artificial Sequence
  derived and/or modified sequence
MSQSGAVSCCPGATNGSLGRSDGVAKMSPKDLFEQRKKYSNSNVIMHETSQYHVQHLATFIMDKSEAITSVDDAIRKLVQLSSKEKIWTQEMLLQVNDQSLRLLDIESQEELEDFPLPTVQRSQTVLNQLRYPSVLLLVCQDSEQSKPDVHFFHCDEVEAELVHEDIESALADCRLGKKMRPQTLKGHQEKIRQRQSILPPPQGPAPIPFQHRGGDSPEAKNRVGPQVPLSEPGFRRRESQEEPRAVLAQKIEKETQILNCALDDIEWFVARLQKAAEAFKQLNQRKKGKKKGKKAPAEGVLTLRARPPSEGEFIDCFQKIKLAINLLAKLQKHIQNPSAAELVHFLFGPLDLIVNTCSGPDIARSVSCPLLSRDAVDFLRGHLVPKEMSLWESLGESWMRPRSEWPREPQVPLYVPKFHSGWEPPVDVLQEAPWEVEGLASAPIEEVSPVSRQSIRNSQKHSPTSEPTPPGDALPPVSSPHTHRGYQPTPAMAKYVKILYDFTARNANELSVLKDEVLEVLEDGRQWWKLRSRSGQAGYVPCNILGEARPEDAGAPFEQAGQKYWGPASPTHKLPPSFPGNKDELMQHMDEVNDELIRKISNIRAQPQRHFRVERSQPVSQPLTYESGPDEVRAWLEAKAFSPRIVENLGILTGPQLFSLNKEELKKVCGEEGVRVYSQLTMQKAFLEKQQSGSELEELMNKFHSMNQRRGEDS

SEQ ID NO: 213075 - protein, 105 aa, Artificial Sequence
  derived and/or modified sequence
MSQSGAVSCCPGATNGSLGRSDGVAKMSPKDLFEQRKKYSNSNVIMHETSQYHVQHLATFIMDKSEAITSVDDAIRKLVQLSSKEKIWTQEMLLQVNDQSLRLLD

SEQ ID NO: 213076 - protein, 25 aa, Artificial Sequence
  derived and/or modified sequence
MSQSGAVSCCPGATNGSLGRSDGVA

SEQ ID NO: 213077 - protein, 95 aa, Artificial Sequence
  derived and/or modified sequence
MSQSGAVSCCPGATNGSLGRSDGVAKMSPKDLFEQRKKYSNSNVIMHETSQYHVQHLATFIMDKSEAITSVDDAIRKLVQLSSKEKIWTQEMLLQ

SEQ ID NO: 213078 - protein, 83 aa, Artificial Sequence
  derived and/or modified sequence
MSQSGAVSCCPGATNGSLGRSDGVAKMSPKDLFEQRKKYSNSNVIMHETSQYHVQHLATFIMDKSEAITSVDDAIRKLVQLSS

SEQ ID NO: 213079 - protein, 79 aa, Artificial Sequence
  derived and/or modified sequence
MSQSGAVSCCPGATNGSLGRSDGVAKMSPKDLFEQRKKYSNSNVIMHETSQYHVQHLATFIMDKSEAITSVDDAIRKLV

SEQ ID NO: 213080 - DNA, 318 bp, Artificial Sequence
  derived and/or modified sequence
atgagccagagcggcgccgtgagctgctgccccggcgccaccaacggcagcctgggcagaagcgacggcgtggccaagatgagccccaaggacctgttcgagcagagaaagaagtacagcaacagcaacgtgatcatgcacgagaccagccagtaccacgtgcagcacctggccaccttcatcatggacaagagcgaggccatcaccagcgtggacgacgccatcagaaagctggtgcagctgagcagcaaggagaagatctggacccaggagatgctgctgcaggtgaacgaccagagcctgagactgctggactag

SEQ ID NO: 213081 - DNA, 78 bp, Artificial Sequence
  derived and/or modified sequence
atgagccagagcggcgccgtgagctgctgccccggcgccaccaacggcagcctgggcagaagcgacggcgtggcctag

SEQ ID NO: 213082 - DNA, 288 bp, Artificial Sequence
  derived and/or modified sequence
atgagccagagcggcgccgtgagctgctgccccggcgccaccaacggcagcctgggcagaagcgacggcgtggccaagatgagccccaaggacctgttcgagcagagaaagaagtacagcaacagcaacgtgatcatgcacgagaccagccagtaccacgtgcagcacctggccaccttcatcatggacaagagcgaggccatcaccagcgtggacgacgccatcagaaagctggtgcagctgagcagcaaggagaagatctggacccaggagatgctgctgcagtag

SEQ ID NO: 213083 - DNA, 252 bp, Artificial Sequence
  derived and/or modified sequence
atgagccagagcggcgccgtgagctgctgccccggcgccaccaacggcagcctgggcagaagcgacggcgtggccaagatgagccccaaggacctgttcgagcagagaaagaagtacagcaacagcaacgtgatcatgcacgagaccagccagtaccacgtgcagcacctggccaccttcatcatggacaagagcgaggccatcaccagcgtggacgacgccatcagaaagctggtgcagctgagcagctag

SEQ ID NO: 213084 - DNA, 240 bp, Artificial Sequence
  derived and/or modified sequence
atgagccagagcggcgccgtgagctgctgccccggcgccaccaacggcagcctgggcagaagcgacggcgtggccaagatgagccccaaggacctgttcgagcagagaaagaagtacagcaacagcaacgtgatcatgcacgagaccagccagtaccacgtgcagcacctggccaccttcatcatggacaagagcgaggccatcaccagcgtggacgacgccatcagaaagctggtgtag

SEQ ID NO: 213085 - DNA, 2148 bp, Artificial Sequence
  derived and/or modified sequence
atgtcccagtccggggccgtgtcttgttgcccgggtgctacgaacggtagcctcggaagaagtgatggcgtagctaaaatgtctccgaaggacctctttgagcaaagaaaaaaatatagcaactctaacgtcatcatgcacgaaacatcccagtatcatgtgcagcacctcgcaacattcataatggacaagtccgaagcaattacaagcgtcgacgacgcaatcaggaaactggtccagctgtcgtctaaggaaaagatctggactcaagagatgctcctgcaggtgaatgatcagagtctccggctgcttgatatcgagtcccaggaggaactggaggattttcctcttcctacagtgcagcggagtcaaactgtgctcaatcaacttcgctatccctccgtgctgctgctcgtgtgtcaggatagcgagcaatctaagccagatgtgcacttcttccactgcgacgaagttgaagcggagctggttcatgaggatatcgagtctgctctggctgattgcaggctggggaaaaaaatgcgcccacagaccttaaaaggacaccaggagaaaatccgtcaaaggcagtctatcttacccccaccgcaaggtccagctcccatcccatttcaacacagaggcggagactctcccgaggccaaaaaccgagtgggcccacaggtcccattgtcagaacccggatttcggagaagggagagccaggaggagccgcgcgccgttctcgcccagaagattgagaaagagactcagatcctgaattgcgcattggacgacattgagtggttcgtagccagactccagaaagccgctgaggcctttaaacagctgaaccagagaaagaaaggcaaaaagaagggaaaaaaggctccagcagagggtgtgcttactctgcgggctcggccgcctagcgagggagaatttattgactgtttccagaaaataaaactggctatcaacttattggccaaactacagaaacacattcagaaccccagcgcagctgagctggtgcactttctgtttgggccccttgatcttatagtgaatacctgttccgggcccgatatcgcaagatccgtatcttgccctttgttatctcgcgacgccgtggactttttgcgaggccacctcgtgccgaaagaaatgtctttatgggagtctcttggtgagtcctggatgcgaccgagatctgaatggcctagggaaccgcaggtccccctatatgtcccaaaattccacagtgggtgggagccgccagtggacgtgttgcaggaggcaccatgggaggttgagggactggcttccgcaccgatcgaagaagtttctccagttagcagacagagcattcgtaacagtcagaaacacagtcccacatcagaaccaactcctcccggtgatgcattgccacccgtgagttcaccacacacccataggggctatcagcccacgccagccatggccaagtacgtgaaaattctctacgatttcaccgctagaaacgcgaacgagttgtctgtactgaaagacgaggtgttagaggttctggaagatggtaggcaatggtggaagctgaggtctaggagcggccaagcaggctacgtgccttgcaatatcctgggtgaggccagacccgaagacgccggagctccgttcgaacaagccgggcagaaatactggggcccagcatccccaacccacaagctgccaccctcttttccggggaataaagatgagctcatgcagcatatggatgaggtgaacgacgaattaatccgaaaaattagtaacatccgggcccaaccacaacgccactttagggttgaaaggagtcaacctgtcagtcagccactgacctacgaatccggacctgatgaggtgagagcctggctggaggccaaggccttcagcccacggatcgtggaaaatctggggatcctgaccggaccacaactgtttagtttaaacaaggaggaactcaaaaaagtatgcggcgaggagggagtccgggtgtatagccaactgaccatgcagaaggcatttcttgaaaagcagcagtcagggtccgaactcgaagaattaatgaacaagtttcactccatgaatcaacgccggggggaagattcttag

SEQ ID NO: 213086 - DNA, 318 bp, Artificial Sequence
  derived and/or modified sequence
atgagccagagcggcgctgtcagctgttgcccgggtgctacgaatggcagcctcggccgaagtgacggcgtagccaagatgtccccaaaggacctgttcgagcagcgaaaaaaatatagcaacagtaacgtgattatgcacgagacttcccaataccatgtgcagcatttagcaacttttatcatggataaatcagaagccatcacttctgtcgatgatgccatccgcaagctggtgcagcttagtagcaaagagaaaatctggacgcaggaaatgttacttcaagttaatgatcaatctctgcgtctgctggactag

SEQ ID NO: 213087 - DNA, 78 bp, Artificial Sequence
  derived and/or modified sequence
atgtcgcagtctggggctgtaagctgctgcccaggggcgacgaacgggtctttagggaggtccgatggagttgcgtag

SEQ ID NO: 213088 - DNA, 2148 bp, Artificial Sequence
  derived and/or modified sequence
atgagtcaatcaggcgccgttagctgttgccctggggcaaccaatggctctctgggtcggagcgatggcgtggcaaagatgtcccccaaagacctgtttgagcagagaaaaaaatattctaactctaatgtcataatgcacgaaacgagccagtaccacgtgcagcacctcgccaccttcattatggacaagtccgaggctattacctcagtcgacgacgctattagaaagttggttcagttgtcaagcaaggaaaaaatctggacgcaagaaatgctcctccaagtgaacgatcagtctctgcgtctgttagatattgaatctcaggaagaacttgaggatttccctctgccaacggtgcagcgcagccaaaccgttctgaatcagctaagatatccaagtgtcctgctgctggtgtgccaggattccgagcaaagcaagccagatgtgcacttcttccactgcgatgaggtcgaggcggaacttgtgcacgaggacattgaatcagctctggccgactgtagacttggaaaaaaaatgcggccgcagactctgaaaggacatcaggagaagatccgacagaggcagagcatcttgccaccgcctcagggtccagctccaatcccattccagcatcgcgggggagactctccagaggctaaaaacagggttggtccccaggtgccactgtcagagcccgggtttaggcgccgcgagagccaggaagaacccagagccgtccttgcacaaaaaatcgaaaaagagacccaaattctcaactgcgcactggatgacatagagtggttcgttgcacggctccaaaaggctgcggaggcgttcaagcagctcaaccagcggaagaaaggcaagaaaaaaggcaaaaaagctccagccgagggggtattaaccctgagagctcggcccccatcggaaggagagttcatcgattgcttccagaagataaaattagccatcaatctcttggcaaagttgcagaaacacatccagaacccctccgccgcagaactggtacattttctatttggccccctggatctgatcgtcaatacctgtagtgggccggacatcgctagatcagtctcctgccctctgctcagtagagatgccgtggactttcttcggggccacttggtcccaaaagagatgtccctgtgggagtctttgggcgaaagttggatgcgccccagatccgaatggcctagggagccccaggtgccgctgtacgtgcctaagtttcattctggctgggagcccccggtcgatgttctgcaagaggccccatgggaggttgagggactggcttcagctcccattgaagaagtgagccctgtaagtaggcagtctataaggaactcccagaaacacagcccaacttcagagcctaccccacccggagatgccctgccccccgtatcctctccacacacccatcggggttatcagcctaccccagctatggcgaaatacgttaaaatcttatatgactttaccgcaagaaacgctaatgagctctcagtgctgaaggacgaggtcctggaagtgctggaggatggcaggcagtggtggaagctaagatctcgctccggccaggctggatatgtgccctgcaatattctgggagaagcccgaccagaagatgcaggggccccttttgaacaggccggtcagaagtactggggaccagccagccccacgcacaagctcccaccctcttttcccgggaataaggatgaactgatgcagcacatggatgaagttaatgatgagctcattcgcaaaatcagtaatattagggcacagcctcagcgtcattttcgcgtggagcgaagccagcctgtcagtcagcctcttacttacgaatcaggccctgatgaggtccgcgcgtggctggaggccaaggctttttccccccgcatagtggaaaatttagggatcctcactggtccgcagctctttagtctgaacaaagaagaactcaaaaaggtttgtggggaggaaggcgtgagagtgtactcccagctaactatgcagaaggcgtttttggaaaaacagcaaagtggtagtgagctcgaggaacttatgaataaatttcactcaatgaatcaaaggagaggagaggattcgtag

SEQ ID NO: 213089 - DNA, 288 bp, Artificial Sequence
  derived and/or modified sequence
atgagtcagtccggggcggtttcttgctgtccaggggcgactaatggcagcctcggaagaagcgatggggtggctaagatgagccccaaagacctgtttgagcagagaaagaagtatagtaactcaaacgtgatcatgcacgagaccagtcaatatcacgtgcaacatctggccacctttatcatggataagagcgaggcaattacatcagtggacgacgctattcggaagctcgttcaactctcgtcgaaggaaaagatctggacacaagaaatgttgctccaatag

SEQ ID NO: 213090 - DNA, 2148 bp, Artificial Sequence
  derived and/or modified sequence
atgagtcagtcgggtgcggtgtcgtgctgcccaggggctacaaacggctctctaggacggagcgatggtgtcgcaaaaatgtcacccaaggatctgttcgagcagaggaaaaaatatagtaactcaaatgtgattatgcacgagacatctcaatatcatgtgcagcacctcgcaaccttcattatggataaaagcgaagctatcacttctgttgacgatgctatcaggaaactggtacagctcagctcaaaggagaagatttggacacaagagatgctcctccaggtcaacgaccagagcctgaggctgctagatatagagagtcaggaggagctagaggattttcctctcccaaccgtacagcggagccaaacggtcttgaaccagctcaggtatcccagcgtcctgctacttgtgtgtcaggattccgagcagtctaaacctgacgtgcacttctttcattgtgacgaggtggaagctgagctggtgcacgaggacatcgaaagtgctctagctgattgtaggctcggcaagaagatgcgaccacaaaccctcaaaggacaccaggagaagatccggcaaaggcaatctattcttccaccgccccagggtccagcacctattcctttccagcatagaggaggagattcccctgaggctaaaaatcgagtagggccccaggtgccgctcagcgaacctggctttcgcaggagggagagccaagaggaacccagagctgtgttggcgcagaaaattgagaaggaaactcagatactgaactgcgcactggacgacatagagtggttcgtggcaagactgcagaaggccgccgaggcattcaagcagcttaaccagcgcaagaagggaaagaagaagggaaaaaaagccccagcagagggagtgctgactctcagggcccggcctccatctgaaggcgagttcattgactgctttcaaaagatcaaactggcgatcaacctcctcgctaaactccagaaacatatacagaatccttctgccgccgagctggtgcactttctcttcggaccactggatctgatcgtgaacacttgctctggtcctgacatagctcgatctgtgtcttgtcctctgctgagccgcgacgcggtggatttcttacgcgggcatttggtccccaaggagatgtctctctgggagtctctgggcgagagttggatgcgcccccgttccgagtggcctcgcgagccccaggtgcccctctacgttccaaagtttcactcagggtgggaacctccagtcgatgtgctccaggaagcgccctgggaagtcgaaggtttagccagcgcaccaattgaggaggtatctcccgtgagtcgccaatccattcggaacagtcagaaacactcacctacttccgagccaaccccgccgggcgatgccctgccacccgtgtcaagcccacacacccatcggggctaccagccaactccagccatggctaaatacgtaaagattttgtacgacttcaccgcccgcaacgcgaacgagttgtctgttcttaaggatgaggtactggaagtactggaagacggccggcagtggtggaagctcaggagtcggtctggccaggctgggtacgtaccgtgcaatattttgggcgaggcccgcccagaagatgctggggctccttttgagcaggctggccagaaatactggggtcctgccagccccacacacaagcttccgccaagtttccctggcaataaagatgagcttatgcaacacatggacgaggtgaacgacgagctcatccgaaagatatcgaacattagagctcagcctcagcgccacttccgggtggaaagatcccagcccgtaagtcagcccctcacctatgaatcgggccccgatgaggtacgagcttggctggaggctaaagcattctctccccgcattgtcgagaatctgggcatactgaccggtccgcagctctttagtctgaataaggaggaattgaagaaagtctgcggggaggagggagtacgcgtctatagccagttaacaatgcagaaagccttcctcgaaaaacaacagagcgggtccgagctggaggaacttatgaataagttccatagtatgaaccaacgtcggggcgaggactcctag

SEQ ID NO: 213091 - DNA, 252 bp, Artificial Sequence
  derived and/or modified sequence
atgagccagtccggggccgttagctgctgcccaggtgccaccaacgggagtcttgggagatccgacggtgtcgctaagatgtctcctaaagatttgtttgagcaacgaaaaaagtattccaattccaatgtgatcatgcacgagacaagccagtaccatgtgcagcacctggccacttttattatggacaaaagcgaggcaattacttctgtggacgacgcaattagaaagctggtccagctgagttcctag

SEQ ID NO: 213092 - DNA, 240 bp, Artificial Sequence
  derived and/or modified sequence
atgtctcagtccggcgctgttagctgctgtcccggcgccactaatggaagcttggggcggtcagatggggtcgcgaagatgtctcctaaggatctctttgagcaaaggaagaaatactcaaacagcaacgtgataatgcacgagacttctcagtatcatgtgcaacacctagccacattcataatggataaaagtgaggctatcacctcagtggacgacgccattcgaaagttagtgtag

SEQ ID NO: 213093 - DNA, 2148 bp, Artificial Sequence
  derived and/or modified sequence
atgagccagagcggggctgtgtcctgctgccctggggccaccaacggcagcctgggccgcagtgatggagtggccaagatgagccccaaggacctgtttgagcagaggaagaagtacagcaacagcaatgtcatcatgcatgagaccagccagtaccacgtgcagcacctggccaccttcatcatggacaagtctgaggccatcacctctgtggatgatgccatcaggaagctggtgcagctgagcagcaaggagaagatctggacccaggagatgctgctgcaggtgaatgaccagagcctgcggctgctggacatcgagagccaggaggagctggaggacttccccctgcccaccgtgcagaggagccagacagtgctgaaccagctgcgctaccccagcgtgctgctgctggtgtgccaggacagcgagcagagcaagccagatgtgcacttcttccactgtgatgaggtggaggccgagctggtgcatgaagatattgaaagtgccctggccgactgccgcctgggcaagaagatgaggccccagaccctgaagggccaccaggagaagatccggcagaggcagagcatcctgcccccaccccagggccctgcccccatccccttccagcaccggggcggggacagccctgaggccaagaacagagtgggcccccaggtgcccctgtctgagcccggcttcagaagaagagagagccaggaggagcccagggctgtgctggcccagaagattgagaaggagacccagatcctgaactgtgccctggatgacatcgagtggtttgtggcccggctgcagaaggctgctgaggccttcaagcagctgaaccagaggaagaagggcaagaagaagggcaagaaggccccagctgagggcgtgctgaccctgcgggcccggccccccagcgagggggagttcatcgactgcttccagaagatcaagctggccatcaacctgctggccaagctgcagaagcacatccagaaccccagcgctgctgagctggtgcacttcctgtttggccccctggacctgattgtgaacacctgcagcggccctgacatcgcccggtctgtgtcctgccccctgctgagcagagatgctgtggacttcctgcggggccacctggtgcccaaggagatgagcctgtgggagagcctgggggagagctggatgaggcccaggtctgagtggccccgggagccccaggtgcccctgtatgtgcccaagttccacagcggctgggagccccctgtggatgtgctgcaggaggccccctgggaggtggagggcctggccagcgcccccatcgaggaggtgtcccctgtgtcccggcagagcatccggaacagccagaagcacagccccaccagcgagcccaccccacctggagatgccctgccccctgtgagcagcccccacacccaccggggctaccagcccaccccagccatggccaagtatgtgaagatcctgtatgacttcaccgccagaaatgccaatgagctgtctgtgctgaaggatgaggtgctggaggtgctggaggatggccggcagtggtggaagctgcggagccgcagcggccaggccggctacgtgccctgcaacatcctgggggaggcccggccagaagatgctggggccccctttgagcaggccggccagaagtactggggccctgccagccccacccacaagctgccccccagcttccctggcaacaaggatgagctgatgcagcacatggatgaggtgaatgatgagctgatcaggaagatcagcaacatccgggcccagccccagaggcacttccgggtggagaggagccagcctgtgtcccagcccctgacctatgagagcggcccagatgaggtgcgggcctggctggaggccaaggccttcagcccccgcatcgtggagaacctgggcatcctgaccggcccccagctgttcagcctgaacaaggaggagctgaagaaggtgtgtggggaggagggcgtgcgggtgtacagccagctgaccatgcagaaggccttcctggagaagcagcagagcggcagcgagctggaggagctgatgaacaagttccacagcatgaaccagaggagaggagaggacagctag

SEQ ID NO: 213094 - DNA, 318 bp, Artificial Sequence
  derived and/or modified sequence
atgagccagagcggggctgtgtcctgctgccctggggccaccaacggcagcctgggccgcagtgatggagtggccaagatgagccccaaggacctgtttgagcagaggaagaagtacagcaacagcaatgtcatcatgcatgagaccagccagtaccacgtgcagcacctggccaccttcatcatggacaagtctgaggccatcacctctgtggatgatgccatcaggaagctggtgcagctgagcagcaaggagaagatctggacccaggagatgctgctgcaggtgaatgaccagagcctgcggctgctggactag

SEQ ID NO: 213095 - DNA, 78 bp, Artificial Sequence
  derived and/or modified sequence
atgagccagagcggggctgtgtcctgctgccctggggccaccaacggcagcctgggccgcagtgatggagtggcctag

SEQ ID NO: 213096 - DNA, 288 bp, Artificial Sequence
  derived and/or modified sequence
atgagccagagcggggctgtgtcctgctgccctggggccaccaacggcagcctgggccgcagtgatggagtggccaagatgagccccaaggacctgtttgagcagaggaagaagtacagcaacagcaatgtcatcatgcatgagaccagccagtaccacgtgcagcacctggccaccttcatcatggacaagtctgaggccatcacctctgtggatgatgccatcaggaagctggtgcagctgagcagcaaggagaagatctggacccaggagatgctgctgcagtag

SEQ ID NO: 213097 - DNA, 252 bp, Artificial Sequence
  derived and/or modified sequence
atgagccagagcggggctgtgtcctgctgccctggggccaccaacggcagcctgggccgcagtgatggagtggccaagatgagccccaaggacctgtttgagcagaggaagaagtacagcaacagcaatgtcatcatgcatgagaccagccagtaccacgtgcagcacctggccaccttcatcatggacaagtctgaggccatcacctctgtggatgatgccatcaggaagctggtgcagctgagcagctag

SEQ ID NO: 213098 - DNA, 240 bp, Artificial Sequence
  derived and/or modified sequence
atgagccagagcggggctgtgtcctgctgccctggggccaccaacggcagcctgggccgcagtgatggagtggccaagatgagccccaaggacctgtttgagcagaggaagaagtacagcaacagcaatgtcatcatgcatgagaccagccagtaccacgtgcagcacctggccaccttcatcatggacaagtctgaggccatcacctctgtggatgatgccatcaggaagctggtgtag

SEQ ID NO: 213099 - DNA, 2148 bp, Artificial Sequence
  derived and/or modified sequence
atgagccagagcggcgccgtgagctgctgccccggcgccaccaacgggagtttgggaaggtccgacggtgtcgccaaaatgtctccaaaggatttgtttgaacagcgtaagaaatattctaactcaaatgtgatcatgcatgagacgagtcagtaccacgtccagcaccttgccacctttattatggataagagtgaggctatcacctctgtcgatgacgctatccgaaaactcgtgcaattaagcagtaaagagaagatctggactcaggaaatgctgctccaagtgaacgaccagagcctgcgcctcctagatattgaaagccaggaagagttggaggacttcccccttccaactgtccagcggagtcagacagtgctcaaccagctgcgttatcctagcgtactcttactggtctgtcaggactccgaacagtcgaagcctgacgtccactttttccactgcgacgaggttgaggccgagttggtacacgaggatatcgaatcagcattagctgattgccgtcttggcaagaagatgcggcctcagactctgaagggtcaccaggagaagattagacagagacaaagcatcttgccacccccccaggggccagcccctattccctttcaacatagggggggggactcacctgaggccaaaaaccgcgtcgggcctcaggtccctctttctgaacctgggtttagaaggagagaaagccaggaggagccacgcgctgtcctggctcagaagatcgagaaagaaacacagatcttgaactgtgccctcgacgatattgagtggttcgtcgcgaggctgcaaaaggccgcagaggccttcaaacaactgaaccagcgcaaaaaaggcaaaaagaaagggaagaaggcccccgccgaaggcgtcctaacactaagggccaggcctccatccgaaggcgaatttattgattgcttccagaagattaagcttgctattaacctgctggcaaagctgcagaaacacatccagaatcccagtgcggctgagctcgtccactttctgttcggcccgctcgacctcattgttaatacgtgcagcggaccagacatcgctagatcggtgagctgccccctcctcagtcgcgacgccgtcgattttctgaggggacatctcgtccccaaggagatgtcactgtgggagagcttgggtgaaagctggatgagacctcgcagcgagtggcccagggagcctcaagttcctctctacgtccctaaatttcacagtggatgggaaccacccgtagacgtgttgcaggaggcgccatgggaggtggagggactcgcctccgcgccgattgaggaagtgagtccggtgtcaagacagtcaattcggaattctcagaaacatagtcccacttcggaacctacacctcctggcgatgcattgcctccggtatcttctccacatacccatagaggctaccagcccacaccagccatggctaaatatgtgaagatcctgtatgatttcactgctcgcaacgccaatgagctgtcggtgctcaaagatgaagtgcttgaggtactggaagatggccgacaatggtggaagctccgctcccgttccggtcaggccgggtatgtgccatgtaatattttaggggaggcccggccagaagatgccggcgccccattcgaacaagcgggccagaagtactggggcccagcctctccgacgcataagttacctccatccttcccaggcaataaagatgagctgatgcaacatatggatgaggttaatgacgaactaatcagaaaaatttcaaacatccgtgcgcagccgcaaagacacttccgggtggagcgatcacaacctgttagtcagccattgacctacgagagtggacctgacgaagtgagagcctggctggaggctaaggcttttagtcctcgaatcgttgagaatcttggcatcctcactggcccacagttgttctctctgaataaggaggagcttaaaaaagtgtgcggcgaagagggggtgagagtctacagccaactgaccatgcagaaggcattccttgagaagcagcagagcggcagcgagctggaggaactcatgaacaaatttcactcaatgaaccagaggcgcggtgaggactcatag

SEQ ID NO: 213100 - DNA, 318 bp, Artificial Sequence
  derived and/or modified sequence
atgagccagagcggcgccgtgagctgctgccccggcgccaccaacggtagtctgggacgcagtgacggcgtcgccaaaatgtcgcccaaggacctgtttgagcagcgtaagaagtattcaaactccaacgttattatgcatgagacaagccagtaccatgttcaacacctggcaacattcattatggacaagagcgaggccatcacaagcgtagacgacgcaatacggaaacttgtgcagctgtccagtaaagagaagatatggactcaagaaatgcttctacaggttaacgaccagtccctgaggctcctggactag

SEQ ID NO: 213101 - DNA, 78 bp, Artificial Sequence
  derived and/or modified sequence
atgagccagagcggcgccgtgagctgctgccccggcgccaccaacggatcccttggcagatccgacggagtggcttag

SEQ ID NO: 213102 - DNA, 2148 bp, Artificial Sequence
  derived and/or modified sequence
atgagccagagcggcgccgtgagctgctgccccggcgccaccaacggctccctggggcgtagtgacggggtggcaaagatgtctcccaaggatttgttcgagcaaagaaagaaatactctaatagcaatgtaattatgcatgagacctcccagtatcatgtgcagcacctggcaacctttatcatggacaaatccgaagccatcacttctgttgacgacgcaatcagaaaattggttcaactgagcagtaaggagaagatttggacacaggagatgctgctccaggtcaatgatcagagtctgagattgctcgacatcgagtcgcaggaagagcttgaggatttcccactcccgacggtgcagaggtcacagacggtgttgaatcaactgcgctacccctctgtgcttctgctggtctgccaagacagcgagcagtctaaaccagacgtgcacttctttcattgcgacgaggttgaagccgaactagttcatgaggatattgaaagcgccttggcagattgccgtcttggcaagaaaatgagaccccagactctcaaaggacatcaggaaaagatacggcaaaggcagtccatcctccccccgcctcaaggtcctgcgccaattcccttccagcaccgcggaggcgatagtccggaggccaagaaccgggtcgggcctcaggtccctctctccgagcccggatttcgccgacgggagagccaggaggaacccagagctgtacttgctcagaaaatcgaaaaagagacacagatcctgaactgcgctttggatgacattgagtggtttgtggcgagactacaaaaagcagccgaagcttttaaacaactgaatcagaggaagaaggggaagaaaaaaggtaagaaagcacccgccgagggagttttaacgctgagagcccgcccacccagtgagggggagttcatcgactgcttccagaagataaagcttgccatcaacttactcgccaagcttcagaagcacatccagaacccatcagccgccgagctagttcacttcctcttcggacccctggatctgattgtcaatacctgctccgggcctgatattgcgcgctcggtaagttgtccactactaagcagagatgctgtggattttctacggggacatttggtgccaaaagaaatgagtttgtgggagtcgcttggcgagtcttggatgagaccccgctctgagtggcctcgggaaccccaggttcccctgtatgtgccaaaattccatagtgggtgggaaccacccgtggatgtgctccaagaagcgccctgggaggtcgaggggctggcgagtgctccaatcgaagaggtatctcctgtgtcgcgccagtctatccgaaatagtcagaaacactctcctactagtgagcctacccctccaggagatgccctgcctccggtctccagcccacacacccatagggggtatcagccaaccccagctatggcaaaatatgtgaaaatcctgtatgactttacagccagaaatgctaatgagctgagtgtgctcaaggatgaggtattggaagtgctggaggatgggagacaatggtggaagttgaggagccgaagcggacaggccggctacgtcccttgcaatatcctgggcgaggctaggccagaggatgcaggcgcacccttcgagcaggccggccaaaagtattgggggccagctagcccaacccacaaacttccaccttcattccccggcaacaaagacgagttaatgcagcacatggacgaggtgaatgacgagctgattagaaaaattagcaatattcgcgctcagcctcagagacacttcagggtcgagagatctcaaccagtgtcccaaccactcacctacgagagcggacccgatgaagtacgagcctggcttgaggcaaaagccttctcccctcgtatcgtggaaaatctgggaatcctaaccgggccccagctgttctccctgaataaggaggaactaaaaaaggtgtgtggggaggagggggtgagagtgtatagtcaattgactatgcaaaaggcattcctggaaaagcagcaaagcggttcagagctagaagagttaatgaataagtttcacagtatgaatcagcggcggggtgaagacagttag

SEQ ID NO: 213103 - DNA, 288 bp, Artificial Sequence
  derived and/or modified sequence
atgagccagagcggcgccgtgagctgctgccccggcgccaccaacgggtctctcggccggagcgacggagtggcaaaaatgtctcctaaggacctgttcgaacagcgaaagaaatacagcaattccaacgtgatcatgcacgagacctctcagtatcatgtgcagcacttggctacattcatcatggataagtctgaggccattacatccgtcgatgatgccattcggaagctagtgcagctgagttcaaaggagaagatttggactcaggagatgcttttgcagtag

SEQ ID NO: 213104 - DNA, 2148 bp, Artificial Sequence
  derived and/or modified sequence
atgagccagagcggcgccgtgagctgctgccccggcgccaccaacgggagtctgggtcgaagtgatggggtcgctaagatgtcccccaaagacctcttcgaacagcggaaaaaatatagcaactccaacgtaattatgcacgagacctcgcaataccatgtccagcacctggccacttttatcatggacaagtcggaggccatcacgtcagtggatgatgctataaggaagctggtgcagctctcatcaaaggagaaaatctggacccaggagatgctcttgcaggttaacgatcagtccctgcgacttcttgacatcgagtctcaggaggaactggaggattttccactccctacagtacaacgtagccagactgtgctaaatcagttgaggtacccttctgtcctccttctggtatgtcaggatagcgagcaatctaagcccgacgttcatttctttcactgtgatgaggttgaggctgagctagtacacgaggacatcgagagtgccttagccgactgcaggctcgggaagaagatgagaccccagacattgaaaggccaccaggagaaaattcgtcagagacagagcattctgcctccacctcaggggccagccccaatcccatttcagcatcgaggtggggacagtccagaagccaaaaatcgggtcggccctcaggttccactgtccgagcccgggtttcggcgcagggagtcacaggaggagccacgggccgtgctggcccagaaaatcgaaaaggagacacagattctcaattgtgccctggacgatatcgaatggttcgtagctcgcttacagaaggctgctgaggccttcaaacaacttaatcagagaaagaaaggtaagaaaaaaggcaagaaggcccccgcagagggtgttttaacccttagagctaggccaccatctgagggggagtttatcgactgcttccagaagatcaaactcgcaattaacctcttggcaaaacttcaaaaacatatccaaaacccttccgccgccgagcttgtgcactttctctttggacccctggacctgattgttaatacatgcagcggccctgatattgcacgaagcgtttcttgcccattgctctcccgggatgctgtcgatttcctcagaggccacctggtgccaaaggagatgagcctgtgggaatctctcggcgaatcttggatgcggccacgctcagaatggcctcgcgagccccaggtgcccctttacgtccccaagtttcacagtggctgggagccgcccgtcgacgtcctgcaagaggcaccgtgggaggtcgagggacttgcgagcgcccctattgaagaggtgtcaccagtgtcaagacaaagcattaggaattctcagaaacactcgcctacatcggagcctacacccccaggggacgccctgccccctgtttccagcccccacactcatcggggctaccagcctaccccggccatggccaagtatgtcaaaatactctacgatttcacagcacgcaatgctaacgaactctcagtcctgaaagatgaagtcctggaagtgctggaggatggtagacagtggtggaagctacggtcacgaagcggccaggcaggatacgtgccatgcaacatactcggcgaggcacgacccgaggatgccggagcgccattcgagcaggctggacagaagtattgggggcccgcctcgcccacccataaactacccccttcttttcctggcaacaaggacgagttgatgcagcacatggacgaagtgaatgatgaacttatcagaaagatcagcaacatccgcgcccaaccccaaagacattttcgggtggagaggtcacagccagtgagccagcctctgacctatgaatccgggccggacgaggtcagggcctggctcgaagctaaggccttttcaccacggatcgtggagaacctcggcattctaacaggcccacagctgttttccctgaataaagaggaactgaagaaggtttgcggggaggagggcgtccgagtatattcccagttgactatgcaaaaggccttcttggagaaacagcaaagcggaagcgaactcgaggagttaatgaacaagttccatagtatgaatcagcggcggggcgaagactcatag

SEQ ID NO: 213105 - DNA, 252 bp, Artificial Sequence
  derived and/or modified sequence
atgagccagagcggcgccgtgagctgctgccccggcgccaccaacggctcactcggcagaagcgacggggtggcgaaaatgtcgccgaaagacctctttgagcagcgaaaaaaatactctaatagtaatgtgattatgcatgaaacaagccagtaccacgtgcagcacctcgccacctttattatggacaagagcgaagccattacctccgtcgacgatgccataaggaaactggtgcagctgtccagttag

SEQ ID NO: 213106 - DNA, 240 bp, Artificial Sequence
  derived and/or modified sequence
atgagccagagcggcgccgtgagctgctgccccggcgccaccaacggttctcttggccgttccgacggagtggccaagatgtctcctaaggatctgtttgagcagagaaaaaagtattccaactctaacgttattatgcacgaaacttcgcagtatcacgttcagcatctcgcaacatttatcatggacaaaagtgaggcaattacaagtgtggatgatgcgattaggaagctcgtctag

SEQ ID NO: 213107 - DNA, 2148 bp, Artificial Sequence
  derived and/or modified sequence
atgtcgcaaagcggcgctgttagctgttgtcccggagccactaacggctcactcggcaggagcgacggcgtcgcaaagatgtctcctaaagatctctttgagcaacgcaagaaatactctaattcaaacgttattatgcacgagactagccagtatcatgtgcagcatctggctacttttatcatggataagagtgaagccattacctctgttgacgacgccatccgaaagctggtgcagctatctagtaaagaaaaaatatggactcaagagatgctgcttcaggttaacgaccagagtctgagacttcttgatatcgaaagtcaggaagaactcgaagattttcctttgcctaccgtccagaggagccagaccgttcttaaccagctgcggtacccctcagtactactcctcgtgtgccaggacagcgaacagagtaagccggacgtgcattttttccactgtgatgaggtagaagccgagctggtgcacgaggatatcgagtcagcccttgccgattgtagattgggaaagaaaatgagaccgcagacgctcaagggtcatcaagagaagatcaggcaacgccagtctatcctccccccacctcagggccctgcccctattcccttccagcataggggcggagacagcccagaggctaaaaatcgggtggggcctcaggttcctctgtctgaaccgggatttagaaggagggagagccaggaagaacccagggctgtgcttgcccagaagatagagaaggagacccagatcctgaattgcgctctcgacgacatcgagtggttcgtggcgaggctgcagaaagctgcagaagccttcaaacagttgaaccagcgaaaaaagggcaagaaaaagggaaaaaaggctcccgctgagggagtccttacactccgggcacggccacccagtgagggtgagtttattgactgctttcagaaaatcaagctcgccataaatctgctggctaaacttcagaagcacattcagaaccccagcgccgcagagctggtgcatttcctttttgggcctctggaccttatcgtgaacacctgcagcgggccagatatagcaaggagcgtgtcatgccctctgctctctcgagatgcagtagatttcctccggggacacctcgttccgaaagagatgtcactctgggaaagtttgggggagagctggatgagaccacgctcagagtggccaagagaaccgcaggtgcctctctacgtgcccaaatttcacagtgggtgggagcctcccgtcgatgttctccaggaagccccatgggaggtagagggtctggcttccgctccaattgaggaagtatcccccgtgagccgtcaatccatcaggaattcccagaagcatagtccaacatcagaacccaccccgccaggcgacgccctgccacccgttagctccccacacacgcacaggggataccaacctacaccagctatggctaagtacgtgaagattctatatgatttcaccgccaggaatgcgaatgagctcagcgtcttaaaagacgaagtgctggaagtgcttgaagatgggaggcagtggtggaaactccgatccagatcgggacaggcaggttacgtaccttgcaatattctcggagaagcccgacctgaggacgccggagctccttttgagcaggctggacagaaatactgggggcctgcttctccgacacataaactgcccccatcgtttcctgggaataaggatgaattaatgcagcacatggatgaggtcaatgacgagcttatccgcaagatcagtaacataagagcccagcctcagcgacactttcgggtggagcggagccagccagtgtctcagccactgacgtacgaatcaggccctgatgaagttagagcttggctggaagccaaagcttttagcccaaggatcgtcgagaacctgggcattctcacaggaccgcagcttttctcccttaacaaagaagaactcaagaaggtctgcggtgaggagggagttcgggtatattctcaactaaccatgcagaaggccttcctggagaagcagcagtccggttcagaactggaagaactgatgaacaagtttcactctatgaaccagagacggggagaggattcctag

SEQ ID NO: 213108 - DNA, 318 bp, Artificial Sequence
  derived and/or modified sequence
atgtctcagtctggagctgtgtcctgctgccccggagcaacaaatgggtcactgggccgtagcgacggggtggccaagatgtcacccaaagacttgttcgaacagagaaagaagtattccaatagtaatgtgatcatgcatgagacttcacagtaccacgtgcagcatctggcaaccttcataatggacaagagtgaggctattacaagcgttgatgacgctatcagaaagctggttcagctgtcctctaaggaaaaaatctggactcaagagatgctcctccaggtcaatgatcagtcgttaagactgctcgattag

SEQ ID NO: 213109 - DNA, 78 bp, Artificial Sequence
  derived and/or modified sequence
atgtcccagagcggtgccgtctcgtgctgcccaggcgcaaccaacggatctcttgggcgtagcgacggcgtggcctag

SEQ ID NO: 213110 - DNA, 2148 bp, Artificial Sequence
  derived and/or modified sequence
atgtcccaatctggggcagtttcatgttgccctggtgccacaaacgggtccctcggacgctctgacggtgtagctaaaatgagtcccaaggatttatttgagcagcggaaaaagtattccaatagcaatgtgataatgcatgagacgagccagtatcacgtgcagcatctggctactttcatcatggataaatctgaggcaataacaagcgtcgatgacgccatcagaaagctggtccagctctcttcaaaggagaagatttggactcaagagatgctattacaggtgaacgatcagtcactgagactcttagacattgaatcgcaggaggaattagaggattttcctttacccactgtccagcgctcacagacggtgttaaatcagttgcgatatccaagcgtcttgttgctggtatgtcaggactcagagcagagcaagcctgacgtgcacttctttcactgcgatgaggtagaagcagagctggtacatgaagatattgagagtgcacttgccgattgcaggcttggaaagaagatgaggccccagacgctgaaggggcaccaggaaaagatcaggcagcgtcagagcatccttccaccaccccaggggcctgcacccatcccctttcagcacaggggcggagactctcctgaagcaaagaatcgcgtcggccctcaagttccactaagtgagccaggctttcgccgacgagagtcacaagaagaacccagagcggtgttggcacagaagatcgaaaaggagacccagattctgaactgcgctctcgatgatatagaatggtttgtggccagactacaaaaggccgctgaagccttcaaacagctgaaccaacgcaaaaaaggcaaaaaaaaaggcaagaaagctcctgccgaaggtgtgctgaccctgcgagctaggcctccatctgagggagagtttattgactgttttcagaagattaaactggcaattaacctgctggcgaaactgcagaagcacattcagaacccgagcgctgcggaactggtccacttccttttcggaccactggacctcatcgttaacacctgctctggaccagacattgcccgaagcgtttcctgccctctcctgagcagggatgccgtggattttttgcgaggacaccttgtacccaaagagatgtctttgtgggaaagccttggagagagttggatgcggccacgcagtgagtggccacgagagccccaggtgcctctctacgttccaaagttccactcaggttgggaacctccagtcgacgtattgcaggaggcgccatgggaagtggagggcttggccagtgccccaatcgaggaagttagccctgttagtcgccagtccattcggaattctcagaaacattctcccaccagtgagcccacccctcccggtgacgccctgccgcctgtttccagcccacatactcaccggggataccagccaactccggctatggcgaaatatgtcaagattctctatgattttaccgcccgaaacgctaacgaattgtcagtcctgaaggatgaagtgctggaagttctggaggatggtaggcagtggtggaagctccggtccaggagtgggcaggccggatatgtgccatgtaatatccttggagaagccaggcctgaggatgcaggcgctccattcgaacaggccggacagaaatactgggggcctgcctcgccaacgcacaagctgcccccatcattcccagggaataaagatgagcttatgcaacacatggacgaagtcaacgatgagctcatcaggaagatctctaacatccgagctcaacctcagaggcacttccgcgtggagcgatcccagcctgtgagtcagcctctaacctatgagtccggcccagatgaggtcagagcatggctagaggctaaggctttctctccgagaatcgtcgaaaatctcgggatcctgacgggaccccaactgttttctttgaacaaggaggagctcaaaaaagtttgcggtgaagagggggtcagagtgtattcacagctgactatgcaaaaagctttcctggagaagcagcagtccgggagtgagctcgaggaactcatgaacaaattccactccatgaatcagcggaggggggaagatagctag

SEQ ID NO: 213111 - DNA, 288 bp, Artificial Sequence
  derived and/or modified sequence
atgtctcagtctggggcagtgtcatgttgcccgggagccactaacggaagcctgggcaggtctgatggagtggccaagatgtcgccaaaggacctgtttgagcaacggaaaaaatacagcaacagcaatgtaattatgcacgagacaagtcagtaccatgtgcagcatctggccacattcatcatggacaagtctgaggcaattacctctgttgatgacgcaattagaaaactggtgcagctgtcttctaaggagaagatatggactcaagaaatgcttctacagtag

SEQ ID NO: 213112 - DNA, 2148 bp, Artificial Sequence
  derived and/or modified sequence
atgtctcaatccggtgccgttagctgctgccctggtgcgactaacgggtcactgggccgatctgatggagtggccaagatgtccccgaaggatctcttcgagcagagaaagaagtactccaatagtaacgtgatcatgcacgaaacaagtcagtatcatgtccaacaccttgctaccttcattatggacaagagtgaggccatcacgagtgttgacgacgctattaggaagttagttcagctgtcctccaaagagaagatctggacccaggagatgctgctgcaggtcaatgatcagtccctacgcttgctggatattgagtcacaagaagagctggaagactttccgctgccgaccgtacagcgcagccagactgtgctgaatcagcttcgctatcctagcgtgctgcttttggtctgtcaggatagcgaacagagcaagccagacgtccatttttttcactgcgacgaagtggaggcagagctggtacacgaggacattgaatcagctctggccgattgccgactgggaaaaaaaatgcgacctcaaaccctgaagggccaccaggagaagatacggcagcggcagtccattctgccacctccacaggggcctgctcccatacctttccagcaccgcggtggggattcccccgaggccaaaaacagggtgggaccccaagttccgttgtctgagcctgggttcagacgacgcgagtcacaggaagagccgagggctgtgctggctcagaaaatcgagaaagagacccagatcttaaactgcgcactggatgacattgagtggtttgtggcaaggctccagaaggccgctgaggcgtttaagcagctgaaccagcgtaaaaaagggaagaagaaggggaaaaaggccccagccgaaggagtactcactctccgggctaggcccccaagcgagggagagttcatcgactgctttcagaaaattaaactggcaattaacctgctggcaaaactccagaaacacatccagaatcccagcgccgcagagctggtgcattttctctttgggcctctggatctgattgttaacacatgctcaggccctgacatcgctagatccgtgagctgtcccctgctgtcccgggatgccgttgactttcttagggggcatctcgtgcccaaggagatgtcactctgggagtcccttggagaatcctggatgcgaccccgtagcgaatggcccagggaaccacaggtacccctatacgtaccaaaattccactcaggctgggaaccccctgtcgatgtcctgcaagaggccccatgggaagtcgaaggcctggcctcagctccaattgaagaagtgtctcccgttagcagacaatccatacgtaactcccagaaacatagccctacaagtgagccaacccctcccggtgatgccctaccaccagtatcctccccccacacccaccgcggatatcaaccgacgcctgcaatggccaaatatgtgaagattttatatgacttcaccgcacgaaatgctaatgaattaagtgtccttaaagatgaggtcctggaggtgctggaagacggcagacagtggtggaagttgcggtccagaagcggacaagcaggatatgttccatgcaatatactgggcgaggctcgtccagaggacgctggagctcccttcgaacaggccggtcagaagtactggggtccagcaagcccaacccataaactgccgccttctttccctggcaataaggacgagctcatgcaacatatggatgaggtgaacgacgaactgataagaaaaatcagcaatatccgagcccaacctcagaggcatttccgcgtggaaaggagccagccggtcagtcagccactgacatacgagtcaggacctgatgaagtcagagcttggctagaggccaaggccttcagcccaagaatcgtcgagaacctgggcatcctcaccggccctcagctgttcagccttaacaaggaagaactgaaaaaagtgtgcggcgaagagggggtgagagtatatagccagctgaccatgcaaaaggcattcttggaaaaacagcagtctggaagtgagctcgaagagctaatgaacaagttccactctatgaaccaacgacgaggagaggattcatag

SEQ ID NO: 213113 - DNA, 252 bp, Artificial Sequence
  derived and/or modified sequence
atgtctcagtccggggcagtgagttgctgtcccggtgctacgaacggctcactgggcagatccgacggggtggccaaaatgtcccccaaggacctatttgaacagcggaaaaagtactccaactccaatgtgataatgcacgagacttcacagtatcatgtgcagcatttagccacatttatcatggataaaagcgaggcgataacaagcgtcgatgatgccatccgcaagttagtccaactttcctcttag

SEQ ID NO: 213114 - DNA, 240 bp, Artificial Sequence
  derived and/or modified sequence
atgtctcagagcggagccgtatcttgctgcccgggagcaactaacggatcattgggcagatctgatggagtcgcaaagatgagccccaaggacctgttcgagcagcgaaagaagtactccaattccaacgttataatgcatgagacatcgcagtatcatgtccagcatctcgcaaccttcataatggataagagcgaggcaatcaccagtgtagacgatgccatccgaaaactggtctag

SEQ ID NO: 213115 - DNA, 580 bp, Artificial Sequence
  derived and/or modified sequence
atttgtggcaggtggggcaggctggtcacctggagcaggttcctcctctcccggccccgccccggcccggccccgccgagcgtcccacccgcccgcgggagacctggcgccccggccgaggcgcgaacagacggacgcaccggcgagcgccgaggggacaggccgagcgcggggcgccggaggcaggtgtgggacaggcactggcctcagaccggggccacactgaggtctgcccttctcccgctggccgccacccaagacaccatgagccagtccggggccgtgagctgctgcccgggtgccaccaatggcagcctgggccggtccgacggtgtggccaagatgagccccaaggacctgtttgagcagaggaagaagtattccaactccaacgtcatcatgcacgagacctcgcagtaccacgtccagcacctggccacattcatcatggacaagagcgaagccatcacgtctgtggacgacgccatccggaagctggtgcagctgagctccaaggagaagatctggacccaggagatgctgctgcaggtgaacgaccagtcgctgcggctgctggaca

SEQ ID NO: 213116 - DNA, 540 bp, Artificial Sequence
  derived and/or modified sequence
attcccacccctacccaggaccggcagccggagccttgggtccctgcatgggcctggggcgccctgtgccccttcacctcgtcctcgtccagttgactgctgtggcagccggtgctacccgctgtgtccactgcaccctggccctgttctgagcggtcacagcagctggggagaagggccatcctggaagccgggcagatgaggacggaaccagacagtcccactgtggtgggcagaggttcctcctctcccggccccgccccggcccggccccgccgagcgtcccacccgcccgcgggagacctggcgccccggccgaggcgcgaacagacggacgcaccggcgagcgccgaggggacaggccgagcgcggggcgccggaggcaggtgtgggacaggcactggcctcagaccggggccacactgaggtctgcccttctcccgctggccgccacccaagacaccatgagccagtccggggccgtgagctgctgcccgggtgccaccaatggcagcctgggccggtccgacggtgtggcca

SEQ ID NO: 213117 - DNA, 2469 bp, Artificial Sequence
  derived and/or modified sequence
ggagagcgctggtggtagggaggcttctcccggttctgtgagcagcaggaccctcccgagggcctgaccgtggaggtagcactgcacacccactccctgtgggccggagccaggaggcacttcctgggtgtcggagcccagaaggaaaccagtggccgggaagcaccagctgggtgtgggacaggcactggcctcagaccggggccacactgaggtctgcccttctcccgctggccgccacccaagacaccatgagccagtccggggccgtgagctgctgcccgggtgccaccaatggcagcctgggccggtccgacggtgtggccaagatgagccccaaggacctgtttgagcagaggaagaagtattccaactccaacgtcatcatgcacgagacctcgcagtaccacgtccagcacctggccacattcatcatggacaagagcgaagccatcacgtctgtggacgacgccatccggaagctggtgcagctgagctccaaggagaagatctggacccaggagatgctgctgcaggtgaacgaccagtcgctgcggctgctggacatcgagtcacaggaggagctggaagacttcccgctgcccacggtgcagcgcagccagacggtcctcaaccagctgcgctacccgtctgtgctgctgctcgtgtgccaggactcggagcagagcaagccggatgtccacttcttccactgcgatgaggtggaggcagagctggtgcacgaggacatcgagagcgcgttggccgactgccggctgggcaagaagatgcggccgcagaccctgaagggacaccaggagaagattcggcagcggcagtccatcctgcctcctccccagggcccggcgcccatccccttccagcaccgcggcggggattccccggaggccaagaatcgcgtgggcccgcaggtgccactcagcgagccaggtttccgccgtcgggagtcgcaggaggagccgcgggccgtgctggctcagaagatagagaaggagacgcaaatcctcaactgcgccctggacgacatcgagtggtttgtggcccggctgcagaaggcagccgaggctttcaagcagctgaaccagcggaaaaaggggaagaagaagggcaagaaggcgccagcagagggcgtcctcacactgcgggcacggcccccctctgagggcgagttcatcgactgcttccagaaaatcaagctggcgattaacttgctggcaaagctgcagaagcacatccagaaccccagcgccgcggagctcgtgcacttcctcttcgggcctctggacctgatcgtcaacacctgcagtggcccagacatcgcacgctccgtctcctgcccactgctctcccgagatgccgtggacttcctgcgcggccacctggtccctaaggagatgtcgctgtgggagtcactgggagagagctggatgcggccccgttccgagtggccgcgggagccacaggtgcccctctacgtgcccaagttccacagcggctgggagcctcctgtggatgtgctgcaggaggccccctgggaggtggaggggctggcgtctgcccccatcgaggaggtgagtccagtgagccgacagtccataagaaactcccagaagcacagccccacttcagagcccacccccccgggggatgccctaccaccagtcagctccccacatactcacaggggctaccagccaacaccagccatggccaagtacgtcaagatcctgtatgacttcacagcccgaaatgccaacgagctatcggtgctcaaggatgaggtcctagaggtgctggaggacggccggcagtggtggaagctgcgcagccgcagcggccaggcggggtacgtgccctgcaacatcctaggcgaggcgcgaccggaggacgccggcgccccgttcgagcaggccggtcagaagtactggggccccgccagcccgacccacaagctacccccaagcttcccggggaacaaagacgagctcatgcagcacatggacgaggtcaacgacgagctcatccggaaaatcagcaacatcagggcgcagccacagaggcacttccgcgtggagcgcagccagcccgtgagccagccgctcacctacgagtcgggtccggacgaggtccgcgcctggctggaagccaaggccttcagcccgcggatcgtggagaacctgggcatcctgaccgggccgcagctcttctccctcaacaaggaggagctgaagaaagtgtgcggcgaggagggcgtccgcgtgtacagccagctcaccatgcagaaggccttcctggagaagcagcaaagtgggtcggagctggaagaactcatgaacaagtttcattccatgaatcagaggaggggggaggacagctaggcccagctgccttgggctggggcctgcggaggggaagcccacccacaatgcatggagtattatttttata

SEQ ID NO: 213118 - DNA, 582 bp, Artificial Sequence
  derived and/or modified sequence
gctctggggcttggtgggggcaatccctgcgtccggagagcgctggtggtagggaggcttctcccggttctgtgagcagcaggaccctcccgagggcctgaccgtggaggtagcactgcacacccactccctgtgggccggagccaggaggcacttcctgggtgtcggagcccagaaggaaaccagtggccgggaagcaccagctgggtcagtctccaggtgtgggacaggcactggcctcagaccggggccacactgaggtctgcccttctcccgctggccgccacccaagacaccatgagccagtccggggccgtgagctgctgcccgggtgccaccaatggcagcctgggccggtccgacggtgtggccaagatgagccccaaggacctgtttgagcagaggaagaagtattccaactccaacgtcatcatgcacgagacctcgcagtaccacgtccagcacctggccacattcatcatggacaagagcgaagccatcacgtctgtggacgacgccatccggaagctggtgcagctgagctccaaggagaagatctggacccaggagatgctgctgcag

SEQ ID NO: 213119 - DNA, 3266 bp, Artificial Sequence
  derived and/or modified sequence
gtgactccgcaacctgtcgctcaggttcctcctctcccggccccgccccggcccggccccgccgagcgtcccacccgcccgcgggagacctggcgccccggccgaggcgcgaacagacggacgcaccggcgagcgccgaggggacaggccgagcgcggggcgccggaggcaggaccctcccgagggcctgaccgtggaggtagcactgcacacccactccctgtgggccggagccaggaggcacttcctgggtgtcggagcccagaaggaaaccagtggccgggaagcaccagctgggtgtgggacaggcactggcctcagaccggggccacactgaggtctgcccttctcccgctggccgccacccaagacaccatgagccagtccggggccgtgagctgctgcccgggtgccaccaatggcagcctgggccggtccgacggtgtggccaagatgagccccaaggacctgtttgagcagaggaagaagtattccaactccaacgtcatcatgcacgagacctcgcagtaccacgtccagcacctggccacattcatcatggacaagagcgaagccatcacgtctgtggacgacgccatccggaagctggtgcagctgagctccaaggagaagatctggacccaggagatgctgctgcaggtgaacgaccagtcgctgcggctgctggacatcgagtcacaggaggagctggaagacttcccgctgcccacggtgcagcgcagccagacggtcctcaaccagctgcgctacccgtctgtgctgctgctcgtgtgccaggactcggagcagagcaagccggatgtccacttcttccactgcgatgaggtggaggcagagctggtgcacgaggacatcgagagcgcgttggccgactgccggctgggcaagaagatgcggccgcagaccctgaagggacaccaggagaagattcggcagcggcagtccatcctgcctcctccccagggcccggcgcccatccccttccagcaccgcggcggggattccccggaggccaagaatcgcgtgggcccgcaggtgccactcagcgagccaggtttccgccgtcgggagtcgcaggaggagccgcgggccgtgctggctcagaagatagagaaggagacgcaaatcctcaactgcgccctggacgacatcgagtggtttgtggcccggctgcagaaggcagccgaggctttcaagcagctgaaccagcggaaaaaggggaagaagaagggcaagaaggcgccagcagagggcgtcctcacactgcgggcacggcccccctctgagggcgagttcatcgactgcttccagaaaatcaagctggcgattaacttgctggcaaagctgcagaagcacatccagaaccccagcgccgcggagctcgtgcacttcctcttcgggcctctggacctgatcgtcaacacctgcagtggcccagacatcgcacgctccgtctcctgcccactgctctcccgagatgccgtggacttcctgcgcggccacctggtccctaaggagatgtcgctgtgggagtcactgggagagagctggatgcggccccgttccgagtggccgcgggagccacaggtgcccctctacgtgcccaagttccacagcggctgggagcctcctgtggatgtgctgcaggaggccccctgggaggtggaggggctggcgtctgcccccatcgaggaggtgagtccagtgagccgacagtccataagaaactcccagaagcacagccccacttcagagcccacccccccgggggatgccctaccaccagtcagctccccacatactcacaggggctaccagccaacaccagccatggccaagtacgtcaagatcctgtatgacttcacagcccgaaatgccaacgagctatcggtgctcaaggatgaggtcctagaggtgctggaggacggccggcagtggtggaagctgcgcagccgcagcggccaggcggggtacgtgccctgcaacatcctaggcgaggcgcgaccggaggacgccggcgccccgttcgagcaggccggtcagaagtactggggccccgccagcccgacccacaagctacccccaagcttcccggggaacaaagacgagctcatgcagcacatggacgaggtcaacgacgagctcatccggaaaatcagcaacatcagggcgcagccacagaggcacttccgcgtggagcgcagccagcccgtgagccagccgctcacctacgagtcgggtccggacgaggtccgcgcctggctggaagccaaggccttcagcccgcggatcgtggagaacctgggcatcctgaccgggccgcagctcttctccctcaacaaggaggagctgaagaaagtgtgcggcgaggagggcgtccgcgtgtacagccagctcaccatgcagaaggccttcctggagaagcagcaaagtgggtcggagctggaagaactcatgaacaagtttcattccatgaatcagaggaggggggaggacagctaggcccagctgccttgggctggggcctgcggaggggaagcccacccacaatgcatggagtattatttttatatgtgtatgtattttgtatcaaggacacggagggggtgtggtgctggctagaggtccctgcccctgtctggaggcacaacgcccatccttaggccaaacagtacccaaggcctcagcccacaccaagactaatctcagccaaacctgctgcttggtggtgccagccccttgtccaccttctcttgaggccacagaactccctggggctggggcctctttctctggcctcccctgtgcacctggggggtcctggcccctgtgatgctcccccatccccacccacttctacatccatccacaccccagggtgagctggagctccaggctggccaggctgaacctcgcacacacgcagagttctgctccctgaggggggcccgggaggggctccagcaggaggccgtgggtgccattcgggggaaagtgggggaacgacacacacttcacctgcaagggccgacaacgcaggggacaccgtgccggcttcagacactcccagcgcccactcttacaggcccaggactggagctttctctggccaagtttcaggccaatgatccccgcatggtgttgggggtgctggtgtgtcttggtgcctggacttgagtctcaccctacagatgagaggtggctgaggcaccagggctaagcaattaaaccagttaagtctccca

SEQ ID NO: 213120 - DNA, 587 bp, Artificial Sequence
  derived and/or modified sequence
acgcaccggcgagcgccgaggggacaggccgagcgcggggcgccggaggcagctctggggcttggtgggggcaatccctgcgtccggagagcgctggtggtagggaggcttctcccggttctgtgagcagcaggaccctcccgagggcctgaccgtggaggtagcactgcacacccactccctgtgggccggagccaggaggcacttcctgggtgtcggagcccagaaggaaaccagtggccgggaagcaccagctgggtgtgggacaggcactggcctcagaccggggccacactgaggtctgcccttctcccgctggccgccacccaagacaccatgagccagtccggggccgtgagctgctgcccgggtgccaccaatggcagcctgggccggtccgacggtgtggccaagatgagccccaaggacctgtttgagcagaggaagaagtattccaactccaacgtcatcatgcacgagacctcgcagtaccacgtccagcacctggccacattcatcatggacaagagcgaagccatcacgtctgtggacgacgccatccggaagctggtgcagctgagctccaa

SEQ ID NO: 213121 - DNA, 474 bp, Artificial Sequence
  derived and/or modified sequence
gagacctggcgccccggccgaggcgcgaacagacggacgcaccggcgagcgccgaggggacaggccgagcgcggggcgccggaggcagtccctcccctaggcttggctgctgccaggggttctgcgctggccacctggccgcatccctgccctcgaggtgtgggacaggcactggcctcagaccggggccacactgaggtctgcccttctcccgctggccgccacccaagacaccatgagccagtccggggccgtgagctgctgcccgggtgccaccaatggcagcctgggccggtccgacggtgtggccaagatgagccccaaggacctgtttgagcagaggaagaagtattccaactccaacgtcatcatgcacgagacctcgcagtaccacgtccagcacctggccacattcatcatggacaagagcgaagccatcacgtctgtggacgacgccatccggaagctggtgca

SEQ ID NO: 213122 - DNA, 3148 bp, Artificial Sequence
  derived and/or modified sequence
tcgggtgactccgcaacctgtcgctcaggttcctcctctcccggccccgccccggcccggccccgccgagcgtcccacccgcccgcgggagacctggcgccccggccgaggcgcgaacagacggacgcaccggcgagcgccgaggggacaggccgagcgcggggcgccggaggcaggtgtgggacaggcactggcctcagaccggggccacactgaggtctgcccttctcccgctggccgccacccaagacaccatgagccagtccggggccgtgagctgctgcccgggtgccaccaatggcagcctgggccggtccgacggtgtggccaagatgagccccaaggacctgtttgagcagaggaagaagtattccaactccaacgtcatcatgcacgagacctcgcagtaccacgtccagcacctggccacattcatcatggacaagagcgaagccatcacgtctgtggacgacgccatccggaagctggtgcagctgagctccaaggagaagatctggacccaggagatgctgctgcaggtgaacgaccagtcgctgcggctgctggacatcgagtcacaggaggagctggaagacttcccgctgcccacggtgcagcgcagccagacggtcctcaaccagctgcgctacccgtctgtgctgctgctcgtgtgccaggactcggagcagagcaagccggatgtccacttcttccactgcgatgaggtggaggcagagctggtgcacgaggacatcgagagcgcgttggccgactgccggctgggcaagaagatgcggccgcagaccctgaagggacaccaggagaagattcggcagcggcagtccatcctgcctcctccccagggcccggcgcccatccccttccagcaccgcggcggggattccccggaggccaagaatcgcgtgggcccgcaggtgccactcagcgagccaggtttccgccgtcgggagtcgcaggaggagccgcgggccgtgctggctcagaagatagagaaggagacgcaaatcctcaactgcgccctggacgacatcgagtggtttgtggcccggctgcagaaggcagccgaggctttcaagcagctgaaccagcggaaaaaggggaagaagaagggcaagaaggcgccagcagagggcgtcctcacactgcgggcacggcccccctctgagggcgagttcatcgactgcttccagaaaatcaagctggcgattaacttgctggcaaagctgcagaagcacatccagaaccccagcgccgcggagctcgtgcacttcctcttcgggcctctggacctgatcgtcaacacctgcagtggcccagacatcgcacgctccgtctcctgcccactgctctcccgagatgccgtggacttcctgcgcggccacctggtccctaaggagatgtcgctgtgggagtcactgggagagagctggatgcggccccgttccgagtggccgcgggagccacaggtgcccctctacgtgcccaagttccacagcggctgggagcctcctgtggatgtgctgcaggaggccccctgggaggtggaggggctggcgtctgcccccatcgaggaggtgagtccagtgagccgacagtccataagaaactcccagaagcacagccccacttcagagcccacccccccgggggatgccctaccaccagtcagctccccacatactcacaggggctaccagccaacaccagccatggccaagtacgtcaagatcctgtatgacttcacagcccgaaatgccaacgagctatcggtgctcaaggatgaggtcctagaggtgctggaggacggccggcagtggtggaagctgcgcagccgcagcggccaggcggggtacgtgccctgcaacatcctaggcgaggcgcgaccggaggacgccggcgccccgttcgagcaggccggtcagaagtactggggccccgccagcccgacccacaagctacccccaagcttcccggggaacaaagacgagctcatgcagcacatggacgaggtcaacgacgagctcatccggaaaatcagcaacatcagggcgcagccacagaggcacttccgcgtggagcgcagccagcccgtgagccagccgctcacctacgagtcgggtccggacgaggtccgcgcctggctggaagccaaggccttcagcccgcggatcgtggagaacctgggcatcctgaccgggccgcagctcttctccctcaacaaggaggagctgaagaaagtgtgcggcgaggagggcgtccgcgtgtacagccagctcaccatgcagaaggccttcctggagaagcagcaaagtgggtcggagctggaagaactcatgaacaagtttcattccatgaatcagaggaggggggaggacagctaggcccagctgccttgggctggggcctgcggaggggaagcccacccacaatgcatggagtattatttttatatgtgtatgtattttgtatcaaggacacggagggggtgtggtgctggctagaggtccctgcccctgtctggaggcacaacgcccatccttaggccaaacagtacccaaggcctcagcccacaccaagactaatctcagccaaacctgctgcttggtggtgccagccccttgtccaccttctcttgaggccacagaactccctggggctggggcctctttctctggcctcccctgtgcacctggggggtcctggcccctgtgatgctcccccatccccacccacttctacatccatccacaccccagggtgagctggagctccaggctggccaggctgaacctcgcacacacgcagagttctgctccctgaggggggcccgggaggggctccagcaggaggccgtgggtgccattcgggggaaagtgggggaacgacacacacttcacctgcaagggccgacaacgcaggggacaccgtgccggcttcagacactcccagcgcccactcttacaggcccaggactggagctttctctggccaagtttcaggccaatgatccccgcatggtgttgggggtgctggtgtgtcttggtgcctggacttgagtctcaccctacagatgagaggtggctgaggcaccagggctaagcaattaaaccagttaagtctcccagga

SEQ ID NO: 213123 - DNA, 2148 bp, Artificial Sequence
  derived and/or modified sequence
atgagccagagcggcgccgtgagctgctgccccggcgccaccaacggcagcctgggcagaagcgacggcgtggccaagatgagccccaaggacctgttcgagcagagaaagaagtacagcaacagcaacgtgatcatgcacgagaccagccagtaccacgtgcagcacctggccaccttcatcatggacaagagcgaggccatcaccagcgtggacgacgccatcagaaagctggtgcagctgagcagcaaggagaagatctggacccaggagatgctgctgcaggtgaacgaccagagcctgagactgctggacatcgagagccaggaggagctggaggacttccccctgcccaccgtgcagagaagccagaccgtgctgaaccagctgagataccccagcgtgctgctgctggtgtgccaggacagcgagcagagcaagcccgacgtgcacttcttccactgcgacgaggtggaggccgagctggtgcacgaggacatcgagagcgccctggccgactgcagactgggcaagaagatgagaccccagaccctgaagggccaccaggagaagatcagacagagacagagcatcctgccccccccccagggccccgcccccatccccttccagcacagaggcggcgacagccccgaggccaagaacagagtgggcccccaggtgcccctgagcgagcccggcttcagaagaagagagagccaggaggagcccagagccgtgctggcccagaagatcgagaaggagacccagatcctgaactgcgccctggacgacatcgagtggttcgtggccagactgcagaaggccgccgaggccttcaagcagctgaaccagagaaagaagggcaagaagaagggcaagaaggcccccgccgagggcgtgctgaccctgagagccagaccccccagcgagggcgagttcatcgactgcttccagaagatcaagctggccatcaacctgctggccaagctgcagaagcacatccagaaccccagcgccgccgagctggtgcacttcctgttcggccccctggacctgatcgtgaacacctgcagcggccccgacatcgccagaagcgtgagctgccccctgctgagcagagacgccgtggacttcctgagaggccacctggtgcccaaggagatgagcctgtgggagagcctgggcgagagctggatgagacccagaagcgagtggcccagagagccccaggtgcccctgtacgtgcccaagttccacagcggctgggagccccccgtggacgtgctgcaggaggccccctgggaggtggagggcctggccagcgcccccatcgaggaggtgagccccgtgagcagacagagcatcagaaacagccagaagcacagccccaccagcgagcccaccccccccggcgacgccctgccccccgtgagcagcccccacacccacagaggctaccagcccacccccgccatggccaagtacgtgaagatcctgtacgacttcaccgccagaaacgccaacgagctgagcgtgctgaaggacgaggtgctggaggtgctggaggacggcagacagtggtggaagctgagaagcagaagcggccaggccggctacgtgccctgcaacatcctgggcgaggccagacccgaggacgccggcgcccccttcgagcaggccggccagaagtactggggccccgccagccccacccacaagctgccccccagcttccccggcaacaaggacgagctgatgcagcacatggacgaggtgaacgacgagctgatcagaaagatcagcaacatcagagcccagccccagagacacttcagagtggagagaagccagcccgtgagccagcccctgacctacgagagcggccccgacgaggtgagagcctggctggaggccaaggccttcagccccagaatcgtggagaacctgggcatcctgaccggcccccagctgttcagcctgaacaaggaggagctgaagaaggtgtgcggcgaggagggcgtgagagtgtacagccagctgaccatgcagaaggccttcctggagaagcagcagagcggcagcgagctggaggagctgatgaacaagttccacagcatgaaccagagaagaggcgaggacagctag

SEQ ID NO: 213124 - protein, 567 aa, Artificial Sequence
  derived and/or modified sequence
MRPDSPTMAAPAESLRRRKTGYSDPEPESPPAPGRGPAGSPAHLHTGTFWLTRIVLLKALAFVYFVAFLVAFHQNKQLIGDRGLLPCRVFLKNFQQYFQDRTSWEVFSYMPTILWLMDWSDMNSNLDLLALLGLGISSFVLITGCANMLLMAALWGLYMSLVNVGHVWYSFGWESQLLETGFLGIFLCPLWTLSRLPQHTPTSRIVLWGFRWLIFRIMLGAGLIKIRGDRCWRDLTCMDFHYETQPMPNPVAYYLHHSPWWFHRFETLSNHFIELLVPFFLFLGRRACIIHGVLQILFQAVLIVSGNLSFLNWLTMVPSLACFDDATLGFLFPSGPGSLKDRVLQMQRDIRGARPEPRFGSVVRRAANVSLGVLLAWLSVPVVLNLLSSRQVMNTHFNSLHIVNTYGAFGSITKERAEVILQGTASSNASAPDAMWEDYEFKCKPGDPSRRPCLISPYHYRLDWLMWFAAFQTYEHNDWIIHLAGKLLASDAEALSLLAHNPFAGRPPPRWVRGEHYRYKFSRPGGRHAAEGKWWVRKRIGAYFPPLSLEELRPYFRDRGWPLPGPL

SEQ ID NO: 213125 - protein, 567 aa, Artificial Sequence
  derived and/or modified sequence
MRPDSPTMAAPAESLRRRKTGYSDPEPESPPAPGRGPAGSPAHLHTGTFWLTRIVLLKALAFVYFVAFLVAFHQNKQLIGDRGLLPCRVFLKNFQQYFQDRTSWEVFSYMPTILWLMDWSDMNSNLDLLALLGLGISSFVLITGCANMLLMAALWGLYMSLVNVGHVWYSFRWESQLLETGFLGIFLCPLWTLSRLPQHTPTSRIVLWGFRWLIFRIMLGAGLIKIRGDRCWRDLTCMDFHYETQPMPNPVAYYLHHSPWWFHRFETLSNHFIELLVPFFLFLGRRACIIHGVLQILFQAVLIVSGNLSFLNWLTMVPSLACFDDATLGFLFPSGPGSLKDRVLQMQRDIRGARPEPRFGSVVRRAANVSLGVLLAWLSVPVVLNLLSSRQVMNTHFNSLHIVNTYGAFGSITKERAEVILQGTASSNASAPDAMWEDYEFKCKPGDPSRRPCLISPYHYRLDWLMWFAAFQTYEHNDWIIHLAGKLLASDAEALSLLAHNPFAGRPPPRWVRGEHYRYKFSRPGGRHAAEGKWWVRKRIGAYFPPLSLEELRPYFRDRGWPLPGPL

SEQ ID NO: 213126 - DNA, 1704 bp, Artificial Sequence
  derived and/or modified sequence
atgaggccagatagtccaaccatggccgcgcctgcggagtcccttagaagacgcaagactggctactccgacccagagccagaaagtcctcctgctccgggtcgcgggccagcaggttcccccgcccacctgcatactgggaccttttggctcacccggattgtgttacttaaagccctggctttcgtatatttcgttgccttcttggtggcctttcaccaaaacaaacagctaattggcgatagaggcctgctgccttgtagggtttttctgaaaaattttcagcaatacttccaggacagaacaagctgggaagtgttctcctacatgcccactattctctggctgatggattggtcagatatgaattccaatctcgatctgttagctctgcttggcctggggatctccagcttcgtgctgattaccggatgcgccaacatgctgctcatggccgctctgtggggactgtacatgtccttggtcaatgttggccacgtttggtacagcttcggctgggagagccaactcctcgagaccgggtttcttggcatatttctttgccccctatggactctgtcccgactaccgcagcacaccccaacctctcgcatcgtgttgtgggggttcaggtggctgatattccggattatgttgggcgccgggttaatcaaaatcaggggcgacaggtgctggcgcgatctgacctgcatggacttccactatgaaacacagcccatgcccaaccccgttgcctattacttgcaccattccccctggtggttccatagattcgaaaccctctcaaatcatttcatcgaactgttggtcccttttttcttgttcctgggacgcagagcatgtattatccacggtgtcttgcagatcctttttcaagccgtgttgatagtgtccggaaacctttcttttctgaactggcttacaatggtgccgagtctcgcgtgcttcgacgatgcgactcttggattcctcttccctagcggtcccgggtcactcaaggaccgagtgctgcagatgcagagggacatccgaggcgctcgcccagagcccaggttcggcagcgtcgtaagaagggccgccaacgtcagcctcggcgtgctcttggcttggctgagcgtgccggtcgttctgaaccttctgtccagccgccaagtgatgaacactcattttaattctctgcatatcgttaacacttatggcgcttttggcagcataactaaggaacgcgccgaggtcattctacaggggacagctagcagcaatgcctctgcccccgacgccatgtgggaagactatgagttcaaatgcaagcctggagacccttccagaagaccctgcctgatcagtccctatcactataggctggattggctgatgtggttcgccgcatttcagacttacgaacataacgactggatcatccacctcgccggcaagcttctggctagcgacgcagaagctctctctcttctggcgcacaacccatttgccggaagaccacccccccggtgggtcaggggcgagcattacagatataaattttctagaccagggggcaggcacgccgccgagggtaaatggtgggtcaggaaaaggattggtgcctactttccaccattatctctggaggaacttagaccatattttagggaccgggggtggccattacccgggccgctctag

SEQ ID NO: 213127 - DNA, 1704 bp, Artificial Sequence
  derived and/or modified sequence
atgcggccagattcaccgacaatggcagctcccgccgaatccttgcgccgccgaaaaactggctattctgatcctgagcctgagagtccgccagcacccggccgtggtcctgctgggtccccagcacatctccacactggaaccttttggctgacaaggattgttcttctcaaggccctcgcttttgtctattttgttgctttcctggtggctttccaccagaacaaacagttgatcggagatagaggtttactgccatgtagggtgtttctcaaaaactttcagcagtattttcaggataggacatcgtgggaagtatttagttacatgcccacaattttatggctcatggactggagcgatatgaattccaaccttgatttgctcgccttgttggggcttggaattagcagctttgttctgattaccggctgtgccaacatgctgctcatggccgctctctggggcctgtacatgtccctggtgaacgttggtcacgtatggtactcctttcgatgggagagccaacttctcgaaacgggttttctcggcatcttcctgtgtcccctgtggaccctgtccagactcccccagcatacccctactagccgtattgtattgtggggctttcgctggcttattttccggatcatgctgggcgctggcctgatcaaaattaggggagaccgatgttggcgcgacctcacatgtatggatttccattatgagactcagcctatgcccaacccagtcgcttactatctgcaccattctccctggtggttccatcgttttgaaactttgagcaaccattttatcgagcttctagtgcccttcttccttttcctgggacgtcgcgcctgcattattcatggagtcctgcagatccttttccaggccgtccttattgtctccggcaatctctcttttctgaattggctgactatggtgccgagcctcgcatgcttcgacgatgccacccttgggttcctgttccctagcggtcccggcagtctaaaagatagggttctgcagatgcagcgggatatcaggggggcacgacctgagccgcgattcgggtcggtcgtgaggcgtgccgcaaacgtctctcttggcgttcttctggcctggttgagcgttccagtggttctcaacctgctatctagcaggcaagtcatgaatacccattttaattctttacacattgtgaacacatacggagcctttggaagcatcaccaaggagcgcgccgaggtaatcttgcagggtacagcatcatctaatgcctccgcgcccgatgcaatgtgggaagattacgagttcaagtgcaagccaggtgatccttctcggcgaccatgtctgatttcaccttatcactaccgccttgattggctgatgtggttcgctgccttccaaacttatgagcataatgattggattattcacctggctggcaagcttttagcatctgacgccgaggctctctccctgttggcccataacccctttgcaggccgtccgcccccacggtgggtcaggggtgaacactatcgctacaagttttctcggccagggggccgccatgccgctgaaggaaagtggtgggtccgcaaaagaatcggcgcctattttcccccacttagcctggaagaactgcggccatattttagggacagagggtggccgctacctggaccactctag

SEQ ID NO: 213128 - DNA, 1704 bp, Artificial Sequence
  derived and/or modified sequence
atgaggccagacagccccaccatggccgccccagctgagagcctgcggcggaggaagacaggctacagcgaccctgagcctgagagccccccagcccctggccggggccctgctggcagccctgcccacctgcacacaggcaccttctggctgacccgcatcgtgctgctgaaggccctggcctttgtgtactttgtggccttcctggtggccttccaccagaacaagcagctgattggagaccggggcctgctgccctgcagggtcttcctgaagaacttccagcagtacttccaggacaggacctcctgggaggtgttctcctacatgcccaccatcctgtggctgatggactggagcgacatgaacagcaacctggacctgctggccctgctgggcctgggcatcagcagctttgtgctgatcaccggctgtgccaacatgctgctgatggccgccctgtggggcctgtacatgagcctggtgaatgtgggccacgtgtggtacagctttggctgggagagccagctgctggagaccggcttcctgggcatcttcctgtgccccctgtggaccctgagccggctgccccagcacacccccaccagcagaattgtgctgtggggcttccgctggctgatcttccgcatcatgctgggcgccggcctcatcaagatccggggggaccgctgctggagggacctgacctgcatggacttccactatgagacccagcccatgcccaaccctgtggcctactacctgcaccacagcccctggtggttccacagatttgagaccctgagcaaccacttcatcgagctgctggtgcccttcttcctgttcctgggcagaagagcctgcatcatccatggagtgctgcagatcctcttccaggccgtgctgattgtgtctggcaacctgtccttcctgaactggctgaccatggtgcccagcctggcctgctttgatgatgccaccctgggcttcctgttccccagcggccctggcagcctgaaggacagagtgctgcagatgcagagggacatccggggggcccggcctgagcccaggtttggatctgtggtgcggcgggccgccaacgtgtccctgggcgtgctgctggcctggctgtctgtgcctgtggtgctgaacctgctgagcagccggcaggtgatgaacacccacttcaacagcctgcacatcgtgaacacctacggggccttcggcagcatcaccaaggagagagctgaggtgatcctgcagggcacagccagcagcaatgccagcgccccagatgccatgtgggaggactatgagttcaagtgcaagccaggggaccccagccggcggccctgcctgatcagcccctaccactaccgcctggactggctgatgtggtttgctgccttccagacctatgagcacaatgactggatcatccacctggccggcaagctgctggccagtgatgctgaggccctgagcctgctggcccacaacccctttgctggccggcccccaccccgctgggtgcggggggagcactaccgctacaagttcagcaggcctgggggcagacatgctgctgagggcaagtggtgggtgaggaagagaattggagcctacttcccccccctgagcctggaggagctgcggccctacttccgggaccggggctggcccctgcccggccccctgtag

SEQ ID NO: 213129 - DNA, 1704 bp, Artificial Sequence
  derived and/or modified sequence
atgaggccagacagccccaccatggccgccccagctgagagcctgcggcggaggaagacaggctacagcgaccctgagcctgagagccccccagcccctggccggggccctgctggcagccctgcccacctgcacacaggcaccttctggctgacccgcatcgtgctgctgaaggccctggcctttgtgtactttgtggccttcctggtggccttccaccagaacaagcagctgattggagaccggggcctgctgccctgcagggtcttcctgaagaacttccagcagtacttccaggacaggacctcctgggaggtgttctcctacatgcccaccatcctgtggctgatggactggagcgacatgaacagcaacctggacctgctggccctgctgggcctgggcatcagcagctttgtgctgatcaccggctgtgccaacatgctgctgatggccgccctgtggggcctgtacatgagcctggtgaatgtgggccacgtgtggtacagcttccgctgggagagccagctgctggagaccggcttcctgggcatcttcctgtgccccctgtggaccctgagccggctgccccagcacacccccaccagcagaattgtgctgtggggcttccgctggctgatcttccgcatcatgctgggcgccggcctcatcaagatccggggggaccgctgctggagggacctgacctgcatggacttccactatgagacccagcccatgcccaaccctgtggcctactacctgcaccacagcccctggtggttccacagatttgagaccctgagcaaccacttcatcgagctgctggtgcccttcttcctgttcctgggcagaagagcctgcatcatccatggagtgctgcagatcctcttccaggccgtgctgattgtgtctggcaacctgtccttcctgaactggctgaccatggtgcccagcctggcctgctttgatgatgccaccctgggcttcctgttccccagcggccctggcagcctgaaggacagagtgctgcagatgcagagggacatccggggggcccggcctgagcccaggtttggatctgtggtgcggcgggccgccaacgtgtccctgggcgtgctgctggcctggctgtctgtgcctgtggtgctgaacctgctgagcagccggcaggtgatgaacacccacttcaacagcctgcacatcgtgaacacctacggggccttcggcagcatcaccaaggagagagctgaggtgatcctgcagggcacagccagcagcaatgccagcgccccagatgccatgtgggaggactatgagttcaagtgcaagccaggggaccccagccggcggccctgcctgatcagcccctaccactaccgcctggactggctgatgtggtttgctgccttccagacctatgagcacaatgactggatcatccacctggccggcaagctgctggccagtgatgctgaggccctgagcctgctggcccacaacccctttgctggccggcccccaccccgctgggtgcggggggagcactaccgctacaagttcagcaggcctgggggcagacatgctgctgagggcaagtggtgggtgaggaagagaattggagcctacttcccccccctgagcctggaggagctgcggccctacttccgggaccggggctggcccctgcccggccccctgtag

SEQ ID NO: 213130 - DNA, 2600 bp, Artificial Sequence
  derived and/or modified sequence
acatgcgccctgacagcccaacaatggcggcgcccgcggagtcgctgaggaggcggaagactgggtactcggatccggagcctgagtcgccgcccgcgccggggcgtggccccgcaggctctccggcccatctccacacgggcaccttctggctgacccggatcgtgctcctgaaggccctagccttcgtgtacttcgtggcattcctggtggctttccatcagaacaagcagctcatcggtgacagggggctgcttccctgcagagtgttcctgaagaacttccagcagtacttccaggacaggacgagctgggaagtcttcagctacatgcccaccatcctctggctgatggactggtcagacatgaactccaacctggacttgctggctcttctcggactgggcatctcgtctttcgtactgatcacgggctgcgccaacatgcttctcatggctgccctgtggggcctctacatgtccctggttaatgtgggccatgtctggtactctttcggatgggagtcccagcttctggagacggggttcctggggatcttcctgtgccctctgtggacgctgtcaaggctgccccagcatacccccacatcccggattgtcctgtggggcttccggtggctgatcttcaggatcatgcttggagcaggcctgatcaagatccggggggaccggtgctggcgagacctcacctgcatggacttccactatgagacccagccgatgcccaatcctgtggcgtactacctgcaccactcaccctggtggttccatcgcttcgagacgctcagcaaccacttcatcgagctcctggtgcccttcttcctcttcctcggccggcgggcgtgcatcatccacggggtgctgcagatcctgttccaggccgtcctcatcgtcagcgggaacctcagcttcctgaactggctgactatggtgcccagcctggcctgctttgatgacgccaccctgggattcttgttcccctctgggccaggcagcctgaaggaccgagttctgcagatgcagagggacatccgaggggcccggcccgagcccagattcggctccgtggtgcggcgtgcagccaacgtctcgctgggcgtcctgctggcctggctcagcgtgcccgtggtcctcaacttgctgagctccaggcaggtcatgaacacccacttcaactctcttcacatcgtcaacacttacggggccttcggaagcatcaccaaggagcgggcggaggtgatcctgcagggcacagccagctccaacgccagcgcccccgatgccatgtgggaggactacgagttcaagtgcaagccaggtgaccccagcagacggccctgcctcatctccccgtaccactaccgcctggactggctgatgtggttcgcggccttccagacctacgagcacaacgactggatcatccacctggctggcaagctcctggccagcgacgccgaggccttgtccctgctggcacacaaccccttcgcgggcaggcccccgcccaggtgggtccgaggagagcactacaggtacaagttcagccgtcctgggggcaggcacgccgccgagggcaagtggtgggtgcggaagaggatcggagcctacttccctccgctcagcctggaggagctgaggccctacttcagggaccgtgggtggcctctgcccgggcccctctagacgtgcaccagaaataaaggcgaagacccagcccctcggcggctcagcaacgtttgcccttccctgcgcccagcccaagctgggcatcgccaagagagacgtggagaggagagcggtgggacccagcccccagcacgggggtccagggtggggtctgttgtcacatactgtggcggctcccaggccctgcccacctggggccccacatccaggccaacccttgtcccaggcgccaggggctctgatctcccatccatcccaccctcctcccagaggcccagcctggggctgtgccgcccacaggagttgagacaatggccatcctgacaccttcctccactacagccctgaccatagacccagccaggtagctcttggggtctctagcgtcccagggcctggtttctgttccctcttcaatggtgtgttcccagccaggtcctgaccctcagagccaagtccctgtcacgtctggggcagccaaaccctcgccccacagggacctggacacgcccggccaggatgtggggttggatgggccattttctgtcctatccctcatctccacccccgccacagcctacacgcatcccacacatgcaggcacacacagcctgtgcacacatgtgttcttggcccggtttcatccccccatgactggtgtctgtgaggtgcagatggacacagcgcacacccagaccctccaccaggctgtgacctcgctgcctctgaggccttgacaaggcccctcaatcggaggacagccggccgtgcacactttcatcatcgtcggacaaacagcgtctactgcacatttttcttattcctattcttgagccatagctatggcatattcttctactattcctattataccacttaccagcttactcg

SEQ ID NO: 213131 - DNA, 2600 bp, Artificial Sequence
  derived and/or modified sequence
acatgcgccctgacagcccaacaatggcggcgcccgcggagtcgctgaggaggcggaagactgggtactcggatccggagcctgagtcgccgcccgcgccggggcgtggccccgcaggctctccggcccatctccacacgggcaccttctggctgacccggatcgtgctcctgaaggccctagccttcgtgtacttcgtggcattcctggtggctttccatcagaacaagcagctcatcggtgacagggggctgcttccctgcagagtgttcctgaagaacttccagcagtacttccaggacaggacgagctgggaagtcttcagctacatgcccaccatcctctggctgatggactggtcagacatgaactccaacctggacttgctggctcttctcggactgggcatctcgtctttcgtactgatcacgggctgcgccaacatgcttctcatggctgccctgtggggcctctacatgtccctggttaatgtgggccatgtctggtattccttcagatgggagtcccagcttctggagacggggttcctggggatcttcctgtgccctctgtggacgctgtcaaggctgccccagcatacccccacatcccggattgtcctgtggggcttccggtggctgatcttcaggatcatgcttggagcaggcctgatcaagatccggggggaccggtgctggcgagacctcacctgcatggacttccactatgagacccagccgatgcccaatcctgtggcgtactacctgcaccactcaccctggtggttccatcgcttcgagacgctcagcaaccacttcatcgagctcctggtgcccttcttcctcttcctcggccggcgggcgtgcatcatccacggggtgctgcagatcctgttccaggccgtcctcatcgtcagcgggaacctcagcttcctgaactggctgactatggtgcccagcctggcctgctttgatgacgccaccctgggattcttgttcccctctgggccaggcagcctgaaggaccgagttctgcagatgcagagggacatccgaggggcccggcccgagcccagattcggctccgtggtgcggcgtgcagccaacgtctcgctgggcgtcctgctggcctggctcagcgtgcccgtggtcctcaacttgctgagctccaggcaggtcatgaacacccacttcaactctcttcacatcgtcaacacttacggggccttcggaagcatcaccaaggagcgggcggaggtgatcctgcagggcacagccagctccaacgccagcgcccccgatgccatgtgggaggactacgagttcaagtgcaagccaggtgaccccagcagacggccctgcctcatctccccgtaccactaccgcctggactggctgatgtggttcgcggccttccagacctacgagcacaacgactggatcatccacctggctggcaagctcctggccagcgacgccgaggccttgtccctgctggcacacaaccccttcgcgggcaggcccccgcccaggtgggtccgaggagagcactacaggtacaagttcagccgtcctgggggcaggcacgccgccgagggcaagtggtgggtgcggaagaggatcggagcctacttccctccgctcagcctggaggagctgaggccctacttcagggaccgtgggtggcctctgcccgggcccctctagacgtgcaccagaaataaaggcgaagacccagcccctcggcggctcagcaacgtttgcccttccctgcgcccagcccaagctgggcatcgccaagagagacgtggagaggagagcggtgggacccagcccccagcacgggggtccagggtggggtctgttgtcacatactgtggcggctcccaggccctgcccacctggggccccacatccaggccaacccttgtcccaggcgccaggggctctgatctcccatccatcccaccctcctcccagaggcccagcctggggctgtgccgcccacaggagttgagacaatggccatcctgacaccttcctccactacagccctgaccatagacccagccaggtagctcttggggtctctagcgtcccagggcctggtttctgttccctcttcaatggtgtgttcccagccaggtcctgaccctcagagccaagtccctgtcacgtctggggcagccaaaccctcgccccacagggacctggacacgcccggccaggatgtggggttggatgggccattttctgtcctatccctcatctccacccccgccacagcctacacgcatcccacacatgcaggcacacacagcctgtgcacacatgtgttcttggcccggtttcatccccccatgactggtgtctgtgaggtgcagatggacacagcgcacacccagaccctccaccaggctgtgacctcgctgcctctgaggccttgacaaggcccctcaatcggaggacagccggccgtgcacactttcatcatcgtcggacaaacagcgtctactgcacatttttcttattcctattcttgagccatagctatggcatattcttctactattcctattataccacttaccagcttactcg

SEQ ID NO: 213132 - DNA, 2599 bp, Artificial Sequence
  derived and/or modified sequence
acatgcgccctgacagcccaacaatggcggcgcccgcggagtcgctgaggaggcggaagactgggtactcggatccggagcctgagtcgccgcccgcgccggggcgtggccccgcaggctctccggcccatctccacacgggcaccttctggctgacccggatcgtgctcctgaaggccctagccttcgtgtacttcgtggcattcctggtggctttccatcagaacaagcagctcatcggtgacagggggctgcttccctgcagagtgttcctgaagaacttccagcagtacttccaggacaggacgagctgggaagtcttcagctacatgcccaccatcctctggctgatggactggtcagacatgaactccaacctggacttgctggctcttctcggactgggcatctcgtctttcgtactgatcacgggctgcgccaacatgcttctcatggctgccctgtggggcctctacatgtccctggttaatgtgggccatgtctggttgttttaggatgggagtcccagcttctggagacggggttcctggggatcttcctgtgccctctgtggacgctgtcaaggctgccccagcatacccccacatcccggattgtcctgtggggcttccggtggctgatcttcaggatcatgcttggagcaggcctgatcaagatccggggggaccggtgctggcgagacctcacctgcatggacttccactatgagacccagccgatgcccaatcctgtggcgtactacctgcaccactcaccctggtggttccatcgcttcgagacgctcagcaaccacttcatcgagctcctggtgcccttcttcctcttcctcggccggcgggcgtgcatcatccacggggtgctgcagatcctgttccaggccgtcctcatcgtcagcgggaacctcagcttcctgaactggctgactatggtgcccagcctggcctgctttgatgacgccaccctgggattcttgttcccctctgggccaggcagcctgaaggaccgagttctgcagatgcagagggacatccgaggggcccggcccgagcccagattcggctccgtggtgcggcgtgcagccaacgtctcgctgggcgtcctgctggcctggctcagcgtgcccgtggtcctcaacttgctgagctccaggcaggtcatgaacacccacttcaactctcttcacatcgtcaacacttacggggccttcggaagcatcaccaaggagcgggcggaggtgatcctgcagggcacagccagctccaacgccagcgcccccgatgccatgtgggaggactacgagttcaagtgcaagccaggtgaccccagcagacggccctgcctcatctccccgtaccactaccgcctggactggctgatgtggttcgcggccttccagacctacgagcacaacgactggatcatccacctggctggcaagctcctggccagcgacgccgaggccttgtccctgctggcacacaaccccttcgcgggcaggcccccgcccaggtgggtccgaggagagcactacaggtacaagttcagccgtcctgggggcaggcacgccgccgagggcaagtggtgggtgcggaagaggatcggagcctacttccctccgctcagcctggaggagctgaggccctacttcagggaccgtgggtggcctctgcccgggcccctctagacgtgcaccagaaataaaggcgaagacccagcccctcggcggctcagcaacgtttgcccttccctgcgcccagcccaagctgggcatcgccaagagagacgtggagaggagagcggtgggacccagcccccagcacgggggtccagggtggggtctgttgtcacatactgtggcggctcccaggccctgcccacctggggccccacatccaggccaacccttgtcccaggcgccaggggctctgatctcccatccatcccaccctcctcccagaggcccagcctggggctgtgccgcccacaggagttgagacaatggccatcctgacaccttcctccactacagccctgaccatagacccagccaggtagctcttggggtctctagcgtcccagggcctggtttctgttccctcttcaatggtgtgttcccagccaggtcctgaccctcagagccaagtccctgtcacgtctggggcagccaaaccctcgccccacagggacctggacacgcccggccaggatgtggggttggatgggccattttctgtcctatccctcatctccacccccgccacagcctacacgcatcccacacatgcaggcacacacagcctgtgcacacatgtgttcttggcccggtttcatccccccatgactggtgtctgtgaggtgcagatggacacagcgcacacccagaccctccaccaggctgtgacctcgctgcctctgaggccttgacaaggcccctcaatcggaggacagccggccgtgcacactttcatcatcgtcggacaaacagcgtctactgcacatttttcttattcctattcttgagccatagctatggcatattcttctactattcctattataccacttaccagcttactcg

SEQ ID NO: 213133 - DNA, 1704 bp, Artificial Sequence
  derived and/or modified sequence
atgcggcccgacagccccaccatggccgcccccgccgagagcctgagaaggagaaagaccgggtactcagatcctgaaccagaatctccgccggcaccaggtcgtgggccggcgggatctcccgcccacctacacactggcaccttttggttaacccggatcgtgcttcttaaggccctcgccttcgtttatttcgtggccttcttggtggcttttcaccaaaataaacaactcattggcgacaggggactgctgccctgcagagtatttttaaagaattttcagcaatactttcaggaccgaacgagttgggaggtgtttagttatatgccaaccatcctgtggctgatggactggtctgacatgaacagtaacctggacctgctggctttattgggcctcggcatttccagcttcgtccttattactggttgcgcgaacatgcttctgatggccgccttgtggggactgtacatgtctctcgtgaacgtcgggcatgtgtggtactcattcggttgggagtcacagttactggagactggattcttggggatcttcctgtgtccactctggactttaagccgacttccgcagcatacaccaacaagtcggatcgtcctatggggattcagatggcttattttcaggatcatgctgggtgctggccttatcaaaatcagaggcgataggtgttggagggatcttacttgcatggatttccactatgaaacccagcccatgccaaaccccgtagcctattatctccaccacagcccttggtggttccatcggttcgagacgctatcgaatcatttcatcgaactgcttgtgcccttcttcctatttttgggcaggagagcctgcattatccacggcgtcctccagatccttttccaggccgtcttgattgtatccggaaacctgtcttttctgaactggttgacaatggtgcccagtctcgcatgcttcgacgatgcgacactgggttttctgttcccctctggccccggatctctcaaggaccgcgtgcttcaaatgcaaagagatatacggggggcgaggcctgagccaagattcggctctgtggttcgcagagctgctaatgtaagccttggggtcctcttggcctggctcagcgtaccagtggttctgaacttattatcttctcgccaagttatgaatacccactttaattctctgcacattgtcaatacgtatggcgcgtttgggtcaatcacaaaggagagggctgaggtcatcttgcaaggtacagctagctccaatgcgtccgccccggacgccatgtgggaagattatgaattcaaatgcaaaccaggcgacccctcccggagaccatgcctgatctccccttatcattatcgcttggattggctgatgtggttcgccgccttccagacctacgagcataacgactggataatccatctcgcaggaaagctcttagccagtgacgccgaggctctgagcctgctggcccataacccctttgctgggagacctccaccccggtgggttcggggtgagcattataggtataaattttccagaccaggcggcaggcacgccgcagaagggaagtggtgggtcagaaagaggattggagcttacttcccaccactgtctcttgaggagctgaggccatacttcagagacagaggctggccactgcccggcccgctgtag

SEQ ID NO: 213134 - DNA, 1704 bp, Artificial Sequence
  derived and/or modified sequence
atgcggcccgacagccccaccatggccgcccccgccgagagcctgagacggagaaaaacgggatactccgaccctgaacccgaatctccacccgctcctgggcggggaccagccggttcacccgctcatctgcataccgggaccttctggctaaccagaattgtgctcctcaaggccctggcctttgtgtactttgtggccttcctggttgcatttcatcagaataagcagctcattggcgacagaggactgctaccctgccgcgtattccttaagaattttcagcagtactttcaggacaggacgtcttgggaggtcttctcgtacatgcccacaatcctgtggctaatggattggagcgacatgaatagtaatttggaccttctggccctgctgggcctcggtataagctcttttgtgctcattaccggctgcgctaacatgttgctcatggccgctctctgggggctgtatatgtcactcgtaaatgtgggacatgtttggtattcgttccggtgggagtctcaacttctggagaccggatttctgggcatctttctctgccccctgtggaccctaagtcgtctcccccaacatacacctaccagtaggatcgtactctggggctttcgctggttaattttcagaattatgctgggtgccggcctgattaaaatccgcggggacagatgctggagggatctgacatgtatggacttccattacgaaacacagcctatgcctaaccccgtcgcatattacctgcatcattctccttggtggttccatcgttttgaaaccttaagcaatcacttcattgagctattggtcccattcttcctctttcttggtaggcgggcctgcataatccatggcgtgttgcagattctcttccaggccgtactcatcgtatctggcaatctgagcttcctgaactggctcaccatggtgcccagtcttgcttgttttgatgatgccactttgggcttcctcttcccatctggtccaggaagccttaaggatagggtactgcaaatgcagcgcgacatccgaggtgcccgtccagaacctcgatttggatctgtggtcagaagagccgctaacgtgagtctaggagtgttgcttgcatggctttccgtgccagtcgtcctgaacttactgtcctctcggcaggtgatgaacacccattttaactccctgcacattgtcaacacgtacggagcttttggaagtataactaaggagcgagccgaagtcattctccagggtacagccagtagtaatgcttccgctcctgatgctatgtgggaggactacgagtttaagtgtaagccgggggacccatctaggagaccttgcctaatctcaccataccactacagactagactggttgatgtggttcgcagcatttcaaacgtacgagcacaacgattggattatacacttggcaggtaaattgctggcatccgacgccgaggccttgagcttgctggcccacaatccttttgctggtcggcctcctcctcgatgggtccgcggtgagcactaccggtataaattttcaaggcccgggggtcgtcacgccgccgagggcaagtggtgggtccggaagcgcatcggagcctacttcccacccttatctctcgaagagctccggccttattttcgggacagaggctggcccttgcccgggcctctgtag

SEQ ID NO: 213135 - DNA, 1704 bp, Artificial Sequence
  derived and/or modified sequence
atgaggcctgattctcctacaatggccgctcccgctgaatcccttagaagaaggaaaacaggctatagcgacccggagcccgagtcgcccccagcgccaggccgaggcccagccggatccccagcacaccttcatacaggaacattctggctgactcggatcgttctcttgaaggccctggcattcgtgtatttcgtggcattcctcgtggcttttcaccagaataagcagctaatcggtgataggggacttttgccttgccgggtgttcctcaaaaattttcagcaatacttccaagaccggacctcctgggaagtgtttagctatatgcccactatcctctggcttatggactggtccgacatgaatagcaatctggacctgctggcattattgggactgggaataagctccttcgtccttattaccgggtgtgctaatatgcttttgatggctgccctatgggggctttacatgtccctagtaaatgtaggccatgtttggtatagtttcgggtgggagagtcagttgttggagactggatttttaggcatcttcctgtgtccattatggactttgagcaggctgccccagcacacccctactagccggatcgtgctgtggggcttcaggtggctgatttttcgtatcatgttgggcgcaggcttaatcaaaattcgcggtgataggtgctggcgtgacctgacgtgcatggactttcactatgaaactcagccaatgcccaatccagtggcgtactatcttcatcacagtccgtggtggttccaccgcttcgagactctgagcaatcacttcatcgaactattagtgccgtttttcctattcctaggtcgcagggcttgcattattcacggtgtactccaaatcctttttcaggctgtgcttatcgtgtctggtaatctgagcttcctcaactggctcaccatggtgccatccctcgcgtgcttcgacgatgcaacactgggcttcctcttcccctctggccctggcagcctgaaagaccgagtcctccagatgcagagggatatcagaggtgcccgtcccgaaccacgcttcggtagcgtggtgagacgagcagctaatgtttcactcggcgtactgttggcatggctctccgtccctgtcgtactgaatctcttgagtagccgccaagtgatgaatacacattttaattcgttgcacatcgtcaatacctatggagcgttcggttcaatcactaaagaaagagccgaagtgattctgcaaggcacagcatccagtaatgctagcgcacccgacgcaatgtgggaggattacgagtttaagtgcaagcctggcgatccgtcccgtcgaccctgcctgatcagtccgtaccactacaggttggattggttaatgtggttcgccgcttttcagacttacgagcataatgactggatcatccatcttgcgggtaagttgctagccagcgatgcggaggcactgagccttctcgcccacaatccctttgcaggcagaccgccaccacgctgggttcgcggagagcactatcgctacaaattctcacgtccaggtggacggcatgctgctgaggggaaatggtgggtgcggaaaaggatcggcgcatactttccgcctttaagtctggaagagctgcgcccttactttagggatcggggttggccacttcccggaccgttgtag

SEQ ID NO: 213136 - DNA, 1704 bp, Artificial Sequence
  derived and/or modified sequence
atgagacccgacagtccaaccatggctgcaccagcagagagcctgaggaggagaaaaaccggatactccgatcccgaacccgagagcccaccagctccaggacgtgggcctgctggaagccccgcacaccttcacaccggcactttctggttaaccaggatcgtactactgaaggcgctagcctttgtgtacttcgtggcctttctcgtggcattccaccaaaataagcagctaattggagatcgagggctgttgccgtgccgcgtctttctcaagaatttccagcaatactttcaggaccggacgtcctgggaagtgttctcttacatgcccacgattctctggcttatggattggtccgacatgaactccaaccttgaccttctcgcgctcctgggcctgggaatcagctcctttgtgttgatcaccggatgcgctaatatgcttctgatggctgccctgtggggattgtatatgagtctcgtaaacgtgggtcacgtttggtactcttttagatgggagagccaactgttggagaccgggttccttgggatctttctgtgtcctctgtggacactgtccagattgcctcagcacacccctacctcgcgcatcgtgctgtggggcttcaggtggctgatttttcgaatcatgctaggggcagggctgataaaaatccgcggagaccgctgctggagggatctcacgtgcatggacttccactatgagacacaacccatgcccaatccggttgcctattatctacaccactcaccatggtggttccatcggtttgaaactctgtcgaaccatttcatcgaactgctcgttcccttctttctgtttttaggcaggcgcgcttgcataattcacggcgtgctgcagatcctgtttcaggccgtcctgattgtgtcaggcaatttgtccttcctaaactggctgacaatggtacctagtctggcatgttttgacgacgccaccttgggcttcctgtttccctcaggtccaggcagcttaaaagaccgggtgcttcagatgcagagggatattaggggggcacgtcccgaacctcgattcggcagcgtggtacggagagccgctaatgtctctttgggcgtgcttctggcctggctctctgtgcccgtggtgctgaacctcctgagcagtcgccaggtgatgaatacacatttcaattctttgcatatcgtcaacacctatggcgcattcggatccattacgaaggagagagctgaggtgattctgcagggcacagcttcctctaatgcttccgcacccgatgccatgtgggaagattacgaatttaagtgcaaacctggcgaccctagtagacgcccatgtttgatttccccgtaccactatagactggactggttgatgtggttcgctgccttccagacatacgagcacaatgattggatcatccatctggctggcaagcttcttgccagtgatgctgaggcactgtcactcctggctcacaaccccttcgcaggcaggcctccgcctaggtgggtgagaggtgagcattaccggtacaaattctcccgtccaggcggtcgccacgccgctgagggaaagtggtgggtgcggaagcggattggggcttatttcccacctttgtcactcgaggaactgcgcccatactttcgcgaccggggatggcctctaccgggtccactatag

SEQ ID NO: 213137 - DNA, 1704 bp, Artificial Sequence
  derived and/or modified sequence
atgagacccgacagccccaccatggccgcccccgccgagagcctgagaagaagaaagaccggctacagcgaccccgagcccgagagcccccccgcccccggcagaggccccgccggcagccccgcccacctgcacaccggcaccttctggctgaccagaatcgtgctgctgaaggccctggccttcgtgtacttcgtggccttcctggtggccttccaccagaacaagcagctgatcggcgacagaggcctgctgccctgcagagtgttcctgaagaacttccagcagtacttccaggacagaaccagctgggaggtgttcagctacatgcccaccatcctgtggctgatggactggagcgacatgaacagcaacctggacctgctggccctgctgggcctgggcatcagcagcttcgtgctgatcaccggctgcgccaacatgctgctgatggccgccctgtggggcctgtacatgagcctggtgaacgtgggccacgtgtggtacagcttcggctgggagagccagctgctggagaccggcttcctgggcatcttcctgtgccccctgtggaccctgagcagactgccccagcacacccccaccagcagaatcgtgctgtggggcttcagatggctgatcttcagaatcatgctgggcgccggcctgatcaagatcagaggcgacagatgctggagagacctgacctgcatggacttccactacgagacccagcccatgcccaaccccgtggcctactacctgcaccacagcccctggtggttccacagattcgagaccctgagcaaccacttcatcgagctgctggtgcccttcttcctgttcctgggcagaagagcctgcatcatccacggcgtgctgcagatcctgttccaggccgtgctgatcgtgagcggcaacctgagcttcctgaactggctgaccatggtgcccagcctggcctgcttcgacgacgccaccctgggcttcctgttccccagcggccccggcagcctgaaggacagagtgctgcagatgcagagagacatcagaggcgccagacccgagcccagattcggcagcgtggtgagaagagccgccaacgtgagcctgggcgtgctgctggcctggctgagcgtgcccgtggtgctgaacctgctgagcagcagacaggtgatgaacacccacttcaacagcctgcacatcgtgaacacctacggcgccttcggcagcatcaccaaggagagagccgaggtgatcctgcagggcaccgccagcagcaacgccagcgcccccgacgccatgtgggaggactacgagttcaagtgcaagcccggcgaccccagcagaagaccctgcctgatcagcccctaccactacagactggactggctgatgtggttcgccgccttccagacctacgagcacaacgactggatcatccacctggccggcaagctgctggccagcgacgccgaggccctgagcctgctggcccacaaccccttcgccggcagacccccccccagatgggtgagaggcgagcactacagatacaagttcagcagacccggcggcagacacgccgccgagggcaagtggtgggtgagaaagagaatcggcgcctacttcccccccctgagcctggaggagctgagaccctacttcagagacagaggctggcccctgcccggccccctgtag

SEQ ID NO: 213138 - DNA, 1704 bp, Artificial Sequence
  derived and/or modified sequence
atgagacccgacagccccaccatggccgcccccgccgagagcctgagaagaagaaagaccggctacagcgaccccgagcccgagagcccccccgcccccggcagaggccccgccggcagccccgcccacctgcacaccggcaccttctggctgaccagaatcgtgctgctgaaggccctggccttcgtgtacttcgtggccttcctggtggccttccaccagaacaagcagctgatcggcgacagaggcctgctgccctgcagagtgttcctgaagaacttccagcagtacttccaggacagaaccagctgggaggtgttcagctacatgcccaccatcctgtggctgatggactggagcgacatgaacagcaacctggacctgctggccctgctgggcctgggcatcagcagcttcgtgctgatcaccggctgcgccaacatgctgctgatggccgccctgtggggcctgtacatgagcctggtgaacgtgggccacgtgtggtacagcttcagatgggagagccagctgctggagaccggcttcctgggcatcttcctgtgccccctgtggaccctgagcagactgccccagcacacccccaccagcagaatcgtgctgtggggcttcagatggctgatcttcagaatcatgctgggcgccggcctgatcaagatcagaggcgacagatgctggagagacctgacctgcatggacttccactacgagacccagcccatgcccaaccccgtggcctactacctgcaccacagcccctggtggttccacagattcgagaccctgagcaaccacttcatcgagctgctggtgcccttcttcctgttcctgggcagaagagcctgcatcatccacggcgtgctgcagatcctgttccaggccgtgctgatcgtgagcggcaacctgagcttcctgaactggctgaccatggtgcccagcctggcctgcttcgacgacgccaccctgggcttcctgttccccagcggccccggcagcctgaaggacagagtgctgcagatgcagagagacatcagaggcgccagacccgagcccagattcggcagcgtggtgagaagagccgccaacgtgagcctgggcgtgctgctggcctggctgagcgtgcccgtggtgctgaacctgctgagcagcagacaggtgatgaacacccacttcaacagcctgcacatcgtgaacacctacggcgccttcggcagcatcaccaaggagagagccgaggtgatcctgcagggcaccgccagcagcaacgccagcgcccccgacgccatgtgggaggactacgagttcaagtgcaagcccggcgaccccagcagaagaccctgcctgatcagcccctaccactacagactggactggctgatgtggttcgccgccttccagacctacgagcacaacgactggatcatccacctggccggcaagctgctggccagcgacgccgaggccctgagcctgctggcccacaaccccttcgccggcagacccccccccagatgggtgagaggcgagcactacagatacaagttcagcagacccggcggcagacacgccgccgagggcaagtggtgggtgagaaagagaatcggcgcctacttcccccccctgagcctggaggagctgagaccctacttcagagacagaggctggcccctgcccggccccctgtag

SEQ ID NO: 213139 - protein, 747 aa, Artificial Sequence
  derived and/or modified sequence
MQGGEPVSTMKVSESEGKLEGQATAVTPNKNSSCGGGISSSSSSRGGSAKGWQYSDHMENVYGYLMKYTNLVTGWQYRFFVLNNEAGLLEYFVNEQSRNQKPRGTLQLAGAVISPSDEDSHTFTVNAASGEQYKLRATDAKERQHWVSRLQICTQHHTEAIGKNNPPLKSRSFSLASSSNSPISQRRPSQNAISFFNVGHSKLQSLSKRTNLPPDHLVEVREMMSHAEGQQRDLIRRIECLPTSGHLSSLDQDLLMLKATSMATMNCLNDCFHILQLQHASHQKGSLPSGTTIEWLEPKISLSNHYKNGADQPFATDQSKPVAVPEEQPVAESGLLAREPEEINADDEIEDTCDHKEDDLGAVEEQRSVILHLLSQLKLGMDLTRVVLPTFILEKRSLLEMYADFMSHPDLFIAITNGATAEDRMIRFVEYYLTSFHEGRKGAIAKKPYNPIIGETFHCSWKMPKSEVASSVFSSSSTQGVTNHAPLSGESLTQVGSDCYTVRFVAEQVSHHPPVSGFYAECTERKMCVNAHVWTKSKFLGMSIGVTMVGEGILSLLEHGEEYTFSLPCAYARSILTVPWVELGGKVSVNCAKTGYSASITFHTKPFYGGKLHRVTAEVKHNITNTVVCRVQGEWNSVLEFTYSNGETKYVDLTKLAVTKKRVRPLEKQDPFESRRLWKNVTDSLRESEIDKATEHKHTLEERQRTEERHRTETGTPWKTKYFIKEGDGWVYHKPLWKIIPTTQPAE

SEQ ID NO: 213140 - DNA, 2244 bp, Artificial Sequence
  derived and/or modified sequence
atgcagggcggggaaccagtgtctactatgaaggtgagcgaaagcgaaggcaaactcgaaggccaagccacagccgtgacacccaacaagaattcatcctgcggcggtgggatatcctcgagctccagcagcagagggggttccgcgaaaggctggcaatatagtgatcacatggagaacgtctatgggtatctgatgaaatatacgaatttagtcacgggctggcaatatcggttcttcgtcctaaacaatgaggccggtcttctcgaatactttgttaatgagcaatctcgaaatcaaaagccacgcggcaccctccagttagctggagccgtgatatctccatccgacgaagactctcatactttcactgtgaatgccgcgtcaggcgagcagtacaaactgcgcgctactgacgccaaggagcgccagcattgggtctcccggctgcagatatgcacccagcaccatacagaggcgatcggaaagaataacccccctctgaaaagcaggagcttttcactggcatcctcaagtaacagcccaatctctcagaggagaccttcacagaacgccattagtttttttaacgtaggccattcaaagctgcagtctctttccaagaggaccaacttacctcccgaccacctggtggaagtgagagagatgatgagtcacgccgaggggcaacagcgagacctgatacggaggatcgagtgcttgccaactagtggccatctgagcagcctcgaccaagacctgctcatgctgaaagcaacctccatggctacaatgaattgtctcaatgactgcttccacatcctgcaattgcagcacgcttcccatcagaaaggcagtctgccctcaggtaccaccatcgagtggttggagccgaaaatctccctgtccaaccactataaaaacggggccgaccagccatttgcaacagatcagtcaaagcccgtcgcggtgcctgaagagcaaccagttgccgaatctgggctgttggctcgtgaaccggaagagattaacgctgacgatgaaatcgaggacacttgcgaccacaaagaggacgacttaggtgccgtcgaggaacagagaagtgtcattctgcacctgctttcacagttaaagctgggcatggacctgactcgcgtggttctgcctacctttattttggagaaacggagcctcttggaaatgtacgcagattttatgtcacatcccgacctgtttatcgccatcaccaatggagctacggctgaggaccgcatgatccggttcgtggagtattatctcacttccttccacgaaggtaggaaaggagccattgccaagaagccttataatccgataatcggcgagactttccattgctcatggaaaatgccaaaaagcgaggtcgcctcctccgtcttcagctcttcttccacacaaggggttacaaatcacgcacctctgtccggggagagcctcacccaggtcggttccgattgttataccgtgaggttcgtggcagagcaggtaagtcaccatccacccgtgagtgggttctacgcagagtgtacagagcgaaaaatgtgcgtgaatgctcacgtatggacaaaatctaaatttctgggaatgtctatcggcgttaccatggttggcgagggaattctgtcccttctggagcacggagaggaatacaccttttcactcccctgtgcttacgccaggagcattctaactgtgccttgggttgagctgggcggaaaagttagtgtgaactgcgctaaaaccggatattctgcctccataacatttcacacgaaacctttttacggaggaaagttgcaccgagtaaccgcagaggtgaagcacaatatcaccaacacagtcgtctgtcgggtgcagggtgagtggaacagtgtactggagttcacttattcaaatggagaaaccaaatatgttgacttaacgaaactggcagttactaagaaacgtgtccggcctctggaaaagcaggaccccttcgaatctagacggctgtggaagaacgttaccgactctctgcgggaatccgaaattgacaaagcgacagagcacaagcatactctggaggagaggcaaagaacagaggaaaggcacaggaccgagacaggcacaccatggaagacaaagtactttatcaaggagggggatggttgggtgtaccacaagccactgtggaagatcattcccacaacacagcccgccgagtag

SEQ ID NO: 213141 - DNA, 2244 bp, Artificial Sequence
  derived and/or modified sequence
atgcagggcggggagcctgtgtccaccatgaaggtgtctgagagcgagggcaagctggagggccaggccacagctgtgacccccaacaagaacagcagctgtggcggcggcatcagcagcagcagcagcagccggggcggcagcgccaagggctggcagtacagcgaccacatggagaatgtgtatggctacctgatgaagtacaccaacctggtgacaggctggcagtaccgcttctttgtgctgaacaatgaggccggcctgctggagtactttgtgaatgagcagagcaggaaccagaagccccggggcaccctgcagctggccggggctgtgatcagccccagtgatgaggacagccacaccttcaccgtgaatgctgccagcggggagcagtacaagctgcgggccacagatgccaaggagcggcagcactgggtgtcccggctgcagatctgcacccagcaccacacagaggccatcggcaagaacaacccccccctgaagagccgctccttcagcctggccagcagcagcaacagccccatcagccagaggcggcccagccagaatgccatctccttcttcaacgtgggccacagcaagctgcagagcctgagcaagaggaccaacctgcccccagaccacctggtggaggtgcgggagatgatgagccatgctgagggccagcagagggacctgatcagaagaattgaatgtctgcccaccagcggccacctgagcagcctggaccaggacctgctgatgctgaaggccacctccatggccaccatgaactgcctgaatgactgcttccacatcctgcagctgcagcacgccagccaccagaagggcagcctgcccagcggcaccaccatcgagtggctggagcccaagatcagcctgagcaaccactacaagaatggagctgaccagccctttgccacagaccagagcaagcctgtggccgtgcctgaggagcagcctgtggccgagagcggcctgctggcccgggagcctgaggagatcaatgctgatgatgaaattgaggacacctgtgaccacaaggaggatgacctgggcgctgtggaggagcagaggagcgtcatcctgcacctgctgagccagctgaagctgggcatggacctgaccagggtggtgctgcccaccttcatcctggagaagaggagcctgctggagatgtatgctgacttcatgagccacccagacctcttcatcgccatcaccaatggagccacagctgaggacaggatgatccgctttgtggagtactacctgaccagcttccacgagggcaggaaaggagccatcgccaagaagccctacaaccccatcattggagagaccttccactgctcctggaagatgcccaagtctgaggtggccagctctgtgttcagcagcagcagcacccagggcgtgaccaaccacgcccccctgagcggggagagcctgacccaggtgggcagtgactgctacacagtgcgctttgtggccgagcaggtgagccaccacccccctgtgtctggcttctatgcagaatgtacagagaggaagatgtgtgtgaatgcccacgtgtggaccaagagcaagttcctgggcatgagcattggagtgaccatggtgggggagggcatcctgagcctgctggagcacggggaggagtacaccttcagcctgccctgtgcctatgcccggagcatcctgactgtgccctgggtggagctgggcggcaaggtgtctgtgaactgtgccaagacaggctacagcgccagcatcaccttccacaccaagcccttctacggcggcaagctgcaccgggtgacagctgaggtgaagcacaacatcaccaacacagtggtgtgccgggtgcagggcgagtggaacagcgtgctggagttcacctacagcaatggagagaccaagtatgtggacctgaccaagctggccgtgaccaagaagagggtgcggcccctggagaagcaggacccctttgagagccggcggctgtggaagaatgtgacagacagcctgcgggagagcgagattgacaaggccacagagcacaagcacaccctggaggagcggcagaggacagaggagcggcacaggacagagaccggcaccccctggaagaccaagtacttcatcaaggagggagatggctgggtgtaccacaagcccctgtggaagatcatccccaccacccagcctgctgagtag

SEQ ID NO: 213142 - DNA, 2244 bp, Artificial Sequence
  derived and/or modified sequence
atgcagggcggcgagcccgtgagcaccatgaaggtgagcgagagcgagggcaaactcgagggacaggccaccgccgtgacaccaaataagaatagtagctgtggcggtggcatctctagctcctcatcctccaggggcgggagtgccaaaggctggcagtattccgaccacatggagaatgtgtatggctatctgatgaagtacacaaacctagtgacgggttggcagtatagattcttcgtgctgaataatgaagcaggcctgctggagtacttcgtcaatgagcagtcacggaatcagaagcctcgaggaaccctccaacttgccggggctgtgataagccccagtgatgaggactcccatacctttacagtgaacgccgcatcaggcgagcagtacaagctgagggccactgacgcgaaagaacggcagcactgggtgagtagactccaaatctgcacacagcaccatacagaagcaatcggtaaaaacaaccccccccttaagtcccggtcctttagcctagcttcgagtagtaactccccaatatctcagagaaggcccagccagaatgctattagttttttcaatgtaggtcattccaagttgcaatcgctcagcaaaagaaccaatttacctcctgaccacctggtggaggtaagagaaatgatgtcacatgccgaaggacagcagagagaccttatcagacgaatcgaatgcctgcctacgtcaggccatcttagctctttggaccaggacttgttgatgcttaaagctacctcaatggccactatgaattgcttgaatgactgcttccatatcttacagctccaacacgcctctcaccaaaaaggctccctgccatccggaaccacaattgagtggctggaaccgaaaatttcactgtccaaccactataagaacggagccgaccagccttttgcgactgatcaaagcaagccagttgctgtgccagaggaacagccagtggcagaatcaggattactcgccagggaaccagaggagataaatgccgacgatgagatcgaggatacctgcgaccacaaggaagacgatctgggcgcggtggaagaacagcggagcgtgattctgcaccttctgtcccagctaaaacttggaatggacctgaccagggtcgtgctgccaacatttatcctggaaaagcgctccctacttgagatgtacgcagacttcatgagccatccggacctcttcattgccattaccaacggcgccacagcagaagatcgaatgataaggtttgtcgagtattatctgacctccttccacgagggccgaaagggggccatcgccaaaaagccttacaaccccatcataggggagacgtttcattgttcttggaagatgcccaaatccgaagtcgccagctccgtcttctcatccagctctactcagggagttacaaaccacgcccccctcagcggtgagtctttgactcaggtaggttctgattgctacaccgtcagattcgtggcagagcaggtgtctcatcaccccccagtcagtggattttatgccgagtgcaccgagcgcaagatgtgcgtaaacgcccatgtctggacaaagtccaagttcttaggtatgagcataggggtcacaatggtaggcgaaggcatcctttcgcttctggagcacggtgaagaatacacattttcactgccttgcgcatacgctagatccattttgacagtaccttgggtcgagttggggggtaaagtatccgtgaactgcgccaagacgggatatagcgctagtattactttccataccaagcccttttacggcggcaagttgcatcgggtgactgcggaggtgaagcacaatattacaaataccgtggtgtgccgtgttcagggagagtggaattccgttttggagtttacctatagtaatggcgagacaaagtacgtggacttgaccaagctggccgtaactaagaaacgagtccgccccttggagaaacaggatcccttcgaaagcaggcggctgtggaagaacgtgaccgacagccttcgtgagtcagaaattgataaggccacagaacacaagcataccctggaggagcggcagaggacagaagaaaggcaccggaccgaaacagggacgccgtggaagaccaaatacttcattaaagagggcgacgggtgggtttaccataagccactgtggaagattattcctacgacccagcctgccgaatag

SEQ ID NO: 213143 - DNA, 4191 bp, Artificial Sequence
  derived and/or modified sequence
cacttaagtcttctcgccggatgctttttcctccttgcttttgccggaaaggagagagatacatgtgaaggatatctgtcctcgttgcttcccctgccctctcaaaagtttaacttctgtgggaatgtgtatcttccttttctggaccatttgacagtcccgccccagccgccgtgtgatttagcaaccggtatcatattcagatcaaatcttaaaaaaaaaaagtcacctacagaactacagaattgttctctcccgctcaagaagggcaagtggactttggcgttaagatgcaggggggtgaaccagtgtccacaatgaaagtctcggagagcgaaggaaagctggagggccaggccacagcggtgaccccgaacaagaacagcagctgtggaggtggaatcagtagcagcagcagcagccgcggtggcagtgcaaaaggctggcagtacagtgatcacatggaaaatgtgtatggctatttaatgaagtataccaaccttgtcactgggtggcagtacaggttttttgttttaaacaatgaagctgggctgttggagtactttgtgaatgaacagtctagaaatcagaaacctagaggaactttgcagcttgcaggagctgtaatatcacccagtgatgaggattctcacaccttcactgtaaacgctgccagtggggaacaatataaactcagagctacagatgcaaaagagcgacagcactgggttagcagacttcagatatgtacacagcatcatactgaagctattggaaagaataatcctcctctgaagtcacggagcttctcacttgcatctagtagtaattctcctatatcgcagaggagaccaagtcaaaatgccatttctttttttaatgttggacattccaaactgcaatcactgagcaaaagaactaatttacctccagaccatcttgtggaagtcagagaaatgatgtctcatgctgaaggacaacaaagagacttaattagacgaattgaatgccttcctacttctggccatcttagttccttggaccaggatctcttaatgctcaaagctacttccatggcaactatgaactgcttaaatgactgctttcatattctccagttacagcatgcatcacatcagaagggctcattgccttcaggaacgacaatcgagtggttagaaccaaagatatctttatcaaaccactataaaaatggagctgaccagccctttgcaactgatcagagtaagccggtggcagtcccagaagagcagcctgttgcagaatctggactattagcgagggagcctgaagaaataaatgcagatgatgagatagaggatacatgtgaccacaaagaggatgacctgggagctgtagaagaacaacgtagtgtcatcctacatctcttgtcacagcttaagctgggcatggatttaacaagagtggtgcttcctacatttatcctagagaagcgttccttgctggaaatgtatgcagactttatgtctcatccagacctatttatagccatcactaatggagccacagctgaggacagaatgattcgctttgttgagtactaccttacctcatttcatgaaggccgtaagggagccattgctaaaaaaccatacaatcctatcattggagaaacatttcactgttcctggaagatgccaaaaagcgaggtagcatccagtgtttttagcagttcttccacccagggagtcacaaatcatgctcctttatcgggggagtctttgacccaggtgggatcagactgttacacagtcagatttgttgctgagcaggtttctcatcatcctccagtctcaggattttatgcagaatgtacagagaggaagatgtgtgtaaatgcgcatgtctggactaagagcaagttcttaggcatgtcaataggcgtgacaatggttggagaaggtatccttagtctgttggagcatggagaagagtacacattttctctaccctgtgcatatgctcggtcaattttgactgttccttgggtagaactgggtggcaaagtcagtgtcaactgtgcaaaaactggatattcagccagcatcacttttcataccaagccattttatggtggcaaactgcatcgggttacagctgaagtaaagcacaacatcaccaacactgtggtatgcagagtgcaaggggaatggaatagtgttcttgagttcacatatagcaatggagagacaaagtatgtggacttgactaaattggcagtgacgaagaaaagagtgagacctctggagaagcaggatccatttgaatccaggcgattgtggaaaaatgtgacagactcgctgagagaatctgaaattgataaggccacagagcataagcataccctggaagaacgtcagaggactgaagaaaggcatcgtactgaaacaggcacaccttggaaaaccaaatattttattaaagagggagatggctgggtttatcataaaccactttggaaaataattccaacaacacaaccagcagagtgacacatactatctaaaactcgaccaaatgaggttcttctctgtttaccctaaatcctcccagaatggagtcattgcactgagtgacctgcttcctgattgcgcagactgaaactagctaaacctgaatgtacctactagggcaccataatactgcagcaagaccaaagtggtaaagaaacacagtggaccttttaccaacctgttcatgtgatgtgagcaataccatcttaaaacttgttacctgaatcagtagatgaatcttttatccagttcttgctcctaaagttaagtttgaatcccctatttttgcacaggggcagcagatacacacaacaatgagaactcagtgactttgatttctttgtagtgaaaagtgaagtctccgtttcagagtttgtgtctttctttctgtccataactgaagtattcactactcttgtaaaccaaccaagaggaggagaaagatgacccagaagtggattcagccattgtgcctgaaatcagtgtttaaaaaaaaaaatcaaccaggttgtggtaacaaggcattctatttcttcaaaaagactgtatgcctgtgtctgaggaacttacctattatccacctctgttggaactctcttttaaaaagtacatttatagattgatcagaattataaccatggagaattttttcttctgagcattttaatatacttgaaaacaacattgacttgaaaaatttcagaacatttttcagtacctagttttattaaatattacacttgagagacactttttaaaaatgtgttaatgtcaatatgatgagattttagcctttctccagaactaaggcattaaagaaaatagcaaatattaaaaaataaaactgttacttttttccttctttcttttcacctttaggttaatatccagtattatgtgttatccctttggataagtatgctttattttacctctgttaaaaattaaaataaatgattctattcatatttgtcagtaattcaaaacttatatgtgtaactgaacgcgcatgtaaggtatggttttatttattttttttttttttgaggaaatttaaatgctaaagaaacaacgaaatgaaaaggtatcaggaaaaaaagatcaggaagttgtattcaggtacaaatctttttttaaataagtattttgttgaggttgaagaattgctggcaattaaaagaatagagctaattatggctttcatcattcattcatgtatttattgagcacctacttattatggtgctcaacacttgttactgcaagctaccttaatttcccaagagtggtgccttactctgttttttctgatatggtcttccaatcagtgtgtgtaacatacctgttgtttatcagccattgtaggtggctgtgtctgttgcatcatcataagaagtttaagctttgtgctctgataaattgtgttctgttaaagaggttagtaggatgaaaacagcaaaacaataattttttcaacaaattgtaaattataagaaaaagagttggtttgtgtacaacaattttaatgattcccttgttcatttttgctgtgaaatgcactgaaaaaaatcctcaaaatgagttatagttcctgtgttgggaaaattgacaaataataaaactagagaacaaacaa

SEQ ID NO: 213144 - DNA, 2244 bp, Artificial Sequence
  derived and/or modified sequence
atgcagggaggggaaccagtgtccaccatgaaggtcagcgagtcagaggggaagctggagggccaagccaccgcggttacccctaataagaacagctcatgcggcggaggcataagctcatctagctcatctcgtgggggaagcgccaagggatggcaatactctgatcatatggagaatgtgtatggctacctgatgaagtatactaatctggttacaggttggcagtaccgcttttttgtccttaacaatgaagctggcctactcgagtatttcgttaacgagcagtcaagaaaccagaagcctcgcggtaccctacaattggccggagccgtcatatcacccagtgatgaggattctcatacgtttacggtcaacgccgcatcaggggagcagtataagctcagagctaccgacgcaaaggaacgacagcattgggtgagcagactgcagatctgtacacagcaccatactgaagctattgggaaaaataacccacccttaaagtcgaggtcattctcacttgcctctagcagcaactctcctatctcccagagaaggcctagccagaatgctattagcttcttcaacgtcgggcatagtaagctccagtcgcttagcaaaagaaccaatttgcctccagaccatctggtcgaagttcgagagatgatgtcgcatgcagaaggacagcagagggatctgattcgaagaatcgagtgcttaccaacatccggacacctttccagccttgaccaagacctgctgatgctgaaagccacatcgatggctacaatgaattgcttgaacgactgtttccacatcctgcagcttcagcacgctagtcaccagaaaggctctctcccttcaggaaccaccatcgaatggctcgagccaaagatctcgctctcaaaccattacaagaacggtgccgaccagcccttcgccactgatcagagcaaacctgttgcagtgcccgaggagcagcctgttgccgaaagcggtttattagccagggaaccagaggagatcaacgccgacgacgaaatcgaggacacctgtgaccacaaggaggatgacctgggcgctgtggaagagcagcgctccgtgatccttcacctgctgtcccagctgaagcttggaatggatcttaccagagtggtgttgcccacctttatcctcgagaaacgaagcctgctcgaaatgtatgctgactttatgagccacccagacctgtttatcgccatcaccaacggcgctactgccgaggatcgaatgattcgttttgtagagtattatctgacatctttccacgaaggtagaaagggggcaatcgccaagaaaccttataatccgatcatcggcgagaccttccattgttcctggaagatgccaaaatccgaagtggcttcttcagtgttctcttcctctagcacccagggggtgactaaccacgctccactgtcgggcgagtccctcacgcaggtgggttctgactgttacacagtgaggtttgttgccgaacaagtcagtcatcatccacccgtaagtgggttctatgctgaatgtacagagcgcaagatgtgcgtgaacgcccacgtctggaccaaatccaaattcttgggaatgtctattggagtgaccatggtaggcgaaggcatcttgagtcttcttgagcatggcgaagaatataccttctctctcccttgtgcctacgcacggtccatcctcacagtgccctgggtagaattgggcggtaaagtcagcgtgaactgcgccaagacaggatattccgctagcatcactttccacaccaagccgttttatggtggcaaactgcaccgagttacagcagaggtcaaacacaacattaccaacaccgtcgtgtgcagagtacagggtgagtggaatagtgtcctggaatttacatatagtaacggtgaaacaaagtacgtcgacctgaccaagctggccgttactaagaagagggtgagacctttagagaaacaagatcctttcgagtctcggcgactgtggaagaatgtaacagactctttgcgcgagagtgaaatcgacaaggccacagaacacaagcatactctagaggagagacagcgcacagaggagaggcacagaaccgagaccggaacaccctggaagaccaaatacttcatcaaagaaggggatggctgggtgtaccataagcctctttggaaaattattcccacaactcagccagcagagtag

SEQ ID NO: 213145 - DNA, 2244 bp, Artificial Sequence
  derived and/or modified sequence
atgcagggcggcgagcccgtgagcaccatgaaggtgagcgagagcgagggcaagctggagggccaggccaccgccgtgacccccaacaagaacagcagctgcggcggcggcatcagcagcagcagcagcagcagaggcggcagcgccaagggctggcagtacagcgaccacatggagaacgtgtacggctacctgatgaagtacaccaacctggtgaccggctggcagtacagattcttcgtgctgaacaacgaggccggcctgctggagtacttcgtgaacgagcagagcagaaaccagaagcccagaggcaccctgcagctggccggcgccgtgatcagccccagcgacgaggacagccacaccttcaccgtgaacgccgccagcggcgagcagtacaagctgagagccaccgacgccaaggagagacagcactgggtgagcagactgcagatctgcacccagcaccacaccgaggccatcggcaagaacaacccccccctgaagagcagaagcttcagcctggccagcagcagcaacagccccatcagccagagaagacccagccagaacgccatcagcttcttcaacgtgggccacagcaagctgcagagcctgagcaagagaaccaacctgccccccgaccacctggtggaggtgagagagatgatgagccacgccgagggccagcagagagacctgatcagaagaatcgagtgcctgcccaccagcggccacctgagcagcctggaccaggacctgctgatgctgaaggccaccagcatggccaccatgaactgcctgaacgactgcttccacatcctgcagctgcagcacgccagccaccagaagggcagcctgcccagcggcaccaccatcgagtggctggagcccaagatcagcctgagcaaccactacaagaacggcgccgaccagcccttcgccaccgaccagagcaagcccgtggccgtgcccgaggagcagcccgtggccgagagcggcctgctggccagagagcccgaggagatcaacgccgacgacgagatcgaggacacctgcgaccacaaggaggacgacctgggcgccgtggaggagcagagaagcgtgatcctgcacctgctgagccagctgaagctgggcatggacctgaccagagtggtgctgcccaccttcatcctggagaagagaagcctgctggagatgtacgccgacttcatgagccaccccgacctgttcatcgccatcaccaacggcgccaccgccgaggacagaatgatcagattcgtggagtactacctgaccagcttccacgagggcagaaagggcgccatcgccaagaagccctacaaccccatcatcggcgagaccttccactgcagctggaagatgcccaagagcgaggtggccagcagcgtgttcagcagcagcagcacccagggcgtgaccaaccacgcccccctgagcggcgagagcctgacccaggtgggcagcgactgctacaccgtgagattcgtggccgagcaggtgagccaccacccccccgtgagcggcttctacgccgagtgcaccgagagaaagatgtgcgtgaacgcccacgtgtggaccaagagcaagttcctgggcatgagcatcggcgtgaccatggtgggcgagggcatcctgagcctgctggagcacggcgaggagtacaccttcagcctgccctgcgcctacgccagaagcatcctgaccgtgccctgggtggagctgggcggcaaggtgagcgtgaactgcgccaagaccggctacagcgccagcatcaccttccacaccaagcccttctacggcggcaagctgcacagagtgaccgccgaggtgaagcacaacatcaccaacaccgtggtgtgcagagtgcagggcgagtggaacagcgtgctggagttcacctacagcaacggcgagaccaagtacgtggacctgaccaagctggccgtgaccaagaagagagtgagacccctggagaagcaggaccccttcgagagcagaagactgtggaagaacgtgaccgacagcctgagagagagcgagatcgacaaggccaccgagcacaagcacaccctggaggagagacagagaaccgaggagagacacagaaccgagaccggcaccccctggaagaccaagtacttcatcaaggagggcgacggctgggtgtaccacaagcccctgtggaagatcatccccaccacccagcccgccgagtag

SEQ ID NO: 213146 - protein, 775 aa, Artificial Sequence
  derived and/or modified sequence
MAPDLASQRHSESFPSVNSRPNVILPGREGRREGLPPGGGTRGSLVPTRPVPPSPAPLGTSPYSWSRSGPGRGGGAGSSRVPRGVPGPAVCAPGSLLHHASPTQTMAAADGSLFDNPRTFSRRPPAQASRQAKATKRKYQASSEAPPAKRRNETSFLPAKKTSVKETQRTFKGNAQKMFSPKKHSVSTSDRNQEERQCIKTSSLFKNNPDIPELHRPVVKQVQEKVFTSAAFHELGLHPHLISTINTVLKMSSMTSVQKQSIPVLLEGRDALVRSQTGSGKTLAYCIPVVQSLQAMESKIQRSDGPYALVLVPTRELALQSFDTVQKLLKPFTWIVPGVLMGGEKRKSEKARLRKGINILISTPGRLVDHIKSTKNIHFSRLRWLVFDEADRILDLGFEKDITVILNAVNAECQKRQNVLLSATLTEGVTRLADISLHDPVSISVLDKSHDQLNPKDKAVQEVCPPPAGDKLDSFAIPESLKQHVTVVPSKLRLVCLAAFILQKCKFEEDQKMVVFFSSCELVEFHYSLFLQTLLSSSGAPASGQLPSASMRLKFLRLHGGMEQEERTAVFQEFSHSRRGVLLCTDVAARGLDLPQVTWIVQYNAPSSPAEYIHRIGRTARIGCHGSSLLILAPSEAEYVNSLASHKINVSEIKMEDILCVLTRDDCFKGKRWGAQKSHAVGPQEIRERATVLQTVFEDYVHSSERRVSWAKKVWSLETPVLTASLPALFSFSSAVLHPSLRHLPQGAEAHLPRPIPPPWACGEELRTKRCPQES

SEQ ID NO: 213147 - protein, 851 aa, Artificial Sequence
  derived and/or modified sequence
MAPDLASQRHSESFPSVNSRPNVILPGREGRREGLPPGGGTRGSLVPTRPVPPSPAPLGTSPYSWSRSGPGRGGGAGSSRVPRGVPGPAVCAPGSLLHHASPTQTMAAADGSLFDNPRTFSRRPPAQASRQAKATKRKYQASSEAPPAKRRNETSFLPAKKTSVKETQRTFKGNAQKMFSPKKHSVSTSDRNQEERQCIKTSSLFKNNPDIPELHRPVVKQVQEKVFTSAAFHELGLHPHLISTINTVLKMSSMTSVQKQSIPVLLEGRDALVRSQTGSGKTLAYCIPVVQSLQAMESKIQRSDGPYALVLVPTRELALQSFDTVQKLLKPFTWIVPGVLMGGEKRKSEKARLRKGINILISTPGRLVDHIKSTKNIHFSRLRWLVFDEADRILDLGFEKDITVILNAVNAECQKRQNVLLSATLTEGVTRLADISLHDPVSISVLDKSHDQLNPKDKAVQEVCPPPAGDKLDSFAIPESLKQHVTVVPSKLRLVCLAAFILQKCKFEEDQKMVVFFSSCELVEFHYSLFLQTLLSSSGAPASGQLPSASMRLKFLRLHGGMEQEERTAVFQEFSHSRRGVLLCTDVAARGLDLPQVTWIVQYNAPSSPAEYIHRIGRTARIGCHGSSLLILAPSEAEYVNSLASHKINVSEIKMEDILCVLTRDDCFKGKRWGAQKSHAVGPQEIRERATVLQTVFEDYVHSSERRVSWAKKALQSFIQAYATYPRELKHIFHVRSLHLGHVAKSFGLRDAPRNLSALTRKKRKAHVKRPDLHKKTQSKHSLAEILRSEYSSGMEADIAKVKKQNAPGEPGGRPLQHSLQPTPCFGRGKTLKWRKTQKGVQRDSKTSQKV

SEQ ID NO: 213148 - DNA, 2328 bp, Artificial Sequence
  derived and/or modified sequence
atggcccctgacttagcctcacagcgccattccgagagtttcccatctgtgaatagccgcccaaacgtgatccttcctggccgggaaggacgcagggagggtctgcccccgggaggcggcactagaggctcactcgtgcccacccgccctgtgccgccgagccccgcccctctcggcacgtccccttattcatggagccgcagcggcccagggcgagggggcggcgcagggtcttctcgagtaccccgtggggtgcctggaccagctgtgtgcgcacccggaagcttgctccatcatgcctcccctactcagacaatggccgccgccgacgggtccctctttgacaaccctcgtacattttcccgacgcccacctgcacaggcttccaggcaggccaaggcgacaaaacgcaaataccaggcttcctcagaggcccctcccgccaagcgcagaaacgagactagtttcctcccggccaagaagacatctgtgaaagagactcaacggacgttcaaaggaaacgctcagaaaatgttcagtcctaagaaacacagcgtgtccactagcgaccggaatcaggaggagcgccaatgtatcaagacaagcagcctgtttaaaaacaatcccgacatccctgagctgcaccgtccagtcgtaaaacaggtccaggagaaggtgttcacttctgctgccttccacgaattgggcctccatccacacctgatttccactattaacaccgtcctaaagatgagtagcatgacaagcgttcagaagcagagcattccagtgctcttggaaggaagagacgcactcgttcgctcccagacagggtcgggcaagacactggcctactgtatccccgtggtgcagagtctccaagccatggaatcaaaaatccaaaggtcggatgggccttacgcactggtccttgttccaacccgggaactagcccttcagtcattcgatactgtacagaaattgctgaagccattcacttggattgtgcctggtgtcctgatgggtggggagaagcgcaaaagcgaaaaagccaggttgaggaaagggattaacatccttatcagcacaccaggacggctcgttgaccatatcaagtcaaccaaaaatatccattttagtagactacgttggctagtttttgatgaggccgacagaattcttgacctgggttttgagaaggacattacagtgatcctaaacgcagtgaacgccgagtgtcagaagagacagaacgtgctgctgagcgccaccttgacagaaggggtgacacgcttggccgacattagtctgcatgatcccgtgtccataagtgtgctggataagagccatgaccaactgaaccccaaggacaaggctgtccaggaagtttgccctccacccgctggggataaacttgactctttcgccattccggagagcctcaagcaacacgttaccgtggtaccttctaaactgaggctggtgtgcctggccgcgttcattctgcaaaaatgcaagtttgaggaggatcaaaaaatggtggtgtttttttcaagctgcgagctcgtggagtttcattacagcctgtttctacaaactctgcttagcagtagtggcgctcctgcgtctggccaactcccgagcgcgtccatgcggctcaagttcctcagactccacggcggcatggaacaggaggaacggaccgccgtgttccaagagtttagccatagccggcgcggggttctgttgtgcacggacgtggccgctagggggcttgatctgccccaggtcacctggatcgtacaatacaacgctccctcctcgcccgcagagtatatccatcggattgggcgcactgcccgaatcggttgtcacggctcatctttgcttatcctggctccatccgaagccgagtacgtcaacagcctcgcctcacacaaaatcaacgtatcagagattaagatggaagatatcctatgtgtgctcactagggatgattgctttaaagggaaacgctggggcgcccaaaagtcccacgctgttgggccccaggaaataagggaaagagccaccgtcctgcagacagtatttgaggactacgtgcatagctcagagcgccgagtgtcctgggctaagaaagtgtggtcgctggagactcccgtacttaccgcgagcctgccagctcttttctccttttcatccgcggtactgcatccctctcttcggcacctgccccagggggctgaggctcacttgccaaggcccataccaccaccttgggcttgtggcgaagagctgcggactaaacgctgtccacaggaatcctag

SEQ ID NO: 213149 - DNA, 2556 bp, Artificial Sequence
  derived and/or modified sequence
atggcacctgacctggccagtcagaggcattccgagtccttcccatctgtgaatagcagacccaacgtcattctcccaggcagggaaggtcggcgtgaggggcttcctcctggggggggaacacgcgggtcactcgtccctacccgtccagtgcccccaagccctgcacctctgggtacaagcccttacagctggtcacgatctggtccagggagaggcgggggagcaggaagttcccgtgtcccacgtggggtgcccggaccagcagtgtgcgcacccggttctctcctgcaccacgctagtcctacacaaacaatggcagcagccgacggatcgctcttcgataatcccaggaccttctctaggcggcctccagctcaggccagtcgccaggcgaaggcgacgaaacggaagtaccaagcatcttcggaagccccaccggccaaaaggcgcaacgagacatccttcctgcctgctaagaagaccagcgtaaaagaaacccagcgtacctttaaaggcaatgcacagaagatgtttagccctaagaaacatagcgtgagcaccagcgatagaaatcaggaagagagacagtgtataaaaaccagcagtctctttaagaacaatccagacatccccgagctgcacagacccgtggtgaaacaggtgcaggagaaagtgtttacaagcgccgcattccacgaacttggtctccacccccacctgatctcaacaattaatacagtgctaaaaatgtcaagtatgacttcagtgcagaaacagtcgatccccgtgctgcttgaaggcagggatgctctagtgcgttcccagacaggatccggaaagactctggcttattgtattccggttgtccaatctttgcaagctatggagagtaagattcagaggtcagatggcccctacgcacttgtcctggtaccaacgcgcgagttggccctgcagtctttcgatactgtccaaaagctgctaaagcctttcacctggatagtcccgggagtactcatgggaggcgagaagcggaagtccgagaaggcacgtcttaggaaggggataaacatcctgatctctacgccagggcgactagtagaccatataaagagcaccaaaaacattcatttttcacgattaaggtggttggtttttgatgaagcagatcggattttagacctggggtttgagaaagatataactgtcatcctcaacgctgttaatgctgaatgccagaaaagacagaacgtcctgctgtcagccactctgactgaaggcgtgactaggttggccgacatttctctgcatgacccagtgtccatcagcgtgctcgataagtcccatgaccagctgaacccaaaggataaagcagtacaggaggtgtgtccaccacctgccggggacaaactcgacagctttgcaatccctgagtccctcaaacaacacgtcacagtggtgccatccaaactgaggctggtttgcctggcagcgttcatcctccagaaatgcaaatttgaggaggaccagaaaatggtggtgttcttctctagctgcgagcttgtcgagttccactacagcctgtttctccagaccctgctgtcgtcttcaggagccccagcgtccggccagctcccaagtgcgtcgatgcgtctaaagtttctcaggctgcacggaggtatggagcaggaagagcgcaccgctgtgttccaggagttctcccactcccgaagaggcgtgctgctgtgtacggatgtggctgccagaggtttagacctcccccaagtgacctggattgtgcagtacaatgcccccagctccccagctgagtacatccaccggattggtaggaccgctagaatagggtgtcacggctccagccttctcatactcgccccctcagaagcggagtatgtcaacagcctcgcgtcccacaaaatcaacgtctctgaaatcaagatggaggacattctttgtgtactgacgcgagacgactgtttcaagggaaaaaggtggggcgcccagaagtcacacgctgtggggcctcaagagattagggagcgcgctacagtgttacaaactgtttttgaagattacgtccactccagcgaaagacgcgtttcatgggctaaaaaggccctgcagagttttatacaagcctatgccacctatccacgggagttgaagcatatcttccatgtacggtccttacatctcggacatgtggctaaatccttcgggcttcgcgacgccccaaggaacctgagtgccctcaccaggaagaaaaggaaggcccacgtaaagaggccggacttacataagaagacacagtccaaacacagcctggcagagatcctgaggtcagaatactccagtgggatggaggcggatatcgccaaagtgaagaaacagaacgcgccaggtgagccgggcggcagacccctccagcactctctgcagcccacaccctgctttgggagaggcaaaaccctgaagtggagaaaaacacaaaagggcgtgcaaagggatagcaagacctcccagaaggtgtag

SEQ ID NO: 213150 - DNA, 2169 bp, Artificial Sequence
  derived and/or modified sequence
atgcaggcaaaggcgacaaagcggaaatatcaggcctcgagcgaggcaccccccgccaagcgccgaaatgaaacctcctttctgcctgccaaaaagaccagtgtgaaagagactcagaggactttcaaaggcaacgcccagaaaatgtttagccctaaaaaacatagtgttagtactagcgacaggaatcaagaggaacgacagtgcatcaagacctcaagcttgtttaagaataatccggacatcccagagcttcaccgcccagtcgtgaaacaggttcaggagaaggtttttacttcggccgcctttcacgagctaggtctccatccgcacttgatcagcacaatcaacactgtgctgaaaatgtctagtatgactagtgtgcagaagcagtccattcctgtactactcgagggtcgcgatgcattggttcgatcccagacgggctccggaaagaccctggcctattgtatcccagtggtgcaaagtttgcaggcgatggaaagcaagatccagagaagcgatggcccctacgcgctggtccttgtgcccactagggaacttgccctacagagttttgacactgttcagaagctgctcaaaccatttacctggattgttcctggcgtcctcatggggggggaaaagcggaagtccgaaaaagcgagactccgtaagggtatcaatatactaatctcgaccccagggcgactggtggaccacataaagagtacaaagaacatccacttttcgcgcctgcgctggcttgtcttcgacgaggcggatcgaatactggacctgggctttgaaaaggatatcactgtaattttgaacgctgttaacgccgagtgtcagaagaggcagaatgttctgctgagtgcaacactaacggaaggagtgacccgactggctgatataagcctccatgatccagtaagcatttccgtcctggataagagccacgatcagctgaatcctaaagacaaagccgtgcaggaggtgtgtccacctccagcgggtgacaaactggattccttcgccattcccgaaagtctcaagcaacacgtgacggtggtgccaagcaagctgaggcttgtgtgtctcgccgcattcatcctacagaaatgtaaattcgaagaggatcagaagatggttgtgtttttctcttcttgtgaactggtcgaatttcactactctctgtttttacaaacactgttatccagctccggggccccagcatctgggcagctgccgtccgcatctatgcgccttaagtttctgagactgcatggcgggatggagcaggaggaacggacagcagtgttccaggaattctcccactcccgccggggagtgctactgtgtacagacgtggccgcccgaggtctggatctcccgcaggtgacctggattgtgcagtacaatgccccctctagccccgctgagtacatccaccgaatcgggcgaacggcacgcatcgggtgccatggatcatctctactgattcttgccccaagcgaagctgaatatgtgaactcgctggcctctcacaagattaacgtgtctgaaattaagatggaggatatcctctgcgtgctgaccagggacgactgtttcaaaggaaaaagatggggcgcacagaaatcgcacgctgtcggcccccaggagattagggagcgcgccactgttctgcaaaccgtcttcgaggactatgtgcacagttctgagcgccgtgtgtcatgggcgaagaaggcgctgcagagtttcattcaagcctacgctacttaccccagagaactgaagcatatctttcacgtgaggtccctgcatcttggccatgtggctaagtcattcggactgagagatgccccacgcaacctaagtgccctcacgcgaaagaagagaaaggcccacgtgaagaggcccgatttgcataagaaaactcagagcaagcatagtctggcagagattctgcggtccgaatatagcagcggcatggaagcggatatcgctaaagttaaaaagcagaacgcgccaggtgagccagggggaagacccctgcagcatagtctgcaacctactccctgcttcgggcgtggtaagacccttaaatggcgaaagacgcagaagggagtacagagagatagcaaaacttcccagaaagtatag

SEQ ID NO: 213151 - DNA, 2328 bp, Artificial Sequence
  derived and/or modified sequence
atggccccagacctggccagccagaggcacagcgagagcttccccagcgtgaacagccggcccaacgtcatcctgcccggccgggagggcagaagagagggcctgcccccaggcggcggcacccggggcagcctggtgcccaccaggcctgtgccccccagccctgcccccctgggcaccagcccctacagctggagccgcagcggccctggccggggcggcggggccggcagcagccgggtgccccggggcgtgcccggccctgctgtgtgtgcccctggcagcctgctgcaccacgccagccccacccagaccatggctgctgctgatggcagcctgtttgacaaccccaggaccttcagccggcggcccccagcccaggccagccggcaggccaaggccaccaagaggaagtaccaggccagcagcgaggcccccccagccaagagaagaaatgagaccagcttcctgcctgccaagaagacctctgtgaaggagacccagaggaccttcaagggaaatgcccagaagatgttcagccccaagaagcacagcgtgtccaccagtgacaggaaccaggaggagcggcagtgcatcaagaccagcagcctcttcaagaacaacccagacatccctgagctgcacaggcctgtggtgaagcaggtgcaggagaaggtgttcaccagcgctgccttccacgagctgggcctgcacccccacctgatcagcaccatcaacacagtgctgaagatgagctccatgacctctgtgcagaagcagagcatccctgtgctgctggagggcagagatgccctggtgcgcagccagacaggcagcggcaagaccctggcctactgcatccctgtggtgcagagcctgcaggccatggagagcaagatccagaggagtgatggcccctatgccctggtgctggtgcccacccgggagctggccctgcagagctttgacacagtgcagaagctgctgaagcccttcacctggatcgtgcctggggtgctgatgggcggggagaagaggaagtctgagaaggcccggctgaggaagggcatcaacatcctgatcagcaccccaggccgcctggtggaccacatcaagagcaccaagaacatccacttcagccggctgcgctggctggtgtttgatgaggccgaccgcatcctggacctgggctttgagaaggacatcaccgtcatcctgaatgctgtgaatgctgagtgccagaagaggcagaatgtgctgctgagcgccaccctgacagagggcgtgacccggctggccgacatcagcctgcatgaccctgtgtccatctctgtgctggacaagagccatgaccagctgaaccccaaggacaaggctgtgcaggaggtgtgccccccacctgctggggacaagctggacagctttgccatccctgagagcctgaagcagcacgtgacagtggtgcccagcaagctgcggctggtgtgcctggccgccttcatcctgcagaagtgcaagtttgaggaggaccagaagatggtggtgttcttcagcagctgtgagctggtggagttccactacagcctcttcctgcagaccctgctgagcagcagcggggccccagccagcggccagctgcccagcgcctccatgaggctgaagttcctgcggctgcatggaggcatggagcaggaggagaggacagctgtgttccaggagttcagccacagccggcggggcgtgctgctgtgcacagatgtggccgcccggggcctggacctgccccaggtgacctggatcgtgcagtacaatgcccccagcagccctgctgagtacatccaccgcatcggccgcacagcccgcatcggctgccacggcagcagcctgctgatcctggcccccagcgaggccgagtatgtgaacagcctggccagccacaagatcaacgtgtctgagatcaagatggaggacatcctgtgtgtgctgaccagagatgactgcttcaagggcaagcgctggggcgcccagaagagccatgctgtgggcccccaggagatccgggagcgggccaccgtgctgcagacagtgtttgaggactatgtgcacagcagcgagcggcgggtgtcctgggccaagaaggtgtggagcctggagacccctgtgctgacagccagcctgcctgccctcttctccttcagcagcgctgtgctgcaccccagcctgcggcacctgccccagggcgctgaggcccacctgccccggcccatccccccaccctgggcctgtggggaggagctgcggaccaagcgctgcccccaggagagctag

SEQ ID NO: 213152 - DNA, 2556 bp, Artificial Sequence
  derived and/or modified sequence
atggccccagacctggccagccagaggcacagcgagagcttccccagcgtgaacagccggcccaacgtcatcctgcccggccgggagggcagaagagagggcctgcccccaggcggcggcacccggggcagcctggtgcccaccaggcctgtgccccccagccctgcccccctgggcaccagcccctacagctggagccgcagcggccctggccggggcggcggggccggcagcagccgggtgccccggggcgtgcccggccctgctgtgtgtgcccctggcagcctgctgcaccacgccagccccacccagaccatggctgctgctgatggcagcctgtttgacaaccccaggaccttcagccggcggcccccagcccaggccagccggcaggccaaggccaccaagaggaagtaccaggccagcagcgaggcccccccagccaagagaagaaatgagaccagcttcctgcctgccaagaagacctctgtgaaggagacccagaggaccttcaagggaaatgcccagaagatgttcagccccaagaagcacagcgtgtccaccagtgacaggaaccaggaggagcggcagtgcatcaagaccagcagcctcttcaagaacaacccagacatccctgagctgcacaggcctgtggtgaagcaggtgcaggagaaggtgttcaccagcgctgccttccacgagctgggcctgcacccccacctgatcagcaccatcaacacagtgctgaagatgagctccatgacctctgtgcagaagcagagcatccctgtgctgctggagggcagagatgccctggtgcgcagccagacaggcagcggcaagaccctggcctactgcatccctgtggtgcagagcctgcaggccatggagagcaagatccagaggagtgatggcccctatgccctggtgctggtgcccacccgggagctggccctgcagagctttgacacagtgcagaagctgctgaagcccttcacctggatcgtgcctggggtgctgatgggcggggagaagaggaagtctgagaaggcccggctgaggaagggcatcaacatcctgatcagcaccccaggccgcctggtggaccacatcaagagcaccaagaacatccacttcagccggctgcgctggctggtgtttgatgaggccgaccgcatcctggacctgggctttgagaaggacatcaccgtcatcctgaatgctgtgaatgctgagtgccagaagaggcagaatgtgctgctgagcgccaccctgacagagggcgtgacccggctggccgacatcagcctgcatgaccctgtgtccatctctgtgctggacaagagccatgaccagctgaaccccaaggacaaggctgtgcaggaggtgtgccccccacctgctggggacaagctggacagctttgccatccctgagagcctgaagcagcacgtgacagtggtgcccagcaagctgcggctggtgtgcctggccgccttcatcctgcagaagtgcaagtttgaggaggaccagaagatggtggtgttcttcagcagctgtgagctggtggagttccactacagcctcttcctgcagaccctgctgagcagcagcggggccccagccagcggccagctgcccagcgcctccatgaggctgaagttcctgcggctgcatggaggcatggagcaggaggagaggacagctgtgttccaggagttcagccacagccggcggggcgtgctgctgtgcacagatgtggccgcccggggcctggacctgccccaggtgacctggatcgtgcagtacaatgcccccagcagccctgctgagtacatccaccgcatcggccgcacagcccgcatcggctgccacggcagcagcctgctgatcctggcccccagcgaggccgagtatgtgaacagcctggccagccacaagatcaacgtgtctgagatcaagatggaggacatcctgtgtgtgctgaccagagatgactgcttcaagggcaagcgctggggcgcccagaagagccatgctgtgggcccccaggagatccgggagcgggccaccgtgctgcagacagtgtttgaggactatgtgcacagcagcgagcggcgggtgtcctgggccaagaaggccctgcagagcttcatccaggcctatgccacctacccccgggagctgaagcacatcttccacgtgcgcagcctgcacctgggccacgtggccaagagctttggcctgagagatgcccccaggaacctgagcgccctgaccaggaagaagaggaaggcccacgtgaagaggccagacctgcacaagaagacccagagcaagcacagcctggccgagatcctgcggtctgagtacagcagcggcatggaggccgacatcgccaaggtgaagaagcagaatgcccctggagagcccggcggccggcccctgcagcacagcctgcagcccaccccctgcttcggccggggcaagaccctgaagtggaggaagacccagaagggcgtgcagagggacagcaagaccagccagaaggtgtag

SEQ ID NO: 213153 - DNA, 2169 bp, Artificial Sequence
  derived and/or modified sequence
atgcaggccaaggccaccaagaggaagtaccaggccagcagcgaggcccccccagccaagagaagaaatgagaccagcttcctgcctgccaagaagacctctgtgaaggagacccagaggaccttcaagggaaatgcccagaagatgttcagccccaagaagcacagcgtgtccaccagtgacaggaaccaggaggagcggcagtgcatcaagaccagcagcctcttcaagaacaacccagacatccctgagctgcacaggcctgtggtgaagcaggtgcaggagaaggtgttcaccagcgctgccttccacgagctgggcctgcacccccacctgatcagcaccatcaacacagtgctgaagatgagctccatgacctctgtgcagaagcagagcatccctgtgctgctggagggcagagatgccctggtgcgcagccagacaggcagcggcaagaccctggcctactgcatccctgtggtgcagagcctgcaggccatggagagcaagatccagaggagtgatggcccctatgccctggtgctggtgcccacccgggagctggccctgcagagctttgacacagtgcagaagctgctgaagcccttcacctggatcgtgcctggggtgctgatgggcggggagaagaggaagtctgagaaggcccggctgaggaagggcatcaacatcctgatcagcaccccaggccgcctggtggaccacatcaagagcaccaagaacatccacttcagccggctgcgctggctggtgtttgatgaagctgaccgcatcctggacctgggctttgagaaggacatcaccgtcatcctgaatgctgtgaatgctgagtgccagaagaggcagaatgtgctgctgagcgccaccctgacagaaggagtgacccggctggccgacatcagcctgcatgaccctgtgtccatctctgtgctggacaagagccatgaccagctgaaccccaaggacaaggctgtgcaggaggtgtgccccccacctgctggggacaagctggacagctttgccatccctgagagcctgaagcagcacgtgacagtggtgcccagcaagctgcggctggtgtgcctggccgccttcatcctgcagaagtgcaagtttgaggaggaccagaagatggtggtgttcttcagcagctgtgagctggtggagttccactacagcctcttcctgcagaccctgctgagcagcagcggggccccagccagcggccagctgcccagcgcctccatgaggctgaagttcctgcggctgcacggcggcatggagcaggaggagaggacagctgtgttccaggagttcagccacagcagaagaggagtgctgctgtgcacagatgtggccgcccggggcctggacctgccccaggtgacctggatcgtgcagtacaatgcccccagcagccctgctgagtacatccacagaattggaagaacagccagaattggctgccacggcagcagcctgctgatcctggcccccagcgaggccgagtatgtgaacagcctggccagccacaagatcaacgtgtctgagatcaagatggaggacatcctgtgtgtgctgaccagagatgactgcttcaagggcaagcgctggggcgcccagaagagccatgctgtgggcccccaggagatccgggagcgggccaccgtgctgcagacagtgtttgaagattatgtgcacagcagcgagaggagagtgtcctgggccaagaaggccctgcagagcttcatccaggcctatgccacctacccccgggagctgaagcacatcttccacgtgcgcagcctgcacctgggccacgtggccaagagctttggcctgagagatgcccccaggaacctgagcgccctgaccaggaagaagaggaaggcccacgtgaagaggccagacctgcacaagaagacccagagcaagcacagcctggccgagatcctgcggtctgagtacagcagcggcatggaggccgacatcgccaaggtgaagaagcagaatgcccctggagagcccggcggccggcccctgcagcacagcctgcagcccaccccctgcttcggccggggcaagaccctgaagtggaggaagacccagaagggcgtgcagagggacagcaagaccagccagaaggtgtag

SEQ ID NO: 213154 - DNA, 2328 bp, Artificial Sequence
  derived and/or modified sequence
atggcccccgacctggccagccagcggcacagcgagagcttcccctctgtaaattctcggccaaacgtgattttgccgggacgagaagggaggcgggagggacttccccctgggggaggcacccgcggctctctcgtgcccacaagacctgtgcctccaagccccgcccctctcgggacaagcccctactcctggagtcggtcgggacctggcagaggaggcggtgcaggttccagccgggtaccgcgcggagttcccggtccagcggtctgtgctccaggctccctgctgcaccacgccagcccaacacagacaatggctgcagcggacggctcgttatttgacaacccaaggacgttttcccggagaccgccagctcaggcatcacgccaggctaaagcaacaaaacggaagtaccaagccagttccgaggcacctcccgcaaagagacgcaacgaaacttccttcctccctgccaagaagacatcagtgaaggagacccagagaacatttaagggaaatgcccagaaaatgttcagccctaaaaaacatagcgtgagcacatcggaccgcaatcaagaagagagacaatgtataaaaacttcatcacttttcaagaacaatcctgacattcccgaattacatcggccggtggtgaagcaggtgcaggagaaggtttttacctccgctgctttccacgagctaggcctgcatcctcacctgatatcgaccattaatactgtcctgaaaatgagcagcatgacctccgtacaaaagcagtctatcccagtgttgctggaaggaagagatgcactcgttcgatctcaaacaggctctggcaaaacgctggcatactgtatcccggtggtgcaatcactccaagctatggaatcaaagatacagcggagtgacggaccgtacgctttagtcctggtgccaactcgggaattggccttgcaatctttcgacacagtgcagaaactgctgaagcccttcacatggattgtgcccggcgtcctgatggggggagaaaagcgtaagtccgagaaagccaggctgagaaaggggatcaatatcctgatcagtacacctggcagactggtggaccacattaaatctaccaagaacattcatttttccagactgcggtggctggtcttcgacgaagccgatagaattctggatctgggattcgaaaaagacataacggtaatcctgaatgcggtgaacgcggaatgccagaaaaggcagaatgtgcttttatccgccactctgacagaaggcgttacacgcctggcagacattagcctgcacgaccccgtatcgatttcagttctggataaatcccacgaccagctgaatcccaaggacaaagccgtgcaggaggtgtgtcccccacctgccggggacaaactggacagttttgcaatacctgagtcactgaaacagcatgtgaccgtggtgccttccaaactgcggctcgtatgcctggccgcctttatattgcagaaatgcaaatttgaggaagatcagaagatggtggtgtttttttcatcctgcgagctggtagaattccactacagcctgttcctgcagactcttctgtcttccagtggagcccccgcctccggccaactccctagtgctagtatgcggctaaagttcttacgcttacatggagggatggaacaggaggagcgcacagccgtgttccaagagttctctcactcaagaaggggggtgttgctctgtacggacgtggctgctcgagggctcgatctcccacaggtaacgtggatagtgcagtacaacgcgccgagctcgcccgcggagtacattcaccggattggcaggaccgctcggataggctgccacggcagtagtttgctcatactggctccatcagaggctgagtatgtaaattccctggcgagccataagattaatgtgagcgagattaaaatggaggacattctgtgtgttctcaccagggacgattgcttcaagggaaagcgctggggcgcccagaagtcgcacgccgtggggcctcaagagatccgggagagagccaccgtgctgcaaaccgtctttgaggactatgtgcattcctcagagagacgtgtgtcatgggctaagaaagtgtggtcactggagactccagtgttgacagcctcgctgcctgcactgttcagcttcagctcagccgttctgcaccccagtttgcgacacctgccacagggtgccgaggctcacctgccgagaccgataccccctccatgggcctgcggtgaagaactccgcacaaaaaggtgtccacaggaaagctag

SEQ ID NO: 213155 - DNA, 2556 bp, Artificial Sequence
  derived and/or modified sequence
atggcccccgacctggccagccagcggcacagcgagagcttcccctctgtgaacagccgtccaaacgtgatattaccagggcgagagggtaggagggaaggcttacctcctggcggcggaaccagaggttctctagttcctactcgccccgtccctccgtccccagctcctctgggtacttctccatacagttggtcacgatccggacccggtaggggaggcggcgcaggatcctcacgggtgcctagaggggtacccggaccagcagtgtgtgcccctggttctctattgcatcatgcgtctcccacccagaccatggctgccgctgatggctctctctttgacaatccacgaacgttttcccgccggccaccagctcaggcctcaaggcaggcgaaggccactaagcggaaatatcaggccagctccgaggccccccctgctaagagacgaaacgaaactagcttcctgccagctaagaagacgtctgtcaaggagacacagcggacttttaaaggaaatgcccaaaaaatgttcagcccaaaaaaacattccgtgtcgacttccgaccgtaaccaagaggagcgtcaatgtatcaaaacttcttccctgtttaaaaacaatcccgacattcctgaactacacagacctgtggtcaaacaggtgcaagaaaaggtatttacttcggccgcctttcacgaactgggccttcatccacacctcatttcaacaataaataccgttcttaaaatgtcatccatgactagcgtgcagaaacaatccatccctgtgctcctcgagggaagagacgccctggtgaggtcccagactggaagcggtaaaacactagcatactgcattccagttgtgcagtccctgcaagccatggaatccaagatacagcgaagcgacgggccgtatgcccttgtgctggtaccgaccagggagctggcccttcagtctttcgatactgtgcagaagctgttgaaacctttcacctggatcgtgcccggagtactcatgggaggagagaaacgaaaaagcgagaaggcaaggctgcgaaagggaatcaacattctgatcagcacaccgggccggttagtggaccacatcaaaagtacaaagaacatacacttcagcaggttgcgctggctcgtatttgatgaagcagataggatcctggatctcgggttcgagaaagacataacagtgatactcaacgcagtgaatgcagagtgccaaaaacggcagaatgtgctcctctctgccaccctcacagagggagttaccagattggcagacattagcctgcacgaccccgtctccattagcgttctggataaatctcacgatcagttgaatccgaaagacaaagccgttcaggaagtttgccccccacccgccggagacaagttagactcatttgccatacctgagagccttaaacagcacgtgaccgtagtcccttctaaactgcgcctggtttgcctggcagcctttatattgcagaaatgcaagtttgaggaggaccagaagatggtggtgttcttttcctcctgcgagctcgttgagttccattactcactatttcttcagactctgctgagctcctctggcgccccagcctcaggtcagctcccttccgccagcatgaggttgaaattcttgagattacacggcgggatggaacaggaagaacggactgcagtgttccaggaattttcccacagccgacggggagtcctgctgtgtaccgacgtcgctgcccggggactggacctaccacaggtgacgtggattgtgcagtacaatgcccccagctcccctgccgaatacatccacaggataggccgcactgcccgtatcgggtgccatggcagctccctgctgatcctggcaccctccgaagctgagtatgtgaactctctagcatctcataagattaatgtaagcgaaatcaagatggaggacattctgtgtgtactgacaagagacgattgtttcaaaggaaaaagatggggcgctcagaaatcccatgccgtgggtcctcaggagattcgggagagggccaccgtactccagacagtctttgaagattacgtgcatagctctgagaggcgcgtaagctgggccaagaaagccctccagtcattcatccaagcttacgccacctatcctagggagctcaagcacatcttccacgtcaggtctctgcaccttggacatgttgccaagagcttcggtcttcgggacgctcctagaaatttatccgctctgacccgcaaaaagagaaaggcacatgttaaacggcctgacctccacaagaagacacaatcgaagcactccctcgccgagatcctgcgttctgagtactcgtcaggaatggaagctgacattgcaaaggtaaaaaaacagaatgctccgggcgagccaggaggcagacctctgcagcattcactgcagcctaccccttgtttcggcaggggaaagacgttgaaatggagaaagacccagaaaggcgtgcagcgcgacagcaagacgagtcagaaagtttag

SEQ ID NO: 213156 - DNA, 2169 bp, Artificial Sequence
  derived and/or modified sequence
atgcaggccaaggccaccaagcggaagtaccaggccagcagcgaggcccctccagccaagaggcggaatgaaaccagtttcctgcctgcaaagaagacatcagtgaaagagactcagcgcacattcaaaggaaatgcccaaaagatgttttcacctaaaaaacattctgtgagtacctctgaccggaaccaggaggagcgacagtgcatcaaaacctcgagcctctttaagaataaccccgatatacctgagctgcaccgtcctgtggttaaacaggtccaggagaaagtctttacgtctgctgctttccacgagttaggcctacacccccatctgatctcgaccattaacaccgtactgaaaatgagtagcatgacatccgtgcaaaaacagtctattccggtgttactggagggcagggatgctcttgtgagatctcaaaccgggtctggcaagacactcgcatattgcattccggtggtccagagcttacaggccatggaatctaaaatccagaggtccgatggtccttatgcactggtgcttgtccctacccgggagcttgccctgcagtcgtttgacacagtgcagaaactcttaaagcccttcacctggattgtgccgggggtactgatgggaggcgaaaagcgtaaatccgaaaaggctcggcttcggaagggcataaacattctgatctccacacctggtcggttggtggaccacatcaaatcaactaagaatattcacttctcccgcttgcggtggctggtttttgatgaggccgacagaatcctggatctcggttttgagaaggatatcacagtgatcctcaacgctgtcaatgcagagtgtcagaaacgtcagaacgtgttgctgtccgcaacactgactgaaggagtgacgcggctggccgacatctctctgcacgaccctgtctctataagcgtgctggacaagtcacacgaccaactgaaccccaaagacaaagccgtccaagaagtctgcccgccacctgcgggggacaagctcgatagcttcgccatcccagagtccctgaagcagcacgtgaccgtggttccatctaagcttcgactcgtgtgcttggccgcctttattctgcaaaaatgtaaattcgaagaggatcagaagatggtggtgtttttctcctcttgcgagctggtggagtttcactactccctattcttgcagactctcctatcctcatcaggggcacctgcaagtggccagctcccgagcgcctctatgaggttaaaattcttacggttgcatggtggcatggaacaggaggaaaggacagctgtttttcaggaattttcccacagccgccgtggggtgctgttgtgcaccgatgtcgccgcaaggggtcttgacctgcctcaggtgacatggatagtccaatataacgccccctcgagtccagcagaatacatccatcgcatcggtagaactgctagaattggctgccatggatcttcactcctgatcctggccccaagcgaagcagaatacgtgaatagtcttgctagtcacaaaataaacgtttccgagattaagatggaggatatcctgtgtgtactgacccgggacgattgctttaaggggaaacggtggggggcccagaagagccacgcagtaggtccccaggagataagagagagagcgacagtcttgcagaccgtcttcgaggattacgtgcacagctccgagcggcgcgtgagttgggccaaaaaagctctccagagctttatccaggcttatgctacttacccaagggaactgaagcatatttttcatgtgaggtccctgcacctggggcatgttgccaagagcttcggtctacgcgacgctccccggaacctgagtgctctcactcgaaaaaagcgcaaagcccatgtaaagcggcctgatctgcacaagaagacacaatccaagcacagcctcgccgaaatattaagatcagaatacagttctgggatggaagcggatattgcgaaagtcaagaagcagaatgcaccgggagagcctggaggaagacccctccagcacagcctgcagcctacaccttgcttcggccgcggaaaaaccctgaagtggagaaagacccaaaaaggggttcagcgggatagtaagacctcccagaaggtctag

SEQ ID NO: 213157 - DNA, 2328 bp, Artificial Sequence
  derived and/or modified sequence
atggcacccgatttggctagccaaagacactccgaatctttccccagcgttaactctcgtcctaatgtgatattgccaggcagggagggccgaagggagggcttaccgcctggtgggggtactcggggaagcctggtccccacccgccctgttcccccatctcctgcgcctctcggcacttctccctatagctggagtagaagtggaccgggtcggggaggaggggctggcagtagtcgtgtgccaaggggcgtgccaggacccgctgtgtgcgcccctggtagcctgttgcatcacgcatcgcctacccagaccatggcggctgccgacggcagcctgttcgataaccctcgaaccttttccagacgcccacctgctcaggcctccagacaagccaaagctaccaaaagaaagtatcaggccagcagcgaagcacctcccgcaaagcggcgtaacgagaccagttttctccctgcaaagaaaacctcagttaaggagacccaacggacgttcaagggtaacgctcagaagatgttcagccctaaaaagcactctgtgtcaacatcagacaggaatcaggaggaacgacagtgcattaaaactagctccctgttcaaaaataatcccgatatccctgagctgcacagaccagtcgttaaacaggttcaagaaaaggtgtttacttcagccgcttttcacgagctggggcttcaccctcatctgatcagcacgataaacactgtcttaaagatgtccagtatgacaagcgtccaaaagcagtccatcccagtgctgctggaaggacgtgatgccctggtccgatcacagacaggaagcggcaagacgctggcctactgcattccagtagttcagagtctacaggcaatggaatctaagatccagcggtcggatggcccatacgcactagtgctggttccaactcgtgagcttgcacttcagtcctttgacacagttcagaagctgctgaaaccatttacctggattgttccgggtgtcctgatgggcggtgagaagagaaagtcagaaaaggcccgattacgtaagggcatcaatatcctgatctcaaccccagggagactagtagaccacatcaaatctaccaaaaacatacacttcagcagactgagatggctagtctttgatgaagcagaccggatattagacctggggttcgaaaaggatataacagttatcctgaatgctgtgaatgccgagtgccagaagcgccagaacgtgctactctcagccacactcacagaaggtgtgacacggcttgccgacataagcctgcacgatcccgtttccatctccgtcctcgataaaagccacgaccagcttaaccccaaagacaaagctgtacaagaagtgtgccctccgccagctggagataagctggatagtttcgccatcccagagtcattgaaacagcatgtcactgtcgtgcccagcaagttacgtctcgtgtgccttgccgcatttattctgcagaaatgcaagttcgaggaggatcagaaaatggttgtcttttttagctcgtgcgagctggtggaattccactacagcctgtttctccagactctgctgtcttctagtggtgcaccggcttctggtcagcttcctagtgcgagcatgcgactgaaattcctccggctgcatggcggaatggagcaagaggagcggaccgctgttttccaggagtttagccatagccgaagaggcgtgctgctatgtaccgacgtggcagccagaggattagaccttccccaggtgacttggatcgtgcagtataacgctccttcctcacccgcagagtatattcaccggatcggtagaacagctcgcatcggctgtcacggcagctcattactgatactcgccccttccgaagccgagtatgttaattccctagctagccacaagatcaatgtgtcggaaattaaaatggaagatatcctgtgtgtcctgacaagagacgattgctttaaggggaagcggtggggagcacaaaaatctcacgcggtgggtcctcaggagatcagagaaagagcaacagtcttacagacagtgttcgaggactacgtgcatagctccgaacggcgtgtgtcctgggcaaaaaaagtatggtctttggagacccctgtcctaactgcctccctgcccgctctcttcagcttctccagtgcggtcctccacccaagcctgcgccatttgcctcagggggctgaagcccacttacctagacccattccaccgccttgggcgtgcggcgaggagctaaggaccaaacgttgccctcaggagtcgtag

SEQ ID NO: 213158 - DNA, 2556 bp, Artificial Sequence
  derived and/or modified sequence
atggcgccagatcttgcttcccaaagacactccgaatctttcccctctgtgaacagtcggccaaacgtgatcctgcctggcagggaggggagaagggagggcctgccgccaggcggtgggacaagaggcagtctcgtgccaaccagaccagtgcctcccagtccagcccctctaggaactagcccgtattcatggagtcgatctggtcccggtagaggaggcggagccggaagctctcgcgtgcctcgaggggtcccgggaccagctgtttgtgcccctggctcactgctccaccacgcctcacctacacagacgatggccgcagcggatggaagcctgttcgacaaccctagaactttctcccggaggccgccagcccaggcaagtaggcaagctaaagctaccaaacgcaaatatcaggcgtcaagtgaagctccccctgcaaaacggagaaacgagacgtcattcttgcccgctaagaaaacatcagtgaaagagactcagcggaccttcaaaggcaatgcccagaagatgttctctccaaaaaaacactctgtgtctacctctgaccggaaccaggaagaaaggcaatgcattaaaacatcctcactgttcaaaaacaaccctgatattcccgaactccaccgcccagtagtgaagcaagttcaggagaaagtcttcacctctgcagccttccatgagctaggccttcacccccatctgatctcaactatcaacaccgtcttgaaaatgtcttccatgacatctgttcaaaaacagagtattcctgtcttacttgaaggcagggatgcgctggttaggagccagactggttctggcaaaacattggcatattgcattcctgtggtacagagtttgcaggctatggaatcaaagattcagcggtccgacggcccttacgcactagtgctggttcccacacgagaactagcattgcagtcttttgatacagtgcagaagctacttaaaccattcacctggattgtgccaggggtgctcatggggggagaaaagcgcaagagcgaaaaggcaaggctgaggaaaggtattaatatattaattagcacacccggtagactcgtagaccatatcaagtccacgaagaatatacacttttctcgtttacgctggctcgtgttcgatgaagctgacaggattctcgatcttgggttcgaaaaggacatcaccgttatccttaatgccgtgaatgccgagtgtcagaagaggcaaaacgtcctactgagcgccacgctgacagaaggcgtgaccagactggccgacatttcacttcatgatccggtgtctatctccgttctggataagagccatgaccagctcaatccaaaggataaggcagtgcaggaagtttgtcctcctcccgctggagataagcttgattcttttgcaattcccgagagcttgaagcagcacgtgaccgtggtgccgtctaagctgcgactggtctgcctagccgcttttattttgcaaaagtgtaagttcgaagaggaccagaagatggtggtgttcttctcctcatgcgagttggtagagttccactacagccttttcctccagaccctccttagctcaagtggcgctccagcctccggtcagcttcccagcgcctccatgcgcttgaagttcctgaggctgcacggtgggatggagcaggaggagaggactgccgtgtttcaggagttctcgcattccagacggggagtcttgctgtgtacggatgttgctgctagaggcctggacctaccccaggtgacctggatcgtccagtataacgctccatcctcacccgcagagtatattcacaggatcggtcgcaccgccagaataggctgtcacggttcatccctcctgattctggcaccttccgaggccgaatacgtgaactctctagcctcccataaaattaacgtctccgagattaagatggaagatattttgtgcgtcctcaccagagacgattgtttcaagggaaagagatggggcgctcagaagtcccacgccgtgggcccacaggaaattcgggaaagggccacggtcctccagaccgtgttcgaggattatgttcacagctctgaaaggagggtgtcatgggcgaagaaggccttacagtcattcattcaggcatatgccacgtatccccgagagcttaagcacatttttcatgttcgttccttacacttgggccacgtcgccaaaagttttgggctgcgtgacgcccctcgaaatctatctgcactcaccaggaaaaagcggaaggcgcacgttaagcgcccagacctgcacaagaagacccagagcaaacactcactagcagaaatcctcagaagcgagtattcttcaggcatggaggctgatatcgctaaggtcaagaagcagaacgcccctggggagcccggaggcagaccactgcagcatagtctacagccaacaccgtgttttggaagaggcaagacacttaagtggaggaaaacccagaaaggcgtccaacgcgacagcaagacttcacagaaagtatag

SEQ ID NO: 213159 - DNA, 2169 bp, Artificial Sequence
  derived and/or modified sequence
atgcaggctaaggctaccaagcgtaaataccaggcatcctctgaggccccaccagccaagaggagaaatgaaacaagcttcctgccagccaagaagacttccgtcaaggagacccagagaactttcaaaggaaacgctcaaaagatgtttagcccaaaaaaacatagcgtctccaccagtgaccggaaccaggaggagcgccaatgtataaagacatcttctctttttaaaaataacccagatatcccagagttacaccggccagtggtgaaacaggtgcaggagaaggttttcacgagcgccgcttttcatgagctgggccttcacccacatcttatctccaccattaataccgttctgaaaatgtcttccatgacaagcgtgcaaaagcagtcgattccagtcttattagagggacgcgacgcactagtgaggagtcagactgggtctgggaaaacattggcatattgcattcctgtcgtgcagtctctgcaggcgatggaatcaaaaatacaacgtagcgatggaccatacgctcttgtgttagtgccaaccagagaactggcactccagtcctttgacactgtccaaaagttgctgaagccttttacatggattgttccgggtgtactcatgggaggggagaaacgaaagtcagagaaggcacgtctccgcaaagggattaacattctaattagcactcctggacgactagttgaccacattaaatccaccaaaaacatccatttctctcgactgcgctggttggtgttcgacgaggccgaccgaatcctggatctgggctttgaaaaagacatcaccgtaatcctgaatgctgtgaacgcagaatgtcagaaacgccagaacgtgctgctatctgctaccttgactgagggggtgactcgcctggcggacatttccctgcacgaccctgtgtccattagcgtgctagataaaagccatgatcagttaaaccctaaggacaaggcagtccaggaggtctgtccaccccctgctggcgataagctagacagctttgccatcccggaatctctaaagcaacacgtgaccgtcgtaccttccaaactgcgccttgtctgtctggcggcttttattctgcagaagtgtaagttcgaggaagatcaaaagatggtcgtctttttcagtagctgcgaactggtcgaattccattatagtctgttcttacaaacgctgctctccagttccggagccccagcgtccggacaactacccagcgcttcgatgcgactgaaatttcttaggctgcacggcggtatggaacaggaagaacgcacggctgtttttcaggagtttagccacagtagacggggagttctgctctgtacagacgtggccgctcgagggctagatctccctcaggtcacatggattgtgcagtataatgctccgagctctcccgcagaatatatccaccgtatcggcaggaccgctcggatagggtgtcatggtagctcattgttgatactcgccccttccgaggctgaatacgtgaactctttagcgtctcacaagatcaacgtgtccgagatcaaaatggaagatatcctctgcgtgcttacacgtgatgattgttttaaaggcaaacggtggggggcacagaagagtcatgccgtcggtccccaggagattagggagcgtgccacagtgctgcagacagtcttcgaagattacgtgcacagcagcgagcgtagggtctcctgggctaagaaagccttacagtctttcattcaggcttatgcaacatatcccagagagctgaaacacatatttcatgtgcggtctctgcacttgggccacgtagctaagtcatttggtctgcgggatgctccccgaaatctatccgccctaacaaggaagaaacgtaaggcacatgtgaagagaccagacctccataagaagacacagagcaagcactccttagccgaaattttgcgctccgagtattcaagcggcatggaagcagacattgccaaagtcaaaaagcagaatgcaccaggagagcccggagggagacccttacagcactctctccagccaaccccatgctttggtaggggtaagacactcaaatggcgaaagacccagaagggcgtccagcgggatagcaaaaccagccaaaaagtatag

SEQ ID NO: 213160 - DNA, 4635 bp, Artificial Sequence
  derived and/or modified sequence
aaaaaggacagcgagcggggagccccgaggacccccttttccctgcccagggattgagctccagagcctgttagggagctacccagacaggctttagttcctaaagtgctgaggaaacgcacggggcggtaaaggggaggctcgtcggtgagatggcgccggatctcgcttctcagaggcattcagagagcttccccagcgtgaactctcggccgaatgtaattttgccaggccgcgagggacgcagagaggggctgccaccaggcgggggcacgcgcggtagtcttgtccctacccgcccggtgccgccgtccccggctcccctcgggacgagtccgtacagctggagccgttccggacccggaaggggcggtggcgcagggtcctcgcgcgtcccacgtggggtcccgggcccagcagtctgcgcaccgggctcgctgctgcaccacgcgtcacccacgcagaccatggcagccgccgacggttcgctcttcgacaaccccaggacgttctccagacgtcccccagcccaggcgagtcggcaagcaaaggctacgaaaagaaaataccaagcgtccagtgaggctcccccagcgaaacggaggaacgaaacttcatttctcccagccaagaaaactagtgttaaagaaactcagaggacttttaaggggaacgcacaaaaaatgttttctccaaagaagcattcggttagcacaagtgatagaaaccaggaggagagacagtgcattaagacttcatcactgtttaaaaacaaccctgacattccagaactccacagacctgtggtaaagcaggtgcaagaaaaagtgtttacttcagctgcttttcatgagctgggcctccacccacatttaatttccacaataaatacggtcttaaaaatgtctagtatgaccagtgttcagaagcaaagtattcctgtgttgctggaaggcagagatgctctcgtgagatcccagacgggctcaggtaaaactcttgcctattgcatccctgtggtccagtcccttcaagcaatggagtcaaaaatacagcgcagtgatggcccctatgccctggtgctcgtgccaacgagagagctagctctacaaagctttgacactgtccagaaactgcttaagcctttcacctggattgtgcctggagtgttaatgggaggagagaagagaaaatcagaaaaggccagactccgcaaaggaataaatatccttatctcaactcctggacgcctggtggatcatataaaatccacaaagaacattcattttagtcggctgcggtggttggtgtttgatgaagcagacagaatcttggatttgggttttgaaaaggacatcacagtgatacttaatgctgtaaatgctgaatgccaaaaacgacagaatgtcttgctatcagcgacactcacagaaggtgtaacgcggctagctgatatcagtttgcatgatccagtcagtatttctgtcctggacaagagccatgaccagttgaacccaaaggacaaagcggtccaggaggtctgtcctccaccagctggcgacaagctggacagctttgcaataccagagagtctcaagcagcatgtgactgtggttcccagcaaactgaggcttgtctgcctagcggccttcatccttcagaaatgcaagtttgaggaagaccagaagatggttgtctttttctcaagttgcgagctggtggagttccactacagcctcttcctacagaccctgctgagcagctcaggggcgccggcatcagggcagttgccatctgcctccatgcgattaaaattcctacggctgcatggcggcatggagcaggaggaaagaacagcagtgtttcaggaattttcacattccagaagaggcgtccttctttgcacggatgttgcagctcggggcttagatctccctcaagtcacgtggattgttcagtacaacgctccatcttcacctgcagaatacatccaccggattggaagaaccgcccggattggctgccatgggagcagcctgctcattttggctccttcggaggcagaatatgtcaactcgttggcttctcacaaaatcaacgtttctgagattaagatggaagatattttgtgtgttctgacaagagatgattgttttaaagggaaacgatggggagcccagaaatcccatgctgttggcccccaggaaatccgagagcgagccacagtcttgcagacggtatttgaagattacgtgcactccagtgagaggagggtctcctgggcaaagaaagtttggagcttggagaccccggtcctgacagcttccctccccgctctcttttctttcagctctgcagtccttcatccaagcctacgccacctaccccagggagctgaagcacatcttccacgtccgatccctccaccttgggcatgtggcgaagagcttcggactaagagatgcccccaggaatcttagtgccttgactagaaagaagaggaaagcacacgtgaaaaggcctgaccttcataagaagacccagagtaaacacagcctcgctgaaatcctacgttcggaatactcaagcggcatggaggccgacatcgccaaggtcaaaaagcaaaacgcacctggagagcctggtggccggcccctgcagcacagtctgcagccgacaccctgctttggccgtgggaaaacattaaaatggagaaaaacccaaaaaggtgtacagcgggacagcaagacttcccagaaagtttaaaatctctctgggtcttcgagtggaacctggaagccccgggtggcagtggattgatgtccagttcttgtcagaggaggcttgtgaaaaataactgcgcctttgcctgaataccacgtccccaagaatcagaggggccacagcccttctcctccatgggaggccctggagcctgatagaaatcagtggtgtggggcactgtagagactagccagctcccgacggaaggggtctgtgtcttgtattgatcccatcagtgcccggcactcccttcacccaggtgctgacgtgccggggttgagctggcaccccgggatgtgatgtaagaacgccctgcgcgtcagcctggaacgggcttgattgctgcccttaactgtgttctgaagtttcacagcttggcttcagcctatcagcgcatacattggcatgaattttgtgaattagggtgttaaaaactggaattgaatttgtacaaaaagagaatatatttatcactaattattttcttaatgtaggaatgtaccgttaaaaaggaccaaaagtttttggtctgggtcaaaaaatacgaatgtgttctcaggctcgtggtccctcttattttcttctggaaacacgaggttgcatttacatgcattgctccctctttcatgtccactgaaaactcactctctcagggctaattgatttactgttggctttttattatttgcctttgaagtcaaaaggcaccagtatcccaagctttttttccctatcgaatcctgtcttgtcttcaagaaaggtctgggggtctttgtattgtgacccaggccacagctgcccgccccccgcccccgacccaccccgccctgcccctgcattgtgttttctgggaggtttgaaagaggccccctggagcatattgatttcccaataaatgtaagatttgggcacttgcagaggggtccagaagagaaagggttggaggcctccacacctgtgggcaccgctcctgtcctctccactgtgtcttgccttctcagtttccttctcctctgcagtgactgtgccgccctctgtggtctccccaggaccagtgttgaggcaccacttcagtagatccccccagatccttggaaggtctgagtggccacgagagggtggtgagagttggcaaggtgggccttcctgcagggaccacggggggtcagcatccttgcctccgttctagacacaggtgaatgtcagtgggcacccacactggcggagactccagtgtgagggcaaggaggagcctagtgagactggatcctctgcaggtggaaaaataggaccttctcagagttggctgtcacatacaaattaacagggactgtgggtgacgtttctaacaataataattaaaaaacaacaaccctgcagcacatgtcagcctggcgttgggcaagtctgccacctttcttttatttcgatgtgtaatggttcacatgatttggatgagaaaaggagggatcaaactttatagacaaaacccagctgtgtgaaaaacaggattaatgccagtgattggggatgatcaaagagaaaccttactttttctcccccagtactcattccactaaagggcgaattggcagagttcggcatccctggggggaaagagaagtgctagaatcatgcaacgtgtgagtgacgataattccaagatcaaaacttacacacttaatctgctaactcttatggtgagggtttcttgccatagatgctatgtgggtctgtttctaagtagaatcactatattaccccagttaataaagaaacatggatttagcagatttaaggttaatattgtttaaatttaaataaccttaaaataaatctctttctcttcta

SEQ ID NO: 213161 - DNA, 4577 bp, Artificial Sequence
  derived and/or modified sequence
aaaaaggacagcgagcggggagccccgaggacccccttttccctgcccagggattgagctccagagcctgttagggagctacccagacaggctttagttcctaaagtgctgaggaaacgcacggggcggtaaaggggaggctcgtcggtgagatggcgccggatctcgcttctcagaggcattcagagagcttccccagcgtgaactctcggccgaatgtaattttgccaggccgcgagggacgcagagaggggctgccaccaggcgggggcacgcgcggtagtcttgtccctacccgcccggtgccgccgtccccggctcccctcgggacgagtccgtacagctggagccgttccggacccggaaggggcggtggcgcagggtcctcgcgcgtcccacgtggggtcccgggcccagcagtctgcgcaccgggctcgctgctgcaccacgcgtcacccacgcagaccatggcagccgccgacggttcgctcttcgacaaccccaggacgttctccagacgtcccccagcccaggcgagtcggcaagcaaaggctacgaaaagaaaataccaagcgtccagtgaggctcccccagcgaaacggaggaacgaaacttcatttctcccagccaagaaaactagtgttaaagaaactcagaggacttttaaggggaacgcacaaaaaatgttttctccaaagaagcattcggttagcacaagtgatagaaaccaggaggagagacagtgcattaagacttcatcactgtttaaaaacaaccctgacattccagaactccacagacctgtggtaaagcaggtgcaagaaaaagtgtttacttcagctgcttttcatgagctgggcctccacccacatttaatttccacaataaatacggtcttaaaaatgtctagtatgaccagtgttcagaagcaaagtattcctgtgttgctggaaggcagagatgctctcgtgagatcccagacgggctcaggtaaaactcttgcctattgcatccctgtggtccagtcccttcaagcaatggagtcaaaaatacagcgcagtgatggcccctatgccctggtgctcgtgccaacgagagagctagctctacaaagctttgacactgtccagaaactgcttaagcctttcacctggattgtgcctggagtgttaatgggaggagagaagagaaaatcagaaaaggccagactccgcaaaggaataaatatccttatctcaactcctggacgcctggtggatcatataaaatccacaaagaacattcattttagtcggctgcggtggttggtgtttgatgaagcagacagaatcttggatttgggttttgaaaaggacatcacagtgatacttaatgctgtaaatgctgaatgccaaaaacgacagaatgtcttgctatcagcgacactcacagaaggtgtaacgcggctagctgatatcagtttgcatgatccagtcagtatttctgtcctggacaagagccatgaccagttgaacccaaaggacaaagcggtccaggaggtctgtcctccaccagctggcgacaagctggacagctttgcaataccagagagtctcaagcagcatgtgactgtggttcccagcaaactgaggcttgtctgcctagcggccttcatccttcagaaatgcaagtttgaggaagaccagaagatggttgtctttttctcaagttgcgagctggtggagttccactacagcctcttcctacagaccctgctgagcagctcaggggcgccggcatcagggcagttgccatctgcctccatgcgattaaaattcctacggctgcatggcggcatggagcaggaggaaagaacagcagtgtttcaggaattttcacattccagaagaggcgtccttctttgcacggatgttgcagctcggggcttagatctccctcaagtcacgtggattgttcagtacaacgctccatcttcacctgcagaatacatccaccggattggaagaaccgcccggattggctgccatgggagcagcctgctcattttggctccttcggaggcagaatatgtcaactcgttggcttctcacaaaatcaacgtttctgagattaagatggaagatattttgtgtgttctgacaagagatgattgttttaaagggaaacgatggggagcccagaaatcccatgctgttggcccccaggaaatccgagagcgagccacagtcttgcagacggtatttgaagattacgtgcactccagtgagaggagggtctcctgggcaaagaaagctctgcagtccttcatccaagcctacgccacctaccccagggagctgaagcacatcttccacgtccgatccctccaccttgggcatgtggcgaagagcttcggactaagagatgcccccaggaatcttagtgccttgactagaaagaagaggaaagcacacgtgaaaaggcctgaccttcataagaagacccagagtaaacacagcctcgctgaaatcctacgttcggaatactcaagcggcatggaggccgacatcgccaaggtcaaaaagcaaaacgcacctggagagcctggtggccggcccctgcagcacagtctgcagccgacaccctgctttggccgtgggaaaacattaaaatggagaaaaacccaaaaaggtgtacagcgggacagcaagacttcccagaaagtttaaaatctctctgggtcttcgagtggaacctggaagccccgggtggcagtggattgatgtccagttcttgtcagaggaggcttgtgaaaaataactgcgcctttgcctgaataccacgtccccaagaatcagaggggccacagcccttctcctccatgggaggccctggagcctgatagaaatcagtggtgtggggcactgtagagactagccagctcccgacggaaggggtctgtgtcttgtattgatcccatcagtgcccggcactcccttcacccaggtgctgacgtgccggggttgagctggcaccccgggatgtgatgtaagaacgccctgcgcgtcagcctggaacgggcttgattgctgcccttaactgtgttctgaagtttcacagcttggcttcagcctatcagcgcatacattggcatgaattttgtgaattagggtgttaaaaactggaattgaatttgtacaaaaagagaatatatttatcactaattattttcttaatgtaggaatgtaccgttaaaaaggaccaaaagtttttggtctgggtcaaaaaatacgaatgtgttctcaggctcgtggtccctcttattttcttctggaaacacgaggttgcatttacatgcattgctccctctttcatgtccactgaaaactcactctctcagggctaattgatttactgttggctttttattatttgcctttgaagtcaaaaggcaccagtatcccaagctttttttccctatcgaatcctgtcttgtcttcaagaaaggtctgggggtctttgtattgtgacccaggccacagctgcccgccccccgcccccgacccaccccgccctgcccctgcattgtgttttctgggaggtttgaaagaggccccctggagcatattgatttcccaataaatgtaagatttgggcacttgcagaggggtccagaagagaaagggttggaggcctccacacctgtgggcaccgctcctgtcctctccactgtgtcttgccttctcagtttccttctcctctgcagtgactgtgccgccctctgtggtctccccaggaccagtgttgaggcaccacttcagtagatccccccagatccttggaaggtctgagtggccacgagagggtggtgagagttggcaaggtgggccttcctgcagggaccacggggggtcagcatccttgcctccgttctagacacaggtgaatgtcagtgggcacccacactggcggagactccagtgtgagggcaaggaggagcctagtgagactggatcctctgcaggtggaaaaataggaccttctcagagttggctgtcacatacaaattaacagggactgtgggtgacgtttctaacaataataattaaaaaacaacaaccctgcagcacatgtcagcctggcgttgggcaagtctgccacctttcttttatttcgatgtgtaatggttcacatgatttggatgagaaaaggagggatcaaactttatagacaaaacccagctgtgtgaaaaacaggattaatgccagtgattggggatgatcaaagagaaaccttactttttctcccccagtactcattccactaaagggcgaattggcagagttcggcatccctggggggaaagagaagtgctagaatcatgcaacgtgtgagtgacgataattccaagatcaaaacttacacacttaatctgctaactcttatggtgagggtttcttgccatagatgctatgtgggtctgtttctaagtagaatcactatattaccccagttaataaagaaacatggatttagcagatttaaggttaatattgtttaaatttaaataaccttaaaataaatctctttctcttcta

SEQ ID NO: 213162 - DNA, 2551 bp, Artificial Sequence
  derived and/or modified sequence
atcatgcatttaagcacattcctgtaatggaaataagaagcaacaggcaagagatccctagtgctgtgtagcctgtaatccgcaatcaggcagagactcggggactcagagactcgaaaggcaagggaggtaggaagtaattgtggtagaggtgatggatggagcagcattctcatttggaatgggaacagggcgtaggaattttctccaggccgtctgaatctggaggagcagcttgagaggagagaatgagagagatccaggcgctagggtagaatgcaagcaaaggctacgaaaagaaaataccaagcgtccagtgaggctcccccagcgaaacggaggaacgaaacttcatttctcccagccaagaaaactagtgttaaagaaactcagaggacttttaaggggaacgcacaaaaaatgttttctccaaagaagcattcggttagcacaagtgatagaaaccaggaggagagacagtgcattaagacttcatcactgtttaaaaacaaccctgacattccagaactccacagacctgtggtaaagcaggtgcaagaaaaagtgtttacttcagctgcttttcatgagctgggcctccacccacatttaatttccacaataaatacggtcttaaaaatgtctagtatgaccagtgttcagaagcaaagtattcctgtgttgctggaaggcagagatgctctcgtgagatcccagacgggctcaggtaaaactcttgcctattgcatccctgtggtccagtcccttcaagcaatggagtcaaaaatacagcgcagtgatggcccctatgccctggtgctcgtgccaacgagagagctagctctacaaagctttgacactgtccagaaactgcttaagcctttcacctggattgtgcctggagtgttaatgggaggagagaagagaaaatcagaaaaggccagactccgcaaaggaataaatatccttatctcaactcctggacgcctggtggatcatataaaatccacaaagaacattcattttagtcggctgcggtggttggtgtttgatgaagcagacagaatcttggatttgggttttgaaaaggacatcacagtgatacttaatgctgtaaatgctgaatgccaaaaacgacagaatgtcttgctatcagcgacactcacagaaggtgtaacgcggctagctgatatcagtttgcatgatccagtcagtatttctgtcctggacaagagccatgaccagttgaacccaaaggacaaagcggtccaggaggtctgtcctccaccagctggcgacaagctggacagctttgcaataccagagagtctcaagcagcatgtgactgtggttcccagcaaactgaggcttgtctgcctagcggccttcatccttcagaaatgcaagtttgaggaagaccagaagatggttgtctttttctcaagttgcgagctggtggagttccactacagcctcttcctacagaccctgctgagcagctcaggggcgccggcatcagggcagttgccatctgcctccatgcgattaaaattcctacggctgcatggcggcatggagcaggaggaaagaacagcagtgtttcaggaattttcacattccagaagaggcgtccttctttgcacggatgttgcagctcggggcttagatctccctcaagtcacgtggattgttcagtacaacgctccatcttcacctgcagaatacatccaccggattggaagaaccgcccggattggctgccatgggagcagcctgctcattttggctccttcggaggcagaatatgtcaactcgttggcttctcacaaaatcaacgtttctgagattaagatggaagatattttgtgtgttctgacaagagatgattgttttaaagggaaacgatggggagcccagaaatcccatgctgttggcccccaggaaatccgagagcgagccacagtcttgcagacggtatttgaagattacgtgcactccagtgagaggagggtctcctgggcaaagaaagctctgcagtccttcatccaagcctacgccacctaccccagggagctgaagcacatcttccacgtccgatccctccaccttgggcatgtggcgaagagcttcggactaagagatgcccccaggaatcttagtgccttgactagaaagaagaggaaagcacacgtgaaaaggcctgaccttcataagaagacccagagtaaacacagcctcgctgaaatcctacgttcggaatactcaagcggcatggaggccgacatcgccaaggtcaaaaagcaaaacgcacctggagagcctggtggccggcccctgcagcacagtctgcagccgacaccctgctttggccgtgggaaaacattaaaatggagaaaaacccaaaaaggtgtacagcgggacagcaagacttcccagaaagtttaaaatctctctgggtcttcgagtggaacctggaagccccgggtggcagtggattgatgtccagttcttgtcagaggaggcttgtgaaaaataactgcgcctttgcctg

SEQ ID NO: 213163 - DNA, 2328 bp, Artificial Sequence
  derived and/or modified sequence
atggcccccgacctggccagccagagacacagcgagagcttccccagcgtgaacagcagacccaacgtgatcctgcccggcagagagggcagaagagagggcctgccccccggcggcggcaccagaggcagcctggtgcccaccagacccgtgccccccagccccgcccccctgggcaccagcccctacagctggagcagaagcggccccggcagaggcggcggcgccggcagcagcagagtgcccagaggcgtgcccggccccgccgtgtgcgcccccggcagcctgctgcaccacgccagccccacccagaccatggccgccgccgacggcagcctgttcgacaaccccagaaccttcagcagaagaccccccgcccaggccagcagacaggccaaggccaccaagagaaagtaccaggccagcagcgaggccccccccgccaagagaagaaacgagaccagcttcctgcccgccaagaagaccagcgtgaaggagacccagagaaccttcaagggcaacgcccagaagatgttcagccccaagaagcacagcgtgagcaccagcgacagaaaccaggaggagagacagtgcatcaagaccagcagcctgttcaagaacaaccccgacatccccgagctgcacagacccgtggtgaagcaggtgcaggagaaggtgttcaccagcgccgccttccacgagctgggcctgcacccccacctgatcagcaccatcaacaccgtgctgaagatgagcagcatgaccagcgtgcagaagcagagcatccccgtgctgctggagggcagagacgccctggtgagaagccagaccggcagcggcaagaccctggcctactgcatccccgtggtgcagagcctgcaggccatggagagcaagatccagagaagcgacggcccctacgccctggtgctggtgcccaccagagagctggccctgcagagcttcgacaccgtgcagaagctgctgaagcccttcacctggatcgtgcccggcgtgctgatgggcggcgagaagagaaagagcgagaaggccagactgagaaagggcatcaacatcctgatcagcacccccggcagactggtggaccacatcaagagcaccaagaacatccacttcagcagactgagatggctggtgttcgacgaggccgacagaatcctggacctgggcttcgagaaggacatcaccgtgatcctgaacgccgtgaacgccgagtgccagaagagacagaacgtgctgctgagcgccaccctgaccgagggcgtgaccagactggccgacatcagcctgcacgaccccgtgagcatcagcgtgctggacaagagccacgaccagctgaaccccaaggacaaggccgtgcaggaggtgtgccccccccccgccggcgacaagctggacagcttcgccatccccgagagcctgaagcagcacgtgaccgtggtgcccagcaagctgagactggtgtgcctggccgccttcatcctgcagaagtgcaagttcgaggaggaccagaagatggtggtgttcttcagcagctgcgagctggtggagttccactacagcctgttcctgcagaccctgctgagcagcagcggcgcccccgccagcggccagctgcccagcgccagcatgagactgaagttcctgagactgcacggcggcatggagcaggaggagagaaccgccgtgttccaggagttcagccacagcagaagaggcgtgctgctgtgcaccgacgtggccgccagaggcctggacctgccccaggtgacctggatcgtgcagtacaacgcccccagcagccccgccgagtacatccacagaatcggcagaaccgccagaatcggctgccacggcagcagcctgctgatcctggcccccagcgaggccgagtacgtgaacagcctggccagccacaagatcaacgtgagcgagatcaagatggaggacatcctgtgcgtgctgaccagagacgactgcttcaagggcaagagatggggcgcccagaagagccacgccgtgggcccccaggagatcagagagagagccaccgtgctgcagaccgtgttcgaggactacgtgcacagcagcgagagaagagtgagctgggccaagaaggtgtggagcctggagacccccgtgctgaccgccagcctgcccgccctgttcagcttcagcagcgccgtgctgcaccccagcctgagacacctgccccagggcgccgaggcccacctgcccagacccatcccccccccctgggcctgcggcgaggagctgagaaccaagagatgcccccaggagagctag

SEQ ID NO: 213164 - DNA, 2556 bp, Artificial Sequence
  derived and/or modified sequence
atggcccccgacctggccagccagagacacagcgagagcttccccagcgtgaacagcagacccaacgtgatcctgcccggcagagagggcagaagagagggcctgccccccggcggcggcaccagaggcagcctggtgcccaccagacccgtgccccccagccccgcccccctgggcaccagcccctacagctggagcagaagcggccccggcagaggcggcggcgccggcagcagcagagtgcccagaggcgtgcccggccccgccgtgtgcgcccccggcagcctgctgcaccacgccagccccacccagaccatggccgccgccgacggcagcctgttcgacaaccccagaaccttcagcagaagaccccccgcccaggccagcagacaggccaaggccaccaagagaaagtaccaggccagcagcgaggccccccccgccaagagaagaaacgagaccagcttcctgcccgccaagaagaccagcgtgaaggagacccagagaaccttcaagggcaacgcccagaagatgttcagccccaagaagcacagcgtgagcaccagcgacagaaaccaggaggagagacagtgcatcaagaccagcagcctgttcaagaacaaccccgacatccccgagctgcacagacccgtggtgaagcaggtgcaggagaaggtgttcaccagcgccgccttccacgagctgggcctgcacccccacctgatcagcaccatcaacaccgtgctgaagatgagcagcatgaccagcgtgcagaagcagagcatccccgtgctgctggagggcagagacgccctggtgagaagccagaccggcagcggcaagaccctggcctactgcatccccgtggtgcagagcctgcaggccatggagagcaagatccagagaagcgacggcccctacgccctggtgctggtgcccaccagagagctggccctgcagagcttcgacaccgtgcagaagctgctgaagcccttcacctggatcgtgcccggcgtgctgatgggcggcgagaagagaaagagcgagaaggccagactgagaaagggcatcaacatcctgatcagcacccccggcagactggtggaccacatcaagagcaccaagaacatccacttcagcagactgagatggctggtgttcgacgaggccgacagaatcctggacctgggcttcgagaaggacatcaccgtgatcctgaacgccgtgaacgccgagtgccagaagagacagaacgtgctgctgagcgccaccctgaccgagggcgtgaccagactggccgacatcagcctgcacgaccccgtgagcatcagcgtgctggacaagagccacgaccagctgaaccccaaggacaaggccgtgcaggaggtgtgccccccccccgccggcgacaagctggacagcttcgccatccccgagagcctgaagcagcacgtgaccgtggtgcccagcaagctgagactggtgtgcctggccgccttcatcctgcagaagtgcaagttcgaggaggaccagaagatggtggtgttcttcagcagctgcgagctggtggagttccactacagcctgttcctgcagaccctgctgagcagcagcggcgcccccgccagcggccagctgcccagcgccagcatgagactgaagttcctgagactgcacggcggcatggagcaggaggagagaaccgccgtgttccaggagttcagccacagcagaagaggcgtgctgctgtgcaccgacgtggccgccagaggcctggacctgccccaggtgacctggatcgtgcagtacaacgcccccagcagccccgccgagtacatccacagaatcggcagaaccgccagaatcggctgccacggcagcagcctgctgatcctggcccccagcgaggccgagtacgtgaacagcctggccagccacaagatcaacgtgagcgagatcaagatggaggacatcctgtgcgtgctgaccagagacgactgcttcaagggcaagagatggggcgcccagaagagccacgccgtgggcccccaggagatcagagagagagccaccgtgctgcagaccgtgttcgaggactacgtgcacagcagcgagagaagagtgagctgggccaagaaggccctgcagagcttcatccaggcctacgccacctaccccagagagctgaagcacatcttccacgtgagaagcctgcacctgggccacgtggccaagagcttcggcctgagagacgcccccagaaacctgagcgccctgaccagaaagaagagaaaggcccacgtgaagagacccgacctgcacaagaagacccagagcaagcacagcctggccgagatcctgagaagcgagtacagcagcggcatggaggccgacatcgccaaggtgaagaagcagaacgcccccggcgagcccggcggcagacccctgcagcacagcctgcagcccaccccctgcttcggcagaggcaagaccctgaagtggagaaagacccagaagggcgtgcagagagacagcaagaccagccagaaggtgtag

SEQ ID NO: 213165 - DNA, 2169 bp, Artificial Sequence
  derived and/or modified sequence
atgcaggccaaggccaccaagagaaagtaccaggccagcagcgaggccccccccgccaagagaagaaacgagaccagcttcctgcccgccaagaagaccagcgtgaaggagacccagagaaccttcaagggcaacgcccagaagatgttcagccccaagaagcacagcgtgagcaccagcgacagaaaccaggaggagagacagtgcatcaagaccagcagcctgttcaagaacaaccccgacatccccgagctgcacagacccgtggtgaagcaggtgcaggagaaggtgttcaccagcgccgccttccacgagctgggcctgcacccccacctgatcagcaccatcaacaccgtgctgaagatgagcagcatgaccagcgtgcagaagcagagcatccccgtgctgctggagggcagagacgccctggtgagaagccagaccggcagcggcaagaccctggcctactgcatccccgtggtgcagagcctgcaggccatggagagcaagatccagagaagcgacggcccctacgccctggtgctggtgcccaccagagagctggccctgcagagcttcgacaccgtgcagaagctgctgaagcccttcacctggatcgtgcccggcgtgctgatgggcggcgagaagagaaagagcgagaaggccagactgagaaagggcatcaacatcctgatcagcacccccggcagactggtggaccacatcaagagcaccaagaacatccacttcagcagactgagatggctggtgttcgacgaggccgacagaatcctggacctgggcttcgagaaggacatcaccgtgatcctgaacgccgtgaacgccgagtgccagaagagacagaacgtgctgctgagcgccaccctgaccgagggcgtgaccagactggccgacatcagcctgcacgaccccgtgagcatcagcgtgctggacaagagccacgaccagctgaaccccaaggacaaggccgtgcaggaggtgtgccccccccccgccggcgacaagctggacagcttcgccatccccgagagcctgaagcagcacgtgaccgtggtgcccagcaagctgagactggtgtgcctggccgccttcatcctgcagaagtgcaagttcgaggaggaccagaagatggtggtgttcttcagcagctgcgagctggtggagttccactacagcctgttcctgcagaccctgctgagcagcagcggcgcccccgccagcggccagctgcccagcgccagcatgagactgaagttcctgagactgcacggcggcatggagcaggaggagagaaccgccgtgttccaggagttcagccacagcagaagaggcgtgctgctgtgcaccgacgtggccgccagaggcctggacctgccccaggtgacctggatcgtgcagtacaacgcccccagcagccccgccgagtacatccacagaatcggcagaaccgccagaatcggctgccacggcagcagcctgctgatcctggcccccagcgaggccgagtacgtgaacagcctggccagccacaagatcaacgtgagcgagatcaagatggaggacatcctgtgcgtgctgaccagagacgactgcttcaagggcaagagatggggcgcccagaagagccacgccgtgggcccccaggagatcagagagagagccaccgtgctgcagaccgtgttcgaggactacgtgcacagcagcgagagaagagtgagctgggccaagaaggccctgcagagcttcatccaggcctacgccacctaccccagagagctgaagcacatcttccacgtgagaagcctgcacctgggccacgtggccaagagcttcggcctgagagacgcccccagaaacctgagcgccctgaccagaaagaagagaaaggcccacgtgaagagacccgacctgcacaagaagacccagagcaagcacagcctggccgagatcctgagaagcgagtacagcagcggcatggaggccgacatcgccaaggtgaagaagcagaacgcccccggcgagcccggcggcagacccctgcagcacagcctgcagcccaccccctgcttcggcagaggcaagaccctgaagtggagaaagacccagaagggcgtgcagagagacagcaagaccagccagaaggtgtag

SEQ ID NO: 213166 - protein, 1031 aa, Artificial Sequence
  derived and/or modified sequence
MGFFSLSSERNESVIHYPESTEPEIQQEMSTSQPDCNVDSCSVSSGYGTFCISELNLYKSKDPKEFMEHIDVPKGQYVAPAVPAESLVDGVKNENFYIQTPEECHVSLKEDVSISPGEFEHNFLGENKVSEVYSGKTNSNAITSWAQKLKQNQPKRAHVEDGGSRSKQGNEQSKKTPIEKSDFAAATHPRAFYLSKPDETPNAWMSDSGTGLTYWKLEEKDMHHSLPETLEKTFISLSSTDVSPNQSNTSNEMKLPSLKDIYYKKQRENKQLPERNLTSASNPNHPPEVLTLDPTLHMKPKQQISGIQPHGLPNALDDRISFSPDSVLEPSMSSPSDIDSFSQASNVTSQLPGFPKYPSHTKASPVDSWKNQTFQNESRTSSTFPSVYTITSNDISVNTVDEENTVMVASASVSQSQLPGTANSVPECISLTSLEDPVILSKIRQNLKEKHARHIADLRAYYESEINSLKQKLEAKEISGVEDWKITNQILVDRCGQLDSALHEATSRVRTLENKNNLLEIEVNDLRERFSAASSASKILQERIEEMRTSSKEKDNTIIRLKSRLQDLEEAFENAYKLSDDKEAQLKQENKMFQDLLGEYESLGKEHRRVKDALNTTENKLLDAYTQISDLKRMISKLEAQVKQVEHENMLSLRHNSRIHVRPSRANTLATSDVSRRKWLIPGAEYSIFTGQPLDTQDSNVDNQLEETCSLGHRSPLEKDSSPGSSSTSLLIKKQRETSDTPIMRALKELDEGKIFKNWGTQTEKEDTSNINPRQTETSVNASRSPEKCAQQRQKRLNSASQRSSSLPPSNRKSSTPTKREIMLTPVTVAYSPKRSPKENLSPGFSHLLSKNESSPIRFDILLDDLDTVPVSTLQRTNPRKQLQFLPLDDSEEKTYSEKATDNHVNHSSCPEPVPNGVKKVSVRTAWEKNKSVSYEQCKPVSVTPQGNDFEYTAKIRTLAETERFFDELTKEKDQIEAALSRMPSPGGRITLQTRLNQEALEDRLERINRELGSVRMTLKKFHVLRTSANL

SEQ ID NO: 213167 - DNA, 3096 bp, Artificial Sequence
  derived and/or modified sequence
atgggcttctttagcctgtcctccgaacgaaatgagagtgtgatccactatccagagagtacggaacccgaaatccagcaagagatgagcacctctcaacccgactgcaacgtggattcttgctctgtcagttccggctacggcacattttgtattagtgagctgaacctatataaaagcaaagaccccaaagaattcatggagcatatcgacgtgccaaagggccagtatgtcgccccagcggtgcctgcagaatcccttgtggatggagtaaaaaacgagaacttctacattcagaccccagaagagtgtcacgtaagcctcaaagaggacgtgtctatcagccccggtgagttcgagcataatttcctgggcgaaaacaaagtctcggaggtctactcaggtaaaaccaattcgaatgctatcacttcgtgggcccaaaagcttaagcaaaaccaacccaaaagggcccacgtggaggatggtggctccaggtctaaacagggaaacgaacagtcgaagaagactcccatcgagaaatcagatttcgctgcggccacccacccaagagcattctacttatctaagcctgacgaaacccccaacgcatggatgtccgacagtggaacggggctgacatactggaaactcgaggaaaaggatatgcatcattccctgcccgaaaccctggagaaaacgttcatctctctatcctccaccgacgtgtcgccaaaccagagcaacaccagcaatgaaatgaagctgcccagtctgaaagatatctattacaagaaacagagagagaacaaacagctgcctgagaggaatttgacaagtgcctcgaatcccaaccaccctcctgaagtccttaccctggatccaacgctacacatgaaaccaaagcagcaaataagcggaatccagccccacgggctccccaacgctctcgatgaccggatttctttttcccctgactccgtgttagagccaagcatgtcatcccccagcgatatcgacagttttagccaagcatcgaatgtgaccagccaacttcccggcttcccaaaataccctagccacaccaaagcatcccctgtggatagttggaagaaccagacatttcagaacgagagccggacgagtagtacatttccctccgtttacaccatcacatccaacgacattagcgtcaacacagtggatgaagagaacaccgtgatggtagcaagcgctagtgtgtctcagtcccagctgcctggaaccgctaacagtgttccagagtgtatatctttgacatctcttgaggaccctgtgatcctatccaagatccggcagaacctgaaagaaaagcacgctcggcatattgcggacctaagagcatactatgagagcgaaatcaactcactcaagcagaaattagaggccaaagaaatttcaggggtggaggactggaaaataaccaaccagattttggtcgatcgatgcggccagctggattcagcgctgcacgaagccacaagcagagtccgaaccttagaaaataaaaacaacctactggaaatcgaggtcaatgatctaagggaacgattcagcgcggcttcatctgccagtaagatcttacaggagaggatagaggagatgaggaccagttcaaaagaaaaggacaacaccataattcgtcttaagtcaaggctacaggacttagaagaggcgtttgagaacgcctataagttgagcgacgacaaagaggcacagctgaaacaggaaaacaagatgttccaggacctcttaggcgaatatgaaagtctggggaaggaacacaggcgcgtgaaggacgccttaaacactactgaaaacaaactgctggatgcatatactcagattagtgacctgaaaagaatgatcagcaagctagaagcacaggttaagcaggttgagcatgagaacatgctgtctctgcgtcataattcacggatccatgtccggccctctagggccaacactttggctacaagcgacgttagcaggcggaaatggctcatccccggagctgaatactctattttcacagggcagccgctggacactcaggactctaacgtggacaaccagcttgaggagacctgctcactgggtcatcggtcgcctctcgaaaaagatagctcccctggttcaagtagcaccagccttctgatcaaaaaacaacgcgagactagcgacactccaatcatgcgagccttgaaggagctcgatgagggtaagattttcaagaattgggggactcaaacagagaaagaggataccagtaacatcaatccacgccaaacggagacctccgtgaacgcctccaggagtccagagaagtgcgctcaacaaagacagaaaagactaaattccgcatcccaacgctcgtccagcttaccacccagcaataggaagagcagcactcccaccaagcgcgagatcatgcttaccccagtgaccgtcgcctatagccccaaacgcagccccaaagaaaacctctcccctgggttctctcacctcctcagcaaaaatgagtccagtcccattaggttcgacatccttttagatgaccttgataccgtgcctgtctcaaccctgcagcgcacaaatcctcggaagcagctccagttcctacctctggatgattcggaggagaaaacttacagtgaaaaagctaccgacaaccacgtgaaccactcttcttgccctgagcccgttcccaacggggtgaagaaggtgtctgtcagaaccgcctgggaaaaaaataaatccgtctcctatgaacagtgcaagccagtaagcgtcaccccccaaggcaatgattttgaatacacagcaaaaatccgcacattggcagaaacagaacggttcttcgacgagttgaccaaagaaaaggatcaaattgaggctgccctgtcaaggatgccaagccccggaggacgaattaccctccagacccgtctaaaccaagaagcccttgaggaccggttagagcggattaatagagaactgggatcagtgcggatgacgctcaagaaattccacgttttgagaactagcgctaatctgtag

SEQ ID NO: 213168 - DNA, 3096 bp, Artificial Sequence
  derived and/or modified sequence
atgggcttcttcagcctgagcagcgagagaaatgaatctgtcatccactacccagagagcacagagcctgagatccagcaggagatgagcaccagccagcctgactgcaatgtggacagctgcagcgtgagcagcggctacggcaccttctgcatcagcgagctgaacctgtacaagagcaaggaccccaaggagttcatggagcacattgatgtgcccaagggccagtatgtggccccagctgtgcctgctgagagcctggtggatggagtgaagaatgaaaacttctacatccagaccccagaagaatgtcatgtgtccctgaaggaggatgtgtccatcagccctggagaatttgagcacaacttcctgggggagaacaaggtgtctgaggtgtacagcggcaagaccaacagcaatgccatcacctcctgggcccagaagctgaagcagaaccagcccaagagggcccacgtggaggatggcggcagccgcagcaagcagggcaatgagcagagcaagaagacccccatcgagaagagtgactttgctgctgccacccacccccgggccttctacctgagcaagccagatgagaccccaaatgcctggatgtctgacagcggcaccggcctgacctactggaagctggaggagaaggacatgcaccacagcctgcctgagaccctggagaagaccttcatcagcctgagcagcacagatgtgagccccaaccagagcaacaccagcaatgagatgaagctgcccagcctgaaggacatctactacaagaagcagcgggagaacaagcagctgcctgagaggaacctgaccagcgccagcaaccccaaccaccccccagaggtgctgaccctggaccccaccctgcacatgaagcccaagcagcagatcagcggcatccagccccacggcctgcccaatgccctggatgaccgcatctccttctccccagacagcgtgctggagcccagcatgagcagccccagcgacatcgacagcttcagccaggccagcaatgtgaccagccagctgcccggcttccccaagtaccccagccacaccaaggccagccctgtggacagctggaagaaccagaccttccagaatgaaagcaggaccagcagcaccttccccagcgtgtacaccatcaccagcaatgacatctctgtgaacacagtggatgaagaaaatacagtgatggtggccagcgcctctgtgtcccagagccagctgcctggaacagccaacagcgtgcctgagtgcatcagcctgaccagcctggaggaccctgtgatcctgagcaagatccggcagaacctgaaggagaagcacgcccggcacatcgctgacctgcgggcctactatgagagcgagatcaacagcctgaagcagaagctggaggccaaggagatctctggagtggaggactggaagatcaccaaccagatcctggtggacagatgtggccagctggacagcgccctgcacgaggccaccagccgggtgaggaccctggagaacaagaacaacctgctggagattgaggtgaatgacctgcgggagcgcttctctgctgccagcagcgccagcaagatcctgcaggagcgcatcgaggagatgaggaccagcagcaaggagaaggacaacaccatcatccggctgaagagccggctgcaggacctggaggaggcctttgaaaatgcctacaagctgagtgatgacaaggaggcccagctgaagcaggagaacaagatgttccaggacctgctgggggagtatgagagcctgggcaaggagcaccggcgggtgaaggatgccctgaacaccacagagaacaagctgctggatgcctacacccagatcagtgacctgaagaggatgatcagcaagctggaggcccaggtgaagcaggtggagcacgagaacatgctgagcctgcggcacaacagccgcatccacgtgcggcccagccgggccaacaccctggccaccagtgatgtgtccaggaggaagtggctgatccctggagctgagtacagcatcttcaccggccagcccctggacacccaggacagcaatgtggacaaccagctggaggagacctgcagcctgggccacaggagccccctggagaaggacagcagccctggcagcagcagcaccagcctgctgatcaagaagcagcgggagaccagtgacacccccatcatgagggccctgaaggagctggatgagggcaagatcttcaagaactggggcacccagacagagaaggaggacaccagcaacatcaacccccggcagacagagacctctgtgaatgccagccgcagccctgagaagtgtgcccagcagaggcagaagaggctgaacagcgccagccagaggagcagcagcctgccccccagcaacaggaagagcagcacccccaccaagcgggagatcatgctgacccctgtgacagtggcctacagccccaagaggagccccaaggagaacctgagccctggcttcagccacctgctgagcaagaatgaaagcagccccatccgctttgacatcctgctggatgacctggacacagtgcctgtgtccaccctgcagaggaccaaccccaggaagcagctgcagttcctgcccctggatgattctgaggagaagacctacagcgagaaggccacagacaaccacgtgaaccacagcagctgcccagagcctgtgcccaacggggtgaagaaggtgtctgtgaggacagcctgggagaagaacaagtctgtgtcctatgagcagtgcaagcctgtgtctgtgaccccccagggcaatgactttgagtacacagccaagatccgcaccctggccgagacagagcgcttctttgatgagctgaccaaggagaaggaccagatcgaggccgccctgagcaggatgcccagccctgggggccgcatcaccctgcagacccggctgaaccaggaggccctggaggaccggctggagcgcatcaaccgggagctgggctctgtgaggatgaccctgaagaagttccacgtgctgcggaccagcgccaacctgtag

SEQ ID NO: 213169 - DNA, 5799 bp, Artificial Sequence
  derived and/or modified sequence
cagcatatacaggaggagataaaaaatttagtcaaattacagactagtagtgcttccttagcttcctgtgaaggaaattcttcaaacaaacaagtatcttcggaaagtcaaatgggttttttttctctaagcagtgagagaaatgaatctgttatccattatcctgaatccacagaacctgaaatacagcaagaaatgtccacgtcacaaccagactgcaatgtggatagttgctcagtaagcagtggatatggcaccttttgtatctcagaattaaatctgtacaaatctaaagaccctaaggagttcatggagcacatagatgttcccaaaggacagtatgtagcacctgcggtgccggctgagtcacttgtagatggtgtgaaaaatgagaatttttatatacagactcctgaagagtgtcatgtgtctttaaaggaagatgtatccatttctcctggtgaatttgaacataattttcttggtgaaaataaggtttctgaagtatacagtgggaaaacaaatagtaatgctataacatcatgggcacaaaaactgaagcagaaccaaccaaagagagcacatgtagaagatggaggttcaagatctaaacaaggaaatgagcaaagtaagaagacaccaattgagaaatctgattttgctgctgctacacatcctcgtgctttttacctcagtaaaccagatgaaactccaaatgcttggatgtctgattcaggaacaggattgacttactggaaactagaggaaaaggatatgcaccactctttgcctgaaactttagagaagacgttcatatcattgtcttccacagatgtgtcaccaaaccagtctaatactagtaatgagatgaagctaccgtcactgaaggatatttattataaaaaacaaagggaaaacaagcagttacctgagaggaatctcacttctgcttccaacccaaatcatccaccagaggtcctgactctagatcctacgttacacatgaagccaaagcagcagatttcagggattcaacctcacggccttccgaatgcccttgatgacagaatatccttttccccggactctgttctagagcctagtatgtctagtccctctgacatagactcattttcacaagcaagtaatgtcacttctcagttacctggatttccaaaatatccctcacacacaaaagcttctccggtggactcttggaaaaatcagacattccaaaacgaaagtaggaccagttccacgtttccgtcagtatataccattactagtaatgatatctcggtcaacactgtagatgaagaaaacactgtcatggttgcttcggcctcagtcagtcagtcccagcttccaggtacagccaacagtgtcccagaatgcatttcattgacttccttggaagatcctgtgatattgtctaagattaggcagaatctgaaggaaaagcatgctcgacacatagcagatcttcgagcttattatgaatcagaaataaatagtttgaaacagaagctggaggcaaaagaaatctctggagttgaagattggaagataaccaatcaaattcttgtagacagatgtggccaattagatagtgctttgcatgaagctactagtcgcgtgagaacacttgaaaataagaataacttactggaaattgaagtgaatgatttgagagaacgcttcagtgcagccagcagtgcttccaaaattttgcaggaacgaattgaagaaatgagaacaagcagtaaagaaaaagacaataccatcattcgactaaaatctagactgcaagatttagaagaagcatttgagaatgcttacaaactctcagatgataaagaagctcaactaaaacaagagaacaaaatgtttcaagatcttttaggagagtatgagtcccttggaaaagaacacaggagagtaaaggatgcattaaatacaactgagaacaaattgcttgatgcatatactcagatttctgatttgaaaagaatgatttcaaaacttgaagctcaggtcaagcaagtagaacatgaaaatatgttaagccttcgtcataattctagaattcacgtgagaccctcgcgtgccaacacactagcaacttcagacgtcagcaggcggaaatggctgattccaggtgcagagtattccatctttactggccagcctctggacacccaggacagtaacgtggataaccagctggaggaaacctgtagcctagggcaccgttcacctctggaaaaggattcttcacctggaagttcatcaacaagcttgttgataaaaaagcaaagagagacttcagacacgccgatcatgagagctttaaaagaacttgatgagggaaaaatatttaaaaattgggggacacagacagagaaagaggacacctcaaatataaatcctcggcaaactgaaacttcagttaatgcaagtcgttctccagaaaagtgtgcccaacagagacaaaagagacttaattcggcctcacagagatcatcatctttaccaccttcaaatcgtaaatcaagtactccaacaaaaagagagattatgctaacaccagtgactgtggcttatagtccaaagcgatcccctaaagaaaacttgtccccaggatttagtcatctgcttagcaaaaatgagagcagtccaattcgatttgatatacttttggatgatttagatactgttcctgtgtctacattacaacgtaccaatccaagaaagcaactccagtttcttcctctagatgactcggaagaaaaaacttattctgagaaagccaccgataaccatgttaatcatagctcttgccctgaaccggtgccaaatggagtgaagaaagtatctgtgagaacagcctgggagaagaataaatcagttagctacgaacagtgtaagccggtttcagtcactccacaggggaatgattttgaatatacagcaaaaattcggaccctagctgaaacagaacgattttttgatgaacttacaaaagaaaaggaccagattgaggcagcactaagcaggatgccttctcctggaggacgaatcactttacagacaagattaaatcaggaagccttggaagatcgtttggaaaggattaatcgagaactgggttcagttcgcatgacgctaaagaaattccatgttttgcgcacctctgcaaatctttgagatttgtagccattaaattttgagacatttttgtttgcactaatgtataattatgcagtcagaaaaggcaaactattttgtactgtttataagccttcaaacagtagttttacaatcatgctattcttacacttgctattttatacttcaaatggccacatattttcaagatatttttgttatgctcaggaatctcttgtatattttactatttaaaaagcattatttttaaatagtatctgtctccaatttatatcaagaataaggaaatataaacagaggaagcagcttgtttctaaacaaatagtgttatccttttacaattaactgcacatcaattttatagacttgttctacattgtaaatacaattcagtttttaaaaaataaagcttaatagcttccataatgatagactagtacatgctgaatacataaacaattacagtgtaccttggatttcagttgtgttgaggtttttaaaaaatgataatgcaattcgtatttgaaacgtgtcttagagtgaatatcagaatagtaataatggactcttggaaagctttgaaaactacatgaatataactcattttctttaaactttattgtctgtaagagaaaaaagagagattgtaattctctaattttatcttttctaaaaaagttaaacaattggagagccctctctggagggctctcagagtagctctctgcccattgttctgaattaacttgtgtcccaccctggacaataaatggacagataaaccctttgaaatacaagccaccaccccgtgagggattaagagggcagcctggttttcttagtgtgcatggcttcagctgtccgtcatagttgtcatctggatatgttcacccctttccactccttcaccctggccaaaaggaaaatatttccactgtaggtgctgtaagaacactagactttagatcatcacaatctactgtatttgttaatggacagggagtgtgtccggatggagcctggtgccttcccctcggccttgcagagggctccagcccactgcctctgtggtagccgctggctctcagaagtagcacgtgggcaggagtctctcctctgatccaggagcattggcaggtttgtgttgggactgctggttaagttggagctgtgtaactacttagtttttggtagccaatcagaacgcagtgccccacatattccagctcggtacatgttgataaacagactcatccaaactttcaaaatggattcgtactaaacatgctcaggttttaaattttggtttgcttttgagcttttcctctttatgtggctcttaataataagtagttagaatgaaccaagccatcccagttattccaagcaggctctcaaatgacctttgagcacccttcacctggctggtccccaggccaggggtccacagccctgctcccttctcagcaaggagggtggcctgtctgacagtgcagttgaacctttgctccctactctgcaacttttgaagacttcaggctaatcaaaattacttataattagaatcaagtgcctttattcttgttttttatttttattttattttatttatttatttttttagatggagttttgcccttgttgcccaggctggagtgcaatggcatgatctcagctcactgcaacctctgcctcccgggttcaagcgattctcctgcctcagcctgctgggtagctgggattacaggcatctgccaccacgcccggctaattttgtgtgtgtgtatatgtctatgtgtgtgtgtgtatgtatatatcttttttttttttttagtagagatggtgtttcaccatattggccaggctggtctcaaactcctgaactcatgtgatccgcctgccttggcccctcaaagtgctgggattacaggcatgagccaccacacccggcctattcttggtattctttattcttggttttctagcctttagaaaaaaaaaatctagtcttggtaaagaaaatgttcattttaatcaagctccagtacagcttgtgtcaagacctagtaagaccacctttaatgtgttcctggatatgacattaaaaactaacttgaaaattgttaggatatttccttgttccctacttttattgtaaaatctactacattcttaagaattaaaaaatgccatttcagaagagatgatagttttatcttgccaaggaattatcttcttagtagcctatattggcttattccaaaaaaggcgttaacctccatcaaaacatcttctgcgcctctctctcagcatatgctttgatatttgaagtgtgtaatagattggagctatcagtcacttatttctaaaaaatgtattcttttttcttcatagctgtgaagagggataccaaggaaagttctttctgctgtctttctcttcggtaatgcttatcttatgaacactcaactgaaaaaacactccacctaaaagcaggaaagatggcaattctaaatagcagctattatccccgggtataaactatttttgttgttggcttggggctttgctgcaggtattaatagtttaaaaagaaaaaaaaaaaaaaaa

SEQ ID NO: 213170 - DNA, 3096 bp, Artificial Sequence
  derived and/or modified sequence
atgggcttcttcagcctgagcagcgagcggaacgagagcgtgatccactatccagagtccaccgagccagaaatacagcaggagatgtccaccagtcaaccggactgcaatgtagacagctgttcggtctcttctggctatggcacattctgcatcagcgagctgaatctttataaatctaaagaccctaaggagtttatggagcacatcgatgtgccaaaggggcagtatgtcgccccagccgtgccagcagagagcctggtcgatggagttaaaaacgagaatttttacatccagactcctgaagaatgccacgtatcgctgaaagaagacgtgagcatcagtcctggtgagttcgagcacaatttcctgggagagaacaaggtctccgaggtttactcgggaaaaacaaacagcaacgccataaccagctgggcccagaagttaaaacagaaccaaccaaaaagagcccatgtagaagacggcggcagtagatccaagcagggcaatgagcagagcaaaaagacccctattgagaagtcggactttgcggcggcgacacatcccagagctttttacctgtcgaagcccgacgagaccccaaatgcttggatgtcagacagcgggactgggctgacttattggaagcttgaggaaaaagacatgcaccacagcctgcccgagactctggagaagacttttatctccctgtcatcgacagatgtgtccccaaatcagagtaacacaagtaatgagatgaagctccccagcctgaaggatatctactataagaaacagcgtgagaacaaacagttgcccgaacgcaatctcacatctgccagcaacccaaaccacccgccggaggtactgactctggacccaactctgcacatgaaaccgaaacaacaaatctccggcattcagcctcacggactgcctaatgcccttgacgatcgaattagcttttcaccagattccgtgttggaaccctcaatgagctccccctccgatatcgacagtttctcacaggcatctaatgtgacatctcagttgcctggtttcccaaaatacccttcgcacaccaaggcctccccagtcgatagctggaaaaaccaaaccttccagaatgaaagtcgaacgagctccaccttccctagcgtgtacactataacttccaatgacatttctgttaacactgtcgatgaggagaacacggtcatggtggccagcgccagtgtttctcagagccaacttcctgggacagctaacagcgtcccagaatgcatctcactgacctccctggaagatccagtgatacttagtaagatcagacagaacttgaaggagaagcacgcaaggcatattgctgatctcagggcttattatgaatccgaaatcaactctttgaagcagaagctagaggcaaaagagatatcaggggtggaagattggaaaattaccaatcagatcctcgtggatagatgtggccagctggactctgctctgcacgaagcaaccagtcgcgtgcgtacactcgagaataagaacaatctgctggagatagaagttaatgaccttagagagagatttagcgctgcctctagtgctagcaaaattctccaggagcgaattgaagaaatgagaacgagctccaaggaaaaggacaatacgatcatacggctcaaaagtcgtctgcaggacctcgaagaggcttttgagaacgcctataagctcagtgacgataaggaggcccaactgaaacaggagaacaagatgttccaagacctccttggggaatacgagagcctcggaaaggaacaccggcgggttaaggatgcgttaaacacaactgaaaataagctgctggatgcttacacccaaatcagcgaccttaaacgtatgataagcaaacttgaggcgcaggttaagcaggttgaacacgaaaacatgctaagtttacggcacaacagtcgcattcatgtaaggcccagcagagccaacacccttgccaccagcgacgttagtagacggaagtggttgatcccaggcgcggagtactcaattttcactgggcagccactcgacacccaggattccaatgtcgataaccagttggaggaaacttgtagtctgggacaccggagccccctggagaaggactccagtcccggtagtagtagtactagcctgctgatcaagaaacagcgcgagacaagtgacaccccaattatgcgggcacttaaagaacttgacgaggggaaaatcttcaagaattggggcactcagactgaaaaagaggataccagcaatataaacccccgtcaaaccgagacgagcgtcaacgcaagccgatctcccgagaagtgcgcccagcagcgacagaaacggctgaactccgcgtcccagaggtcctcttctctgccgccctctaaccggaaatcgagcacccctaccaaacgggagataatgctgacacccgttacagtcgcatacagccctaagcgctcacctaaagagaacttatctcctgggttcagtcatctgctgtctaaaaacgagtcatcccctatcagatttgatatcctgctagacgatctcgacaccgtgccagtttcaaccctgcagcggaccaatcctagaaagcagttgcagtttctgccgctggacgacagcgaagagaagacttactcagaaaaggctactgacaaccacgtcaatcactcttcctgtcccgaaccagtcccaaatggagtcaaaaaggttagcgttcggactgcttgggaaaaaaacaagtctgtctcatacgaacagtgtaagcccgtgtcagttactcctcagggaaatgactttgagtatactgctaaaattaggactttggctgagactgaacgattctttgacgaactcacaaaggaaaaggatcagatcgaggctgctttgtcgaggatgccgtccccaggcgggagaatcacattacagacgcgattgaatcaggaggcgttggaggaccgcttagagcggatcaaccgcgagctcgggtctgtacggatgactttaaaaaagttccatgttctgagaacatccgccaacctgtag

SEQ ID NO: 213171 - DNA, 3096 bp, Artificial Sequence
  derived and/or modified sequence
atgggcttctttagcctctcttcagagcgcaacgaatctgtgattcattatcctgaatctaccgaacctgagatccagcaggaaatgtcgacctcgcagcctgattgtaatgtagacagctgtagcgtttcctccggttatggcaccttttgcataagcgaactgaatctctacaagtcgaaggaccccaaggagtttatggaacatatcgatgtgccgaaagggcagtatgtggccccagccgtacccgctgagtcattagtcgatggggttaaaaatgaaaacttctacatccaaacgcctgaggagtgccatgtgtctctgaaagaagacgtgtctatctccccaggtgagttcgaacacaatttcctaggcgaaaacaaagtctctgaggtctattcgggaaaaacgaactctaacgcaatcactagctgggctcaaaagctcaaacagaatcagcctaagcgcgctcacgtggaagatggaggaagtaggtccaagcaaggaaatgagcaaagcaagaagactcccattgaaaagagtgattttgccgcagctacacatccacgagcgttttatctgtctaaacccgatgagactccaaatgcctggatgagtgactcagggaccggactgacgtattggaagctggaagaaaaggatatgcaccactctttgcctgaaacgctggagaagaccttcattagcctctcctcaacggatgtgagcccaaaccagagtaataccagtaatgaaatgaagctcccaagtttgaaagacatctactacaaaaaacagcgtgaaaataagcagttaccagaacgaaatctgacctcagcatccaaccccaaccacccacccgaggtcttaaccttagacccaacactgcatatgaagccaaagcagcagatctccggaatacaaccacatggcctgcccaatgctctggacgatcggataagcttctctccagacagtgtccttgagccttccatgtcctcgccatccgatattgattccttctctcaagccagtaacgtcacctcccagcttcctggcttccccaagtaccctagccacacaaaagccagccccgttgactcttggaagaatcaaacatttcagaacgaatctagaaccagctcaaccttcccatctgtctacactattaccagtaatgacatctctgtgaatacagtggatgaggaaaatactgtcatggtcgcaagcgcttcggtgagtcagtctcagcttcccggaactgccaacagtgtgccggaatgcatcagtctaacctccttagaggaccccgtaatcctaagcaaaataagacaaaatctcaaggaaaagcacgctagacatatcgccgacctccgcgcttactatgagtccgagattaattcgctcaagcagaaactagaagccaaggaaatcagtggagtggaagattggaaaattactaatcaaattttggttgatcgatgtggccaactcgattccgccctgcatgaagccacctcccgcgttcgtactctggaaaacaagaataacctgctggagatcgaggttaacgacctacgcgaacggttcagcgccgctagtagtgccagtaaaatcctgcaggagcgcattgaagaaatgcgaaccagtagtaaggaaaaggataatactattatccggttgaagtctagactgcaagatctagaggaggcttttgaaaacgcctataagctcagcgacgataaagaggctcagttgaagcaggagaacaagatgtttcaagaccttttaggcgagtacgagagcctgggcaaggaacatagacgagttaaagatgctcttaataccaccgagaacaaactgctggacgcatacacacagatttccgatctgaagaggatgatttcaaagttagaggcacaggtcaagcaggtggaacacgagaacatgttatcactgcgccacaattcccggattcatgtgagaccctcacgtgcgaacaccctcgccacttctgacgtttctcgccgaaaatggcttatccccggagctgagtactctattttcacaggccagccccttgacacccaggactcaaacgtggacaaccagctggaggaaacctgttcacttggacaccggtccccccttgagaaagatagcagccccggatcaagcagtaccagtttactgatcaagaagcagcgcgagacatctgacacccctattatgagggcgctcaaagaattggacgaaggaaagatttttaagaactggggaactcagactgagaaggaagacacctcaaacatcaacccaagacaaactgagacatccgtaaacgcatctcgatctcctgaaaaatgtgcccagcagcggcagaagagactcaatagtgcttcacagcgtagctccagccttccgccaagcaaccgaaaatcttccacccccaccaaaagagaaatcatgctgacacctgtcacggtcgcctattcacccaaacggagtcctaaggagaacttaagccccggattctcccacctgctgtccaaaaacgaatcatctccaatccgcttcgacattctcctagatgacttagacactgtgccggtgagtactttgcaaagaaccaaccctaggaaacagctccagtttctgccattggatgactcagaggaaaagacctactcagaaaaggctactgacaatcatgtgaaccacagctcgtgccctgaaccagtgcctaatggcgttaagaaagtcagtgtcagaacggcctgggagaagaacaagtcagtatcttatgaacaatgcaaacccgtctcggttacaccacaagggaacgactttgagtacacagcaaaaattcgaaccctggcagagacagagcgttttttcgacgagttgactaaggagaaggatcagattgaagccgcactgtctagaatgccctcccccggtggcaggatcactcttcagacgaggctgaatcaagaggccctcgaggatagacttgagcgtataaaccgggagctggggagcgtgcggatgaccttgaaaaaattccacgttcttcgtacatctgccaatctgtag

SEQ ID NO: 213172 - DNA, 3096 bp, Artificial Sequence
  derived and/or modified sequence
atgggcttcttcagcctgagcagcgagagaaacgagagcgtgatccactaccccgagagcaccgagcccgagatccagcaggagatgagcaccagccagcccgactgcaacgtggacagctgcagcgtgagcagcggctacggcaccttctgcatcagcgagctgaacctgtacaagagcaaggaccccaaggagttcatggagcacatcgacgtgcccaagggccagtacgtggcccccgccgtgcccgccgagagcctggtggacggcgtgaagaacgagaacttctacatccagacccccgaggagtgccacgtgagcctgaaggaggacgtgagcatcagccccggcgagttcgagcacaacttcctgggcgagaacaaggtgagcgaggtgtacagcggcaagaccaacagcaacgccatcaccagctgggcccagaagctgaagcagaaccagcccaagagagcccacgtggaggacggcggcagcagaagcaagcagggcaacgagcagagcaagaagacccccatcgagaagagcgacttcgccgccgccacccaccccagagccttctacctgagcaagcccgacgagacccccaacgcctggatgagcgacagcggcaccggcctgacctactggaagctggaggagaaggacatgcaccacagcctgcccgagaccctggagaagaccttcatcagcctgagcagcaccgacgtgagccccaaccagagcaacaccagcaacgagatgaagctgcccagcctgaaggacatctactacaagaagcagagagagaacaagcagctgcccgagagaaacctgaccagcgccagcaaccccaaccacccccccgaggtgctgaccctggaccccaccctgcacatgaagcccaagcagcagatcagcggcatccagccccacggcctgcccaacgccctggacgacagaatcagcttcagccccgacagcgtgctggagcccagcatgagcagccccagcgacatcgacagcttcagccaggccagcaacgtgaccagccagctgcccggcttccccaagtaccccagccacaccaaggccagccccgtggacagctggaagaaccagaccttccagaacgagagcagaaccagcagcaccttccccagcgtgtacaccatcaccagcaacgacatcagcgtgaacaccgtggacgaggagaacaccgtgatggtggccagcgccagcgtgagccagagccagctgcccggcaccgccaacagcgtgcccgagtgcatcagcctgaccagcctggaggaccccgtgatcctgagcaagatcagacagaacctgaaggagaagcacgccagacacatcgccgacctgagagcctactacgagagcgagatcaacagcctgaagcagaagctggaggccaaggagatcagcggcgtggaggactggaagatcaccaaccagatcctggtggacagatgcggccagctggacagcgccctgcacgaggccaccagcagagtgagaaccctggagaacaagaacaacctgctggagatcgaggtgaacgacctgagagagagattcagcgccgccagcagcgccagcaagatcctgcaggagagaatcgaggagatgagaaccagcagcaaggagaaggacaacaccatcatcagactgaagagcagactgcaggacctggaggaggccttcgagaacgcctacaagctgagcgacgacaaggaggcccagctgaagcaggagaacaagatgttccaggacctgctgggcgagtacgagagcctgggcaaggagcacagaagagtgaaggacgccctgaacaccaccgagaacaagctgctggacgcctacacccagatcagcgacctgaagagaatgatcagcaagctggaggcccaggtgaagcaggtggagcacgagaacatgctgagcctgagacacaacagcagaatccacgtgagacccagcagagccaacaccctggccaccagcgacgtgagcagaagaaagtggctgatccccggcgccgagtacagcatcttcaccggccagcccctggacacccaggacagcaacgtggacaaccagctggaggagacctgcagcctgggccacagaagccccctggagaaggacagcagccccggcagcagcagcaccagcctgctgatcaagaagcagagagagaccagcgacacccccatcatgagagccctgaaggagctggacgagggcaagatcttcaagaactggggcacccagaccgagaaggaggacaccagcaacatcaaccccagacagaccgagaccagcgtgaacgccagcagaagccccgagaagtgcgcccagcagagacagaagagactgaacagcgccagccagagaagcagcagcctgccccccagcaacagaaagagcagcacccccaccaagagagagatcatgctgacccccgtgaccgtggcctacagccccaagagaagccccaaggagaacctgagccccggcttcagccacctgctgagcaagaacgagagcagccccatcagattcgacatcctgctggacgacctggacaccgtgcccgtgagcaccctgcagagaaccaaccccagaaagcagctgcagttcctgcccctggacgacagcgaggagaagacctacagcgagaaggccaccgacaaccacgtgaaccacagcagctgccccgagcccgtgcccaacggcgtgaagaaggtgagcgtgagaaccgcctgggagaagaacaagagcgtgagctacgagcagtgcaagcccgtgagcgtgaccccccagggcaacgacttcgagtacaccgccaagatcagaaccctggccgagaccgagagattcttcgacgagctgaccaaggagaaggaccagatcgaggccgccctgagcagaatgcccagccccggcggcagaatcaccctgcagaccagactgaaccaggaggccctggaggacagactggagagaatcaacagagagctgggcagcgtgagaatgaccctgaagaagttccacgtgctgagaaccagcgccaacctgtag

SEQ ID NO: 213173 - protein, 409 aa, Artificial Sequence
  derived and/or modified sequence
MEEGGSTGSAGSDSSTSGSGGAQQRELERMAEVLVTGEQLRLRLHEEKVIKDRRHHLKTYPNCFVAKELIDWLIEHKEASDRETAIKLMQKLADRGIIHHVCDEHKEFKDVKLFYRFRKDDGTFPLDNEVKAFMRGQRLYEKLMSPENTLLQPREEEGVKYERTFMASEFLDWLVQEGEATTRKEAEQLCHRLMEHGIIQHVSNKHPFVDSNLLYQFRMNFRRRRRLMELLNEKSPSSQETHDSPFCLRKQSHDNRKSTSFMSVSPSKEIKIVSAVRRSSMSSCGSSGYFSSSPTLSSSPPVLCNPKSVLKRPVTSEELLTPGAPYARKTFTIVGDAVGWGFVVRGSKPCHIQAVDPSGPAAAAGMKVCQFVVSVNGLNVLHVDYRTVSNLILTGPRTIVMEVMEELEC

SEQ ID NO: 213174 - DNA, 1230 bp, Artificial Sequence
  derived and/or modified sequence
atggaagaggggggcagtactgggtctgcgggaagcgactcttctacttcagggtccggtggtgcccagcagcgcgaactggaacgaatggctgaggtcttggtgaccggggaacaactgcgcctgaggctgcatgaggagaaggtgatcaaggacagacgccaccacctgaaaacgtatccgaactgctttgtggcgaaggagctgatagactggctcattgaacataaggaggcctcggatagagaaaccgccatcaagctcatgcagaagcttgctgataggggcattattcaccatgtgtgcgatgagcacaaggagttcaaggatgtcaaactcttctatcgctttagaaaagatgacggcaccttccctctggacaacgaggtcaaggcattcatgagaggccagaggttgtacgagaagctcatgtctcccgaaaacaccttgctgcagccacgggaagaggagggggtcaagtacgagcgcactttcatggctagcgaatttctggactggctggtacaggagggggaggctacaactaggaaggaagcagagcaattatgtcacaggctcatggaacatggaatcatccagcacgtgagcaacaagcacccattcgtagactccaaccttttatatcagtttcggatgaattttagaaggcgtcgcagactcatggaactccttaacgagaagtcccctagcagccaggagacacacgatagcccattttgcctccgaaagcagagccatgacaacagaaaaagcactagtttcatgtccgtgtcgccctccaaagaaatcaaaatagtgtctgctgtccgcagatctagcatgtcatcctgcgggtcttccggctacttcagcagttcccccaccctttctagcagcccacccgtgctatgtaatcctaagagcgttctaaagagacccgtaacaagtgaagaacttctgacacctggagctccctacgctcggaaaacatttactattgtaggagatgctgtagggtggggatttgtagtacgaggttctaagccttgtcatattcaggctgtagacccctccgggccagctgccgctgctgggatgaaggtctgccagtttgtagtgagtgtcaacgggcttaatgtccttcacgtggactatcggacggtaagcaacctcatccttaccgggccaagaaccatcgtaatggaagtgatggaagaattagagtgttag

SEQ ID NO: 213175 - DNA, 1230 bp, Artificial Sequence
  derived and/or modified sequence
atggaggagggcggcagcactggatctgctggcagtgacagcagcaccagcggcagcggcggggcccagcagcgggagctggagaggatggccgaggtgctggtgactggagagcagctgcggctgcggctgcacgaggagaaggtgatcaaggacagaagacaccacctgaagacctaccccaactgctttgtggccaaggagctgattgactggctgattgagcacaaggaggccagtgaccgggagacagccatcaagctgatgcagaagctggccgaccggggcatcatccaccacgtgtgtgatgagcacaaggagttcaaggatgtgaagctgttctaccgcttcaggaaggatgatggcaccttccccctggacaatgaggtgaaggccttcatgaggggccagaggctgtatgagaagctgatgagccctgagaacaccctgctgcagccccgggaggaggagggcgtgaagtatgaaagaaccttcatggccagcgagttcctggactggctggtgcaggagggggaggccaccaccaggaaggaggccgagcagctgtgccaccggctgatggagcacggcatcatccagcacgtgagcaacaagcacccctttgtggacagcaacctgctgtaccagttcaggatgaacttcagaagaagaagaaggctgatggagctgctgaatgagaagagccccagcagccaggagacccatgacagccccttctgcctgaggaagcagagccatgacaacaggaagagcaccagcttcatgtctgtgagccccagcaaggagatcaagatcgtgtctgctgtgagaagaagctccatgagcagctgtggcagcagcggctacttcagcagcagccccaccctgagcagcagcccccctgtgctgtgcaaccccaagtctgtgctgaagaggcctgtgaccagcgaggagctgctgacccctggggccccctatgccaggaagaccttcaccatcgtgggagatgctgtgggctggggctttgtggtgcggggcagcaagccctgccacatccaggccgtggaccccagcggccctgctgctgctgctggcatgaaggtgtgccagtttgtggtgtctgtgaatggcctgaatgtgctgcacgtggactacagaacagtgagcaacctgatcctgaccggccccaggaccatcgtgatggaggtgatggaggagctggagtgctag

SEQ ID NO: 213176 - DNA, 1230 bp, Artificial Sequence
  derived and/or modified sequence
atggaggagggcggcagcaccggcagcgccggcagcgacagcagcacatctggttctgggggagcgcagcagcgggaactcgaaaggatggctgaagtgctggttacaggcgaacagttgaggctgagactccatgaagagaaggttataaaggatcggagacatcatctgaagacttatccgaattgctttgttgctaaggaacttatcgattggctgatcgagcataaagaggcctccgaccgggagaccgcgattaaacttatgcagaagcttgctgaccggggcattatacaccacgtgtgtgatgagcataaagagtttaaagacgtgaagctattttataggtttagaaaagatgatggtacattcccattggataacgaagtgaaggcatttatgcggggacagcgattatatgagaaacttatgtcccctgaaaataccctcctgcagcccagagaggaggaaggcgttaaatatgagcgcaccttcatggccagcgagttcctggattggctcgtgcaggagggcgaggccaccaccagaaaggaggcagagcagctttgccacaggctcatggaacacggcatcatccagcacgtgtccaacaagcatccgttcgttgacagtaatctcctttaccagtttcgcatgaattttagacgtaggcgccggctgatggagttgctcaacgagaagagccctagcagtcaggaaacccacgactctcccttttgcctgcgcaagcagtctcacgacaaccggaagtccactagttttatgtcggtttcccctagcaaggagattaagatcgtgtctgcggtgcgcagatcttcaatgtcatcttgcggcagtagtggatacttctcttcctccccaacgctatcaagctctccccccgttctgtgtaaccccaaatcagtgttaaagagacccgttacatccgaagagttgttgactcctggggctccttacgcacgcaagacattcacaatcgtgggggacgcagtcgggtgggggttcgtcgtgaggggaagtaaaccatgccacatccaagctgtggacccatctggaccggctgccgccgcaggcatgaaagtatgccagttcgtggtgagcgttaacgggcttaacgtgctgcatgtcgactacaggacagtgtcaaatctgattctgaccggtccacggaccatagtgatggaagtgatggaggaactggaatgctag

SEQ ID NO: 213177 - DNA, 1230 bp, Artificial Sequence
  derived and/or modified sequence
atggaagagggtggatctacgggatccgccggatcagattcttccacttctgggtctgggggtgctcaacagcgtgagctcgaaagaatggctgaggtcttggtgaccggtgaacagctgaggctgcgcctgcacgaggagaaggttataaaggatcggcgacaccacctcaaaacatatccaaactgcttcgtagccaaagagcttattgactggttaatcgagcataaagaggcaagcgatcgggagaccgctattaagttgatgcagaagcttgcagatagagggattattcatcacgtttgtgatgagcataaagaatttaaggacgtcaagctgttttaccgcttcagaaaagacgatggaaccttcccactggataatgaggtgaaggccttcatgagggggcagagactgtacgagaaactcatgtccccagaaaatacgctgctccagcctagggaggaagagggagtgaagtatgaaagaacatttatggcctcagagtttctcgattggctggtgcaggaaggggaggctacgacacgtaaagaagcggaacagctctgccaccgcctcatggagcatggtattatccagcacgtgagcaacaaacacccgttcgtggactccaacctgctgtaccaatttcgtatgaactttagaagaaggcgccgtctgatggagctgttaaacgagaagtccccttcctcccaggagactcacgacagccccttttgtctaaggaagcaatctcacgacaaccgaaagtccacctcgttcatgtctgttagtccaagtaaggaaatcaagatcgtgagcgcggtcagaaggagcagtatgtcctcttgcggcagttccggttacttttcctcgtcaccaacactgagcagctcacccccagtcctatgcaacccaaaatccgtgcttaaaagacctgtaacttctgaagagctccttactccaggggctccatatgcccgaaagactttcaccattgtcggagatgccgtgggttgggggtttgtggtgaggggttccaagccctgccatatccaggccgtggatccctcaggtcccgcagccgcagccggaatgaaagtgtgtcaatttgtcgtgtcagtcaatggtctcaatgtgctgcacgtcgactatcgcacagtgagtaacctgatactgactggacccagaaccatcgtgatggaggtcatggaagagctcgagtgctag

SEQ ID NO: 213178 - DNA, 1230 bp, Artificial Sequence
  derived and/or modified sequence
atggaggagggcggcagcaccggcagcgccggcagcgacagcagcaccagcggcagcggcggcgcccagcagagagagctggagagaatggccgaggtgctggtgaccggcgagcagctgagactgagactgcacgaggagaaggtgatcaaggacagaagacaccacctgaagacctaccccaactgcttcgtggccaaggagctgatcgactggctgatcgagcacaaggaggccagcgacagagagaccgccatcaagctgatgcagaagctggccgacagaggcatcatccaccacgtgtgcgacgagcacaaggagttcaaggacgtgaagctgttctacagattcagaaaggacgacggcaccttccccctggacaacgaggtgaaggccttcatgagaggccagagactgtacgagaagctgatgagccccgagaacaccctgctgcagcccagagaggaggagggcgtgaagtacgagagaaccttcatggccagcgagttcctggactggctggtgcaggagggcgaggccaccaccagaaaggaggccgagcagctgtgccacagactgatggagcacggcatcatccagcacgtgagcaacaagcaccccttcgtggacagcaacctgctgtaccagttcagaatgaacttcagaagaagaagaagactgatggagctgctgaacgagaagagccccagcagccaggagacccacgacagccccttctgcctgagaaagcagagccacgacaacagaaagagcaccagcttcatgagcgtgagccccagcaaggagatcaagatcgtgagcgccgtgagaagaagcagcatgagcagctgcggcagcagcggctacttcagcagcagccccaccctgagcagcagcccccccgtgctgtgcaaccccaagagcgtgctgaagagacccgtgaccagcgaggagctgctgacccccggcgccccctacgccagaaagaccttcaccatcgtgggcgacgccgtgggctggggcttcgtggtgagaggcagcaagccctgccacatccaggccgtggaccccagcggccccgccgccgccgccggcatgaaggtgtgccagttcgtggtgagcgtgaacggcctgaacgtgctgcacgtggactacagaaccgtgagcaacctgatcctgaccggccccagaaccatcgtgatggaggtgatggaggagctggagtgctag

SEQ ID NO: 213179 - DNA, 2569 bp, Artificial Sequence
  derived and/or modified sequence
aatccagtcagagcagcggagctgccccgaacaaagatggcgcgggaagcgtctgtgagggcagactgatccgagcacccaaaccctcggcggacagcggagccagtggtagccgcacggccctaaaaccatggaggagggcggcagcactggcagtgctggcagtgacagcagcaccagcgggagtggcggggcgcagcaaagggagctggagcgcatggctgaggtcttggtcaccggggaacagctacggctcaggctgcacgaagaaaaggttattaaagatagacgtcatcatctcaagacctacccaaactgttttgtcgcaaaagaactgattgactggctgattgaacacaaagaggcttctgacagagagacggcaattaaactcatgcagaaattagcagaccggggcattattcaccatgtgtgtgatgagcataaggaattcaaggatgtcaaactcttctaccgctttagaaaggatgacggcaccttcccattggataatgaagtgaaggcctttatgagaggacagaggctatatgaaaagctgatgagccctgaaaacacactcctgcagcccagggaggaggaaggggtcaagtatgagcgcaccttcatggcatctgaattcctggactggctggttcaggaaggtgaggccaccacgaggaaagaggcagagcagctttgccaccggcttatggagcatggcatcatccagcatgtgtccaacaagcacccatttgtggacagcaatcttctctaccagttcagaatgaacttccggcggaggcgaagactgatggagctgctcaatgaaaagtccccctcctcccaggaaactcatgacagtcccttctgcctgaggaagcagagccatgacaatcggaaatctaccagctttatgtcagtgagccccagcaaggagatcaagatcgtgtctgcagtgaggagaagcagcatgagcagctgtggcagcagcggctacttcagcagcagccccaccctcagcagcagcccccctgtgctctgcaaccccaagtccgtgctgaagagacctgtcacctctgaggaactccttactcccggggctccgtatgcaaggaagacattcacgattgttggtgacgcggttggctggggttttgtggtgcgaggaagtaagccatgccacatccaggctgtagaccccagtggccctgcagccgcagcaggaatgaaggtctgtcagtttgtcgtctctgtcaacgggctcaatgtcctgcatgtagactaccggaccgtgagcaatctgattctgacgggcccacggacgattgtcatggaagtcatggaggagttagagtgctgagctcctgggcctcccagccctccagtggcctgtgggtgagggaagccagaatgacacaaagcaatgcaaagacaagattgccatgcaaatggatggttttggacatacgagtcttctccgcacatacatgtctaaagttgagttttatacactgaatgtggaagaaccgggtatcatatcttttttaaaaaatgtcagtgtagaaaacatttgggaaaccattttcctacatgatagaactgccttactagatttctatttgtagctctcattcattgttttttatcttagtttgcagaaaggtgttgaaatgcttctctagcccaaacagcgacatgctaaagtccccttcttcagagtcaatagagtagttgttaaaggttttaaattgtactttctccaaaattagcatgcagctatttaatagggaatctagatttcaccaagattcaaatcaaagcaacatttaaaggaataagacctgttcactagcattttcaagggggttctaaagcattcaagtgcttaaaagccataaaaaatgacttcttaattcctgcctttagtgtcaacttttaagttaatacaggtttcaattgtggcattaggaaaaaaaaaaaccttgtgatgctatggttgggggtagttagggagagactacatgaaattgtgtgcccctattttctttctgatcctaaatcattttgttttataaatcagctatagcatctttctagaattaatcctgaatatgttgaatgttaaaatagagaagtttgtatatacacataattaaaaatcaacccttctggcaagatttcactttgaaggtgtctgtttttaagggaaggctaaaactttgctgatatgtgataaaacttgaactctaaattgcctccttagcctgaatttttactagctttctagtgtaacatattctaaggacatgacatgctgcttatttggggggattatttttcaccaaaatgatcatcttgtgttgtaacttttcagctcacttgtatatacgcacgttttcatttttggtctagaaaatagtgcattttggggctcagcgtgcagaggaaattcctcaaagtgccaaattaggcagtcaggaaatactaaattcttcattccaaataatggatctgaatgatgacgttaattttttatcatgcattaacaaaataaaatatgagaattgta

SEQ ID NO: 213180 - DNA, 507 bp, Artificial Sequence
  derived and/or modified sequence
atggcccagaatacagaaaatcacgaccctgtgggttccattctcattcagatccacgaggatttatatcagctgaaggaaaaactgaccaaattctcaccggaggaaaaaggcgagactttggacattcagagtctcgagactgcaataaagagaactgaggtgggacttcggattcatatcgagaagtacctgaacgtcgtcaaccagaacgttcttacaaccagcgtgaatgatgagtcactgtataccccgcaggcatccaagtggctgcttcccaccgtgattgaccagaagagtttcatattccctcaggagagcgaaggcactttctggcagcctcagagacaacatagtagctcccttcccgttttcccgagagccaaaagaaaaatcggactgaacgtcaaaattcttcaggatcccgaaaatatccaccatagagccgcagtgaacgctaattacggtatcagtctcccttatattaatcagcgcaaggcctgctag

SEQ ID NO: 213181 - DNA, 507 bp, Artificial Sequence
  derived and/or modified sequence
atggcccagaacacagagaaccacgaccctgtgggcagcatcctgatccagatccacgaggacctgtaccagctgaaggagaagctgaccaagttcagccctgaggagaagggggagaccctggacatccagagcctggagacagccatcaagaggacagaggtgggcctgcgcatccacatcgagaagtacctgaatgtggtgaaccagaatgtgctgaccacctctgtgaatgatgagagcctgtacaccccccaggccagcaagtggctgctgcccaccgtcatcgaccagaagagcttcatcttcccccaggagagcgagggcaccttctggcagccccagaggcagcacagcagcagcctgcctgtgttcccccgggccaagaggaagattggcctgaatgtgaagatcctgcaggaccctgagaacatccaccacagagctgctgtgaatgccaactacggcatcagcctgccctacatcaaccagaggaaggcctgctag

SEQ ID NO: 213182 - DNA, 507 bp, Artificial Sequence
  derived and/or modified sequence
atggcccagaacaccgagaaccacgaccccgtgggcagcatcctgatccagatccacgaggacctctaccagctgaaggagaagctaaccaagtttagtcctgaagagaagggagaaactctagatattcagagcttggaaacagcaataaaacgcacagaggtcgggctccgcattcatattgaaaagtatctcaacgtcgtgaaccaaaacgtactgacaaccagcgttaacgatgaaagcctctatactccgcaagcgtccaagtggctcttgcccacagtaattgaccagaagagctttatctttccccaagaatcagaagggacattctggcagccccaacgtcaacactcctcatccctgcctgtgttcccaagggcgaaacggaagatcggactcaatgtcaaaatcctgcaggatcccgagaacattcatcacagggctgcagttaacgccaactacggaatctcactcccgtacattaaccagagaaaggcatgttag

SEQ ID NO: 213183 - DNA, 507 bp, Artificial Sequence
  derived and/or modified sequence
atggctcagaacaccgagaaccatgatccagtgggatccatcctaatccagattcacgaggacctttatcaactgaaggagaagctgacaaaattttcccccgaggagaaaggtgagactctggatatccaatccctcgaaacagcgattaaaagaaccgaagttgggttgaggattcatatcgagaaatatcttaacgtcgttaatcagaacgtgctgacaactagcgtcaatgatgaaagtctgtatacaccacaggcctctaaatggctgttaccaaccgttatagatcagaagagcttcatcttcccacaggagtcagaagggacgttctggcagcctcaacggcaacactcttcttctctgcctgttttccctcgtgctaagcggaagatcggcctaaacgtgaagattctgcaggaccccgagaatattcatcacagagccgctgttaatgcaaattatggaatatccctcccatatattaatcagaggaaggcatgctag

SEQ ID NO: 213184 - DNA, 507 bp, Artificial Sequence
  derived and/or modified sequence
atggcccagaacaccgagaaccacgaccccgtgggcagcatcctgatccagatccacgaggacctgtaccagctgaaggagaagctgaccaagttcagccccgaggagaagggcgagaccctggacatccagagcctggagaccgccatcaagagaaccgaggtgggcctgagaatccacatcgagaagtacctgaacgtggtgaaccagaacgtgctgaccaccagcgtgaacgacgagagcctgtacaccccccaggccagcaagtggctgctgcccaccgtgatcgaccagaagagcttcatcttcccccaggagagcgagggcaccttctggcagccccagagacagcacagcagcagcctgcccgtgttccccagagccaagagaaagatcggcctgaacgtgaagatcctgcaggaccccgagaacatccaccacagagccgccgtgaacgccaactacggcatcagcctgccctacatcaaccagagaaaggcctgctag

SEQ ID NO: 213185 - protein, 177 aa, Artificial Sequence
  derived and/or modified sequence
MRERPRLGEDSSLISLFLQVVAFLAMVMGTHTYSHWPSCCPSKGQDTSEELLRWSTVPVPPLEPARPNRHPESCRASEDGPLNSRAISPWRYELDRDLNRLPQDLYHARCLCPHCVSLQTGSHMDPRGNSELLYHNQTVFYRRPCHGEKGTHKGYCLERRLYRVSLACVCVRPRVMG

SEQ ID NO: 213186 - DNA, 534 bp, Artificial Sequence
  derived and/or modified sequence
atgagagagagacccagactgggcgaggacagcagcctgatcagcctgttcctgcaggtggtggccttcctggccatggtgatgggcacccacacctacagccactggcccagctgctgccccagcaagggccaggacaccagcgaggagctgctgagatggagcaccgtgcccgtgccccccctggagcccgccagacccaacagacaccccgagagctgcagagccagcgaggacggccccctgaacagcagagccatcagcccctggagatacgagctggacagagacctgaacagactgccccaggacctgtaccacgccagatgcctgtgcccccactgcgtgagcctgcagaccggcagccacatggaccccagaggcaacagcgagctgctgtaccacaaccagaccgtgttctacagaagaccctgccacggcgagaagggcacccacaagggctactgcctggagagaagactgtacagagtgagcctggcctgcgtgtgcgtgagacccagagtgatgggctag

SEQ ID NO: 213187 - DNA, 534 bp, Artificial Sequence
  derived and/or modified sequence
atgcgcgagaggccacgcttgggagaggatagcagtcttatctctctttttcttcaggtcgttgcgtttttagcgatggtaatgggtacccacacctattcccattggccatcctgttgccctagcaaaggccaggatacgtctgaggagttactgaggtggtccaccgtccccgtgccgcctctcgagccagcccgccctaacaggcaccctgaatcctgtcgtgcatctgaagacggccctctcaacagccgggcaatttcgccctggcggtatgaactggacagagatctgaaccgactcccacaggacctttaccatgcaaggtgtctgtgcccgcactgtgtgtccctgcagactgggtcgcatatggacccacgcggtaactccgagctgttatatcacaaccagaccgtcttttaccgacgtccttgccacggggaaaaaggtacacataaaggctattgtctcgagagacggctctacagagtctctctcgcctgtgtctgcgttcgcccaagggtgatggggtag

SEQ ID NO: 213188 - DNA, 534 bp, Artificial Sequence
  derived and/or modified sequence
atgagggagcggccccggctgggggaggacagcagcctcatcagcctcttcctgcaggtggtggccttcctggccatggtgatgggcacccacacctacagccactggcccagctgctgccccagcaagggccaggacaccagcgaggagctgctgcgctggagcacagtgcctgtgccccccctggagcccgcccggcccaacagacaccctgagagctgccgggcctctgaagatggccccctgaacagccgggccatcagcccctggaggtatgagctggaccgggacctgaaccggctgccccaggacctgtaccacgcccgctgcctgtgcccccactgtgtgtccctgcagacaggcagccacatggacccccggggcaacagcgagctgctgtaccacaaccagaccgtcttctaccgccggccctgccacggggagaagggcacccacaagggctactgcctggagcggcggctgtacagagtgtccctggcctgtgtgtgtgtgcggccccgggtgatgggctag

SEQ ID NO: 213189 - DNA, 534 bp, Artificial Sequence
  derived and/or modified sequence
atgcgggagcggccccggctgggcgaggacagcagcctgatcagcttatttctgcaagtcgttgccttccttgcaatggtaatgggtacacacacatattcccattggccttcctgctgcccctctaaagggcaggacacttcagaggagctgcttcggtggtctactgtgccagttcccccccttgagcctgctaggcctaaccggcatcctgagagctgccgcgcctctgaggacggcccacttaacagcagggcgatatccccctggaggtacgagctggaccgcgatctcaaccgactgccacaggatctgtatcatgcccggtgtctctgcccccactgtgtctctctgcaaacgggctcgcatatggatcccagagggaatagcgagttactttaccataatcagactgttttttataggcggccctgtcatggcgagaaagggacgcataagggatattgtctggagcgccgactctaccgagtgtctcttgcttgtgtctgtgtgaggccgcgcgtgatgggatag

SEQ ID NO: 213190 - DNA, 534 bp, Artificial Sequence
  derived and/or modified sequence
atgcgggaacgacccaggctgggggaggactcttcactgatctccctgttcctgcaggttgtggcctttctggccatggtgatgggcacacacacttatagccattggccctcctgctgtcctagcaaaggccaagatacaagcgaggagctgcttcgctggtccaccgtgccagtccctcccttggagcctgccaggcccaataggcatccggagtcctgtcgtgccagtgaggacgggcctctgaactccagagctatatcaccatggcggtacgaactcgatcgagacctgaataggctgccccaggacctgtatcatgcacgctgcctgtgtccacactgcgtgtcgctgcaaacggggtcccatatggatccccgaggcaattctgagctcctttatcataatcagaccgtgttttataggcggccatgccatggtgagaaaggcactcataaaggttattgtctggagcggcgtttatatcgagtaagtctcgcgtgcgtgtgtgtgcgccctcgggtgatgggttag

SEQ ID NO: 213191 - DNA, 1315 bp, Artificial Sequence
  derived and/or modified sequence
ggcttgctgaaaataaaatcaggactcctaacctgctccagtcagcctgcttccacgaggcctgtcagtcagtgccccacttgtgactgagtgtgcagtgcccagcatgtaccaggtcagtgcagagggctgcctgagggctgtgctgagagggagaggagcagagatgctgctgagggtggagggaggccaagctgccaggtttggggctgggggccaagtggagtgagaaactgggatcccagggggagggtgcagatgagggagcgacccagattaggtgaggacagttctctcattagccttttcctacaggtggttgcattcttggcaatggtcatgggaacccacacctacagccactggcccagctgctgccccagcaaagggcaggacacctctgaggagctgctgaggtggagcactgtgcctgtgcctcccctagagcctgctaggcccaaccgccacccagagtcctgtagggccagtgaagatggacccctcaacagcagggccatctccccctggagatatgagttggacagagacttgaaccggctcccccaggacctgtaccacgcccgttgcctgtgcccgcactgcgtcagcctacagacaggctcccacatggacccccggggcaactcggagctgctctaccacaaccagactgtcttctaccggcggccatgccatggcgagaagggcacccacaagggctactgcctggagcgcaggctgtaccgtgtttccttagcttgtgtgtgtgtgcggccccgtgtgatgggctagccggacctgctggaggctggtccctttttgggaaacctggagccaggtgtacaaccacttgccatgaagggccaggatgcccagatgcttggcccctgtgaagtgctgtctggagcagcaggatcccgggacaggatggggggctttggggaaagcctgcacttctgcacattttgaaaagagcagctgctgcttagggccgccggaagctggtgtcctgtcattttctctcaggaaaggttttcaaagttctgcccatttctggaggccaccactcctgtctcttcctcttttcccatcccctgctaccctggcccagcacaggcactttctagatatttcccccttgctggagaagaaagagcccctggttttatttgtttgtttactcatcactcagtgagcatctactttgggtgcattctagtgtagttactagtcttttgacatggatgattctgaggaggaagctgttattgaatgtatagagatttatccaaataaatatctttatttaaaaatg

SEQ ID NO: 213192 - protein, 985 aa, Artificial Sequence
  derived and/or modified sequence
MPVPSRHINIGRSQSWDAAGWYEGPWENAESLRPLGRRSSLTYGTAEGTWFEPNHRPQDAALPVAAEPYLYREAVYNSVAARKGSTPDFTFYDSRQAVMSGRSPLLPREYYSDPSGAARVPKEPPLYRDPGVSRPVPSYGVLGSRTSWDPMQGRSPALQDAGHLYRDPGGKMIPQGRQTQSRAASPGRYGREQPDTRYGAEVPAYPLSQVFSDISERPIDPAPARQVAPTCLVVDPSSAAAPEGSTGVAPGALNRGYGPARESIPSKMAYETYEADLSTFQGPGGKRTVLPEFLAFLRAEGLAEATLGALLQQGFDSPAVLATLEDADIKSVAPNLGQARVLSRLANSCRTEMQLRRQDRGGPLPRARSSSFSHRSELLHGDLASLGAAAPLQTASPRAGDPARRPSSAPSQHLLETAATYSAPGVGTHAPHFPSNSGYSSPTPCALTARLSPTYPLQAGVALTNPGPSNPLHPGPRTAYSTAYTVPMELLKRERNVAASPLPSPHGSPQVLRKPGAPLGPSTLPPASQSLHTPHSPYQKVARRTGAPIIVSTMLAPEPSIRPQIMNGPLHPRPLVALLDGRDCTVEMPILKDLATVAFCDAQSTQEIHEKVLNEAVGAMMYHTITLTREDLEKFKALRVIVRIGSGYDNVDIKAAGELGIAVCNIPSAAVEETADSTICHILNLYRRNTWLYQALREGTRVQSVEQIREVASGAARIRGETLGLIGFGRTGQAVAVRAKAFGFSVIFYDPYLQDGIERSLGVQRVYTLQDLLYQSDCVSLHCNLNEHNHHLINDFTIKQMRQGAFLVNAARGGLVDEKALAQALKEGRIRGAALDVHESEPFSFAQGPLKDAPNLICTPHTAWYSEQASLEMREAAATEIRRAITGRIPESLRNCVNKEFFVTSAPWSVIDQQAIHPELNGATYRYPPGIVGVAPGGLPAAMEGIIPGGIPVTHNLPTVAHPSQAPSPNQPTKHGDNREHPNEQ

SEQ ID NO: 213193 - protein, 149 aa, Artificial Sequence
  derived and/or modified sequence
MQEIHEKVLNEVVGAMMYHTFSLTREDLENFKALRVIVQVGSGYDNVAIKAAGELEIAVCSIPSAAVEETADSTTGHILNLYWGNRSLYQALREGTRVQSVEQIGEVASVKARIRGEILGLIGFGRTQQEVAVRAKAFAGWDRAVPGCA

SEQ ID NO: 213194 - DNA, 2958 bp, Artificial Sequence
  derived and/or modified sequence
atgcccgtgcccagcagacacatcaacatcggcagaagccagagctgggacgccgccggctggtacgagggcccctgggagaacgccgagagcctgagacccctgggcagaagaagcagcctgacctacggcaccgccgagggcacctggttcgagcccaaccacagaccccaggacgccgccctgcccgtggccgccgagccctacctgtacagagaggccgtgtacaacagcgtggccgccagaaagggcagcacccccgacttcaccttctacgacagcagacaggccgtgatgagcggcagaagccccctgctgcccagagagtactacagcgaccccagcggcgccgccagagtgcccaaggagccccccctgtacagagaccccggcgtgagcagacccgtgcccagctacggcgtgctgggcagcagaaccagctgggaccccatgcagggcagaagccccgccctgcaggacgccggccacctgtacagagaccccggcggcaagatgatcccccagggcagacagacccagagcagagccgccagccccggcagatacggcagagagcagcccgacaccagatacggcgccgaggtgcccgcctaccccctgagccaggtgttcagcgacatcagcgagagacccatcgaccccgcccccgccagacaggtggcccccacctgcctggtggtggaccccagcagcgccgccgcccccgagggcagcaccggcgtggcccccggcgccctgaacagaggctacggccccgccagagagagcatccccagcaagatggcctacgagacctacgaggccgacctgagcaccttccagggccccggcggcaagagaaccgtgctgcccgagttcctggccttcctgagagccgagggcctggccgaggccaccctgggcgccctgctgcagcagggcttcgacagccccgccgtgctggccaccctggaggacgccgacatcaagagcgtggcccccaacctgggccaggccagagtgctgagcagactggccaacagctgcagaaccgagatgcagctgagaagacaggacagaggcggccccctgcccagagccagaagcagcagcttcagccacagaagcgagctgctgcacggcgacctggccagcctgggcgccgccgcccccctgcagaccgccagccccagagccggcgaccccgccagaagacccagcagcgcccccagccagcacctgctggagaccgccgccacctacagcgcccccggcgtgggcacccacgccccccacttccccagcaacagcggctacagcagccccaccccctgcgccctgaccgccagactgagccccacctaccccctgcaggccggcgtggccctgaccaaccccggccccagcaaccccctgcaccccggccccagaaccgcctacagcaccgcctacaccgtgcccatggagctgctgaagagagagagaaacgtggccgccagccccctgcccagcccccacggcagcccccaggtgctgagaaagcccggcgcccccctgggccccagcaccctgccccccgccagccagagcctgcacaccccccacagcccctaccagaaggtggccagaagaaccggcgcccccatcatcgtgagcaccatgctggcccccgagcccagcatcagaccccagatcatgaacggccccctgcaccccagacccctggtggccctgctggacggcagagactgcaccgtggagatgcccatcctgaaggacctggccaccgtggccttctgcgacgcccagagcacccaggagatccacgagaaggtgctgaacgaggccgtgggcgccatgatgtaccacaccatcaccctgaccagagaggacctggagaagttcaaggccctgagagtgatcgtgagaatcggcagcggctacgacaacgtggacatcaaggccgccggcgagctgggcatcgccgtgtgcaacatccccagcgccgccgtggaggagaccgccgacagcaccatctgccacatcctgaacctgtacagaagaaacacctggctgtaccaggccctgagagagggcaccagagtgcagagcgtggagcagatcagagaggtggccagcggcgccgccagaatcagaggcgagaccctgggcctgatcggcttcggcagaaccggccaggccgtggccgtgagagccaaggccttcggcttcagcgtgatcttctacgacccctacctgcaggacggcatcgagagaagcctgggcgtgcagagagtgtacaccctgcaggacctgctgtaccagagcgactgcgtgagcctgcactgcaacctgaacgagcacaaccaccacctgatcaacgacttcaccatcaagcagatgagacagggcgccttcctggtgaacgccgccagaggcggcctggtggacgagaaggccctggcccaggccctgaaggagggcagaatcagaggcgccgccctggacgtgcacgagagcgagcccttcagcttcgcccagggccccctgaaggacgcccccaacctgatctgcaccccccacaccgcctggtacagcgagcaggccagcctggagatgagagaggccgccgccaccgagatcagaagagccatcaccggcagaatccccgagagcctgagaaactgcgtgaacaaggagttcttcgtgaccagcgccccctggagcgtgatcgaccagcaggccatccaccccgagctgaacggcgccacctacagatacccccccggcatcgtgggcgtggcccccggcggcctgcccgccgccatggagggcatcatccccggcggcatccccgtgacccacaacctgcccaccgtggcccaccccagccaggcccccagccccaaccagcccaccaagcacggcgacaacagagagcaccccaacgagcagtag

SEQ ID NO: 213195 - DNA, 3669 bp, Artificial Sequence
  derived and/or modified sequence
aaacccccagttggttgtccctgccgtctcggaagggttagcacacagccaggtctgtttttgatgtatgtaattgaagatttataaagaaaagcttctcctctgcctcatccgcagtcattttttttccaatgccagttcccagcaggcatataaatattggtcgttctcagagctgggatgctgctgggtggtacgagggcccctgggagaacgccgagtccctgcggcctctggggaggagaagctccctgacgtatggcacagcagaggggacttggtttgagccaaaccaccgaccacaggacgctgccctgcccgtggccgccgagccctacctgtaccgggaggccgtttataactcagtggctgcaagaaaggggtctactcctgacttcaccttctacgacagcagacaggcagtgatgtctggtcgcagccccctgctgccacgggagtactacagtgatccgtctggagctgctagggtacccaaagagcctcccctctatcgggacccaggagtcagccggccggtccccagctacggagtgcttggcagcagaacgtcatgggatccaatgcaaggccggtcacctgccctgcaggacgccggtcacctgtaccgggatcctggaggtaaaatgatccctcaggggcggcagacacagagcagggctgcatctcccgggcggtatggacgggagcagcccgacaccaggtatggggcggaggtgcctgcctaccccctcagccaggtcttcagcgacatcagcgaaagacccattgaccctgcccctgccagacaggtggccccgacgtgcctggttgtggaccccagttcagctgctgcccccgaaggcagcacaggggtggccccaggggccctgaatcgtggctacgggcctgcccgggaaagcatcccatccaagatggcttacgagacttacgaagctgacctgtccaccttccagggtcctggtggcaagaggaccgtgctccctgagttcctggcctttctgcgggcggaggggctggcagaggccacgctgggagccctactgcagcagggctttgactccccggccgtcctggctaccctggaggacgcggatatcaagtctgtcgcacccaacctgggccaggcccgtgttctgagccgcctggccaatagctgcaggaccgaaatgcagctgcggaggcaggaccgggggggcccgctgccccgggcgcggtccagcagcttcagccaccgaagcgaactgctccatggtgacttggcttctctgggcgctgcggctcctctgcagacagcatccccccgagctggagacccggctcgccgtccctccagcgcaccatctcagcacctcctggagacggcagccacctattctgcccctggcgtgggcacccatgccccacacttcccctccaactccgggtacagctctcccaccccttgcgccctgacagcgcgtctgagccccacgtaccccctgcaggcaggggtggccttgactaacccgggcccctcaaacccccttcacccaggccccagaacagcctactccacggcatacacggtgcccatggagctgctaaagagggagcgcaacgtggccgcctctccgctgcccagccctcacggcagcccccaggtcttgcggaagccaggtgcacccctggggccatccaccctgccgccggccagccagagcctccacacgcctcactcaccgtaccagaaggtggcccggcgcacaggggcacccatcatcgtgtccaccatgcttgcaccagaaccaagtatccgcccccagatcatgaacggccccctgcacccccgccccctggtggcgctgctggacggccgcgactgcactgtggagatgcccatcctgaaggacctggccactgtggccttctgtgacgcgcagtcgacgcaggaaatccacgagaaggttctaaacgaagccgtgggcgccatgatgtaccacaccatcaccctcaccagggaggacctggagaagttcaaggccctgagagtgatcgtgcggataggcagtggctatgacaacgtggacatcaaggctgccggcgagctcggaattgccgtgtgcaacatcccgtctgcagccgtggaagagacagcggactctaccatctgccacatcctcaacctgtaccggaggaacacgtggctgtaccaggcactgcgggaaggcacgcgggttcagagcgtggagcagatccgcgaggtggcctcgggagcggcccgcatccgtggggagacgctgggcctcattggctttggtcgcacggggcaggcggttgcagttcgagccaaggcctttggattcagcgtcatattttatgacccctacttgcaggatgggatcgagcggtccctgggcgtgcagagggtctacaccctgcaggatttgctgtatcagagcgactgcgtctccttgcactgcaatctcaacgaacataaccaccacctcatcaatgactttaccataaagcagatgaggcagggagcattccttgtgaacgcagcccgtggcggcctggtggacgagaaagccttagcacaagccctcaaggagggcaggatacgaggggcagccctcgacgtgcatgagtcagagcccttcagctttgctcagggtccgttgaaagatgccccgaatctcatctgcactcctcacactgcctggtacagtgagcaggcgtcactggagatgagggaggcagctgccaccgagatccgccgagccatcacaggtcgcatcccagaaagcttaagaaattgtgtgaacaaggaattctttgtcacatcagcgccttggtcagtaatagaccagcaagcaattcatcctgagctcaatggtgccacatacagatatccgccaggcatcgtgggtgtggctccaggaggacttcctgcagccatggaagggatcatccctggaggcatcccagtgactcacaacctcccgacagtggcacatccttcccaagcgccctctcccaaccagcccacaaaacacggggacaatcgagagcaccccaacgagcaatagcagagaatgccagaaggtaatcactcagatacacttgggaccaagagacagtgaaaaatagatgaactaagagaaaaagaatcggatggtctttgtaactgattctggacatatgcatcattgatgttgcagtgttgaaactacaagagctagaaaactgaagatgtcgtctgcttacggaagcgctgaaagactaggatgtgatttattaacgaccaacttctgttattgtgtgttaagtttttcatctgtgcatcaaatcacaaaaagaataaatagagctttttcctttatcagtcccttgggcacagcaggtcctgaacaccctgctctacaatgttgcatcaagagttcaaacaacaaaataaaaaatattaagaggaaatccccatcctgtgacttgagtcccttaagtctacaggggctggtgacctctttttgctaataggaaaatcacattactacaaaatggggagaaaactgtttgcctgtggtagacacctgcacgcataggattgaagacagtacaggctgctgtacagagaagcgcctctcacatctgaactgcatactgagcggg

SEQ ID NO: 213196 - DNA, 2958 bp, Artificial Sequence
  derived and/or modified sequence
atgccagttcccagtcggcatataaacattggccgctcgcagtcctgggacgccgccggatggtatgaggggccttgggagaacgctgaaagtctgcgtcccttgggtaggcgatcttcccttacatatggaacagcagaagggacttggtttgagccaaaccatcgcccgcaggatgctgccctgccggtagccgccgagccgtatctctaccgggaggcagtgtacaactccgtagccgctcgtaaaggctctacgcctgactttaccttctacgattcaagacaggcggtcatgtccggaaggtctcccctgttgcctcgcgagtattattcagatccttccggcgccgcaagggttcctaaggaacccccattgtatagagaccccggcgtttctagacccgtcccctcttacggtgtgcttggctcccgtacgtcttgggaccccatgcaaggtagatcccctgcattgcaggatgcaggccatctctatcgtgatccaggtggaaaaatgatcccacagggacggcaaacacagtcaagggccgcctctcccggtcgctatggtcgcgagcagcccgacacccggtatggcgccgaagtacctgcatatcctctatctcaggttttcagtgacatctcagaaagacccattgatccggccccagcacgccaggtagcccccacatgtctcgtggtggacccttcttctgccgcagctccggagggaagcacaggggtggctccgggggccctcaacaggggatacggtcctgctcgggaatcaatccctagcaagatggcctatgagacatatgaagctgatctgagtacattccagggcccaggaggaaaacgcacagtgctacctgaattcctggcttttctgcgtgctgaaggcctcgctgaggcaactctcggagccctgctccagcaaggctttgactctccggctgtactggccaccctggaggacgctgatatcaaaagcgtcgcccccaatttaggccaagctagagtactctccagactagccaattcttgcaggaccgagatgcaacttagaaggcaggatcggggaggtcctcttccacgggccaggtcatcatctttcagccacagaagcgaactgctgcatggcgatctcgcatctctaggtgccgccgcacccctgcagaccgcttcacctcgcgcaggcgaccctgctagacgcccaagcagtgctccttcccagcaccttctcgagaccgccgccacctacagcgctcctggcgtcggcacacacgccccacatttcccatccaactccggatatagttctcccacaccttgtgcattgaccgctcgcctttcccccacttacccgctccaggccggggtggccctaactaaccctggaccatccaatcccttgcacccaggccctaggactgcttatagcacagcctacaccgtgccgatggaactcctgaagcgcgaacggaacgtcgcagcatctccgcttccgtccccgcatggatcacctcaggttctgagaaaacccggggccccactggggccctccaccctgccccctgctagtcagtcactgcacacccctcatagtccatatcagaaagttgctaggagaaccggagctccaatcatcgtctctactatgctggcacccgagcctagcatacgaccccaaattatgaacggtcctctgcatcctaggcctctcgtggctttgcttgatggtcgcgactgtactgtcgagatgcccatactgaaagatctggcgacagtagccttctgtgacgctcagtctactcaggaaattcacgaaaaggtcttaaatgaagctgtgggcgcaatgatgtatcatacgatcacgcttacgagagaagatctggagaagtttaaagccctgagggtaatcgtgaggattgggtctggctacgacaacgtggacatcaaagcagctggagagttaggcattgcggtgtgtaacatcccctcggctgccgttgaggagacagccgatagcaccatttgtcatattttaaacctttaccgcaggaatacgtggctgtatcaggcactcagggaggggacacgggttcaatccgtcgagcagataagggaagtggcttctggagctgcaagaatacgaggagaaactctaggactcattggattcgggaggacaggacaggcggtggccgtgagagcgaaagctttcgggttctccgtgattttctacgacccatatctgcaggatggcatagagagaagcttgggcgtgcaacgcgtgtacactctgcaagacttgctctatcagtctgactgtgtgagtttgcattgcaatctaaacgaacacaaccatcatctgataaatgactttactattaagcagatgaggcaaggcgcatttctggtcaacgcagcacggggggggctggtggacgaaaaggctctagcccaggccctgaaggagggacggatcagaggagctgctttggacgtccacgagtctgaaccattctcctttgctcagggcccgctgaaagatgcacccaatttgatctgcactccacacaccgcttggtacagcgagcaggcctccctggaaatgcgtgaagctgctgctaccgagatacgtcgggcaatcactggacggattccagagtcgctccgaaattgtgtgaacaaggaattctttgtgacgagcgcaccctggtctgtaattgatcaacaagcaatccaccccgagttgaacggcgcgacctatagataccctcccggaattgtaggggtagcaccaggtggcctgccggcggccatggaaggcattatccctggcggaatccccgtcacacacaacttgccgacagttgcccacccctcccaggctccgtctccaaaccaaccaaccaagcacggcgacaatcgagagcaccctaacgaacagtag

SEQ ID NO: 213197 - DNA, 2958 bp, Artificial Sequence
  derived and/or modified sequence
atgcctgtgcccagccgccacatcaacatcggccgcagccagagctgggatgctgctggctggtatgagggcccctgggagaatgctgagagcctgcggcccctgggcagaagaagcagcctgacctatggaacagctgagggcacctggtttgagcccaaccaccggccccaggatgctgccctgcctgtggccgctgagccctacctgtaccgggaggccgtgtacaacagcgtggccgccaggaagggcagcaccccagacttcaccttctatgacagccggcaggccgtgatgagcggccgcagccccctgctgccccgggagtactacagcgaccccagcggggccgcccgggtgcccaaggagccccccctgtacagagaccccggggtgtccaggcctgtgcccagctatggagtgctgggcagcaggacctcctgggaccccatgcagggccgcagccctgccctgcaggatgctggccacctgtacagagaccccggcggcaagatgatcccccagggccggcagacccagagcagagctgccagccctggccgctatggccgggagcagcctgacacccgctacggggctgaggtgcctgcctaccccctgagccaggtgttcagtgacatcagcgagcggcccattgatcctgccccagcccggcaggtggcccccacctgcctggtggtggaccccagcagcgctgctgcccctgagggcagcactggagtggcccctggggccctgaacagaggctacggccctgcccgggagagcatccccagcaagatggcctatgagacctatgaagctgacctgagcaccttccagggccctgggggcaagaggacagtgctgcctgagttcctggccttcctgcgggcagagggcctggccgaggccaccctgggcgccctgctgcagcagggctttgacagccctgctgtgctggccaccctggaggatgctgacatcaagtctgtggcccccaacctgggccaggcccgggtgctgagccggctggccaacagctgcaggacagagatgcagctgcggcggcaggacagaggaggccccctgccccgggcccggagcagcagcttcagccacaggtctgagctgctgcacggggacctggccagcctgggcgctgctgcccccctgcagacagccagccccagggctggggaccctgcccggcggcccagcagcgcccccagccagcacctgctggagacagctgccacctacagcgcccctggggtgggcacccacgccccccacttccccagcaacagcggctacagcagccccaccccctgtgccctgacagcccggctgagccccacctaccccctgcaggccggcgtggccctgaccaaccctggccccagcaaccccctgcaccctggccccaggacagcctacagcacagcctacacagtgcccatggagctgctgaagcgggagagaaatgtggccgccagccccctgcccagcccccacggcagcccccaggtgctgaggaagccaggggcccccctgggccccagcaccctgcccccagccagccagagcctgcacaccccccacagcccctaccagaaggtggccaggagaactggagcccccatcatcgtgtccaccatgctggcccctgagcccagcatccggccccagatcatgaatggccccctgcacccccggcccctggtggccctgctggatggccgggactgcaccgtggagatgcccatcctgaaggacctggccaccgtggccttctgtgatgcccagagcacccaggagatccacgagaaggtgctgaatgaggccgtgggcgccatgatgtaccacaccatcaccctgacccgggaggacctggagaagttcaaggccctgcgggtgattgtgcgcatcggcagcggctatgacaacgtggacatcaaggccgccggggagctgggcattgctgtgtgcaacatccccagcgctgctgtggaggagacagctgacagcaccatctgccacatcctgaacctgtacagaagaaacacctggctgtaccaggccctgcgggagggcaccagggtgcagagcgtggagcagatccgggaggtggccagcggggccgcccgcatccggggggagaccctgggcctcatcggcttcggccgcacaggccaggccgtggccgtgcgggccaaggccttcggcttcagcgtcatcttctatgacccctacctgcaggacggcatcgagaggagcctgggcgtgcagagggtgtacaccctgcaggacctgctgtaccagagcgactgtgtgtccctgcactgcaacctgaatgagcacaaccaccacctgatcaatgacttcaccatcaagcagatgaggcagggcgccttcctggtgaatgctgcccggggcggcctggtggatgagaaggccctggcccaggccctgaaggagggccgcatcagaggagctgccctggatgtgcatgagagcgagcccttctcctttgcccagggccccctgaaggatgcccccaacctgatctgcaccccccacacagcctggtacagcgagcaggccagcctggagatgagggaggccgccgccacagagatccggcgggccatcaccggccgcatccctgagagcctgaggaactgtgtgaacaaggagttctttgtgaccagcgccccctggagcgtgattgaccagcaggccatccaccctgagctgaatggagccacctaccgctacccacctggcatcgtgggcgtggcccctgggggcctgcctgctgccatggagggcatcatccctgggggcatccctgtgacccacaacctgcccaccgtggcccaccccagccaggcccccagccccaaccagcccaccaagcatggagacaaccgggagcaccccaatgagcagtag

SEQ ID NO: 213198 - DNA, 2958 bp, Artificial Sequence
  derived and/or modified sequence
atgcccgtgcccagccggcacatcaacatcggccggagccagagctgggacgctgctggttggtatgaggggccttgggaaaacgccgaatctcttaggcccctgggcaggaggagctcgctgacatacggtacagcagaaggaacctggtttgaaccaaaccataggccacaggacgccgcattacccgtcgctgccgagccgtacttgtacagagaggctgtgtataacagcgtggcggcccgcaaaggatctacccctgattttaccttctacgacagtaggcaggcagtcatgtccgggcgctctcccctgctgccccgagagtactactccgaccctagtggcgctgcccgcgtgccaaaggaacccccactttatagggacccaggggtgtctcgccctgtcccttcttacggtgtactgggatcccgcaccagctgggatcctatgcagggacggtcccctgccctccaagacgctggacatttgtacagagacccaggaggcaaaatgatacctcagggtcgtcagacccagtccagggccgcctctccaggcagatacggccgcgagcagccagacacaaggtacggggcagaggtccctgcctaccctctctcacaggtgttttctgatatcagcgagagacccattgacccagcccccgcccggcaggtcgctcccacgtgtttagtcgtggacccttcttcggccgccgctcccgagggctcaacaggggtcgcacctggcgccctcaacaggggctatggccctgcgagagagtccatcccttcgaagatggcctacgagacatatgaagcggacttgagtacattccaaggcccagggggaaagagaactgtgcttcccgaatttctggcgttcttgagagctgaaggcctggcagaggccactctaggagcgctgctccaacagggctttgattctcctgcagtgttggccacgcttgaagacgcggacatcaagtctgttgccccaaacctggggcaggcacgcgttctgagcagactcgccaattcttgtcggaccgagatgcagttgagacgccaggatcgcggtggaccactcccaagggcccgatcatcgagtttctcacataggtccgaactgctacacggggatctagcaagtctgggcgctgccgccccacttcagacagcttccccacgggccggagaccccgcccgaaggccaagctcagctccctctcagcacctcttagagactgccgctacatactctgcacccggtgtaggcacccacgcgccgcatttccccagcaacagcgggtactcgtctcctaccccctgtgccctcactgcccgcttgtccccaacttatcccctgcaggctggcgtggctctcacaaacccgggacctagcaaccccctgcaccccggtccccggaccgcctatagcaccgcttacacggtgccaatggaattgctcaaaagggagcgaaacgtggccgcctctcccctcccatcgccccatggatcccctcaggtccttcgcaaaccaggcgctcctctgggtccctcgaccctgccacccgcttctcaaagcctacacacgcctcactctccttaccagaaggtcgcccgaaggactggagctccaatcatcgtctcaacaatgctagcgcccgagccatcaatccggcctcaaattatgaatggtcccctgcacccacggcccttggtagccctgctcgacggtcgcgattgcaccgtggaaatgcctatcctaaaggatttagcgacggtcgctttctgcgatgctcagagcacgcaggagatccatgaaaaggtgcttaatgaagccgtgggtgctatgatgtatcataccatcaccctcacacgggaggacctggagaagtttaaggcacttagggtgatcgtgcgaatagggagcggatatgataatgtcgacattaaggctgcaggtgagttggggatcgctgtgtgcaatatcccatccgctgcagtagaggagacggcggattcgaccatttgtcatattctgaatctctatcgcaggaatacctggctctaccaggctcttcgcgagggcactcgagttcagagtgtggaacagatccgcgaggtagcttcgggcgccgccagaattagaggagagaccctgggtttgataggtttcggtcgaacaggacaggctgtcgccgtgagggccaaagccttcggttttagtgtgattttctacgatccatatctgcaggacggaatagaaagatccctcggggttcagcgggtttatactttgcaggacttgctctaccagtctgactgtgttagcctgcactgtaacttgaacgaacacaaccaccacttgattaacgattttaccattaaacagatgcggcaaggggcctttctggtgaatgcagcacggggcgggcttgttgatgagaaagccctcgctcaggcccttaaagaaggccgaatcaggggcgcggccctggacgtgcacgagagtgagcccttctccttcgctcagggacccctcaaggacgcacctaacctgatttgcacgccacacactgcttggtactcagagcaagcctcactggaaatgagggaagctgctgcaacagaaatccgtagagccatcaccggtcgtatccccgagtctcttagaaattgtgtcaacaaggagttctttgtgacttccgcaccttggtcagtcattgaccagcaagccatacatcctgagctgaacggagcaacatatagatacccccccggcattgtgggcgtggcccccggtggtctgcctgccgcaatggagggcatcatcccaggcggaatccctgtcacacacaacttacctacagtggcccatccctcccaggccccttcccctaaccaaccaaccaaacacggggataaccgagagcaccctaatgagcagtag

SEQ ID NO: 213199 - DNA, 2958 bp, Artificial Sequence
  derived and/or modified sequence
atgcccgtgccttccaggcatatcaacatcggtcgcagtcagagctgggacgccgcagggtggtacgaaggtccttgggagaatgctgagtccctgcggccactgggccgtagatcatctctcacttatgggactgcagaaggcacctggtttgagccaaaccatcggccacaggatgcagccctaccagttgccgctgagccatacctgtacagggaagccgtgtacaactcagttgcagccaggaaaggctctacccccgactttacattttacgactctcggcaggccgtgatgagtggtcggtcacctctgctgcctcgagagtattattctgacccctcgggtgccgctcgagtccctaaggagcccccactgtatcgagatcctggcgtgtcaagacctgtaccttcctatggggtcttagggagcagaacatcatgggacccgatgcagggtagatccccggctctgcaggacgccggtcacttatatcgtgacccaggtggaaaaatgattccgcagggcagacagacccagagcagggcagcctcaccgggaaggtacggtcgtgagcagcccgacacccggtatggagccgaggtgcccgcttatccacttagccaggtgttctcagacataagtgagaggccgatcgaccccgctccagctaggcaggttgcacccacctgtctggtggtggacccaagcagcgcagctgcccctgagggttcaacgggtgtcgcacccggtgccttgaacaggggttatggtccggctcgagaatccatccctagtaagatggcgtacgaaacgtacgaagctgatcttagtacatttcaagggccagggggtaagaggacagtcttgcctgagtttctggctttcctaagggccgaggggttagcagaggcaactttaggagcacttcttcagcaaggcttcgacagcccagccgtcctggctaccttggaggatgcggacataaaaagtgtggctccgaatcttggccaggccagagtgctctccagacttgcaaacagttgtcgcacagaaatgcagctacgacggcaggacaggggcggtcctttacccagagcgcgtagctcctcattctcacaccgcagcgagttgcttcatggggatctggcttctctaggagcggcagcaccacttcaaactgcttctccgagagccggagaccccgctcggcgaccttcttccgccccaagccaacatctcctggagaccgccgcaacatattccgctcctggggtcgggacacacgcccctcatttcccatcaaattccggctactcgtctcccaccccatgcgctcttactgcgcgtctatcaccaacctatccgctgcaggccggagtggccctgaccaatcctggaccctctaacccactgcatccaggcccaaggaccgcctactctacagcatacactgtgccgatggagctcctaaaacgcgaacggaacgtagccgctagcccactgccctccccacacggttcgcctcaggtcctgcgtaagcctggggcaccgctcggccctagcaccctgccccctgcatcccaatctctgcacaccccccattcaccatatcaaaaggtggcaaggagaacaggggctcccatcattgttagtacaatgttggctcctgagccctccatcaggccccagatcatgaacgggcctctccacccgagaccactcgtggctcttctggacggtcgggattgtactgtggagatgcctattttaaaggaccttgccacggtggcgttctgtgatgcccagtctacccaggagatacacgaaaaggttctgaacgaagccgtaggggctatgatgtaccatacaatcaccctgaccagggaggatctggaaaagttcaaggcccttagagtaatcgttagaattggctcgggctacgacaacgtcgacataaaagcagctggcgaattggggatcgctgtgtgcaacatcccgtctgccgctgtcgaggaaaccgcggacagtaccatatgtcacatccttaacttataccgacggaacacgtggctctatcaagcacttagagagggtactcgggtgcaatccgtcgagcagatccgagaggtagcctccggggcagccaggattcggggagaaactctgggactgatagggtttggacgaaccggacaagctgtcgctgtccgggcaaaggcctttggcttcagcgtcatcttctacgatccttatctacaagatggtatcgaacggtccctcggggtacaaagagtctatactttgcaagatctgctttaccagtctgattgcgtcagccttcattgtaacctgaatgaacataatcaccacctcattaatgacttcactattaaacagatgaggcaaggcgcatttctggtgaacgccgcacgaggtgggttggttgacgaaaaagcgctcgcccaggcccttaaggaaggaagaattcgcggagctgctcttgacgtgcatgagagcgaaccatttagtttcgcgcagggccctttgaaggacgcccctaaccttatctgtaccccacacacggcatggtactctgagcaggcatctctggagatgagagaggctgccgcaacagaaattagaagagccatcaccggacggatcccagaatctttgaggaattgcgtgaacaaagagttttttgtcacttctgcaccttggtcagtgatcgaccaacaagcgatccatcctgagttaaacggagctacgtatcggtacccacctggtatagtcggagtggctccgggaggcctgccagctgccatggaagggattatcccgggaggaattccagtgactcacaatctgcctaccgtggcccacccgtctcaggctccatctccaaatcagcccacgaagcacggagataatcgggagcatccaaatgaacaatag

SEQ ID NO: 213200 - protein, 210 aa, Artificial Sequence
  derived and/or modified sequence
MVGLKPSDVPPTMAVKFLGAGTAACFADLVTFPLDTAKVRLQIQGENQAVQTARLVQYRGVLGTILTMVRTEGPCSPYNGLVAGLQRQMSFASIRIGLYDSVKQVYTPKGADNNFPCHFVSAFGAGFCATVVASPVDVVKTRYMNSPPGQYFSPLDCMIKMVAQEGPTAFYKGFTPSFLRLGSWNVVMFVTYEQLKRALMKVQMLRESPF

SEQ ID NO: 213201 - DNA, 633 bp, Artificial Sequence
  derived and/or modified sequence
atggtgggcctgaagcccagcgacgtgccccccaccatggccgtgaagttcctgggcgccggcaccgccgcctgcttcgccgacctggtgaccttccccctggacaccgccaaggtgagactgcagatccagggcgagaaccaggccgtgcagaccgccagactggtgcagtacagaggcgtgctgggcaccatcctgaccatggtgagaaccgagggcccctgcagcccctacaacggcctggtggccggcctgcagagacagatgagcttcgccagcatcagaatcggcctgtacgacagcgtgaagcaggtgtacacccccaagggcgccgacaacaacttcccctgccacttcgtgagcgccttcggcgccggcttctgcgccaccgtggtggccagccccgtggacgtggtgaagaccagatacatgaacagcccccccggccagtacttcagccccctggactgcatgatcaagatggtggcccaggagggccccaccgccttctacaagggcttcacccccagcttcctgagactgggcagctggaacgtggtgatgttcgtgacctacgagcagctgaagagagccctgatgaaggtgcagatgctgagagagagccccttctag

SEQ ID NO: 213202 - DNA, 828 bp, Artificial Sequence
  derived and/or modified sequence
atggtgggcctgaagcccagcgacgtgccccccaccatggccgtgaagttcctgggcgccggcaccgccgcctgcttcgccgacctggtgaccttccccctggacaccgccaaggtgagactgcagatccagggcgagaaccaggccgtgcagaccgccagactggtgcagtacagaggcgtgctgggcaccatcctgaccatggtgagaaccgagggcccctgcagcccctacaacggcctggtggccggcctgcagagacagatgagcttcgccagcatcagaatcggcctgtacgacagcgtgaagcaggtgtacacccccaagggcgccgacaacagcagcctgaccaccagaatcctggccggctgcaccaccggcgccatggccgtgacctgcgcccagcccaccgacgtggtgaaggtgagattccaggccagcatccacctgggccccagcagaagcgacagaaagtacagcggcaccatggacgcctacagaaccatcgccagagaggagggcgtgagaggcctgtggaagggcaccctgcccaacatcatgagaaacgccatcgtgaactgcgccgaggtggtgacctacgacatcctgaaggagaagctgctggactaccacctgctgaccgacaacttcccctgccacttcgtgagcgccttcggcgccggcttctgcgccaccgtggtggccagccccgtggacgtggtgaagaccagatacatgaacagcccccccggccagtacttcagccccctggactgcatgatcaagatggtggcccaggagggccccaccgccttctacaagggctag

SEQ ID NO: 213203 - DNA, 291 bp, Artificial Sequence
  derived and/or modified sequence
atggtgggcctgaagcccagcgacgtgccccccaccatggccgtgaagttcctgggcgccggcaccgccgcctgcttcgccgacctggtgaccttccccctggacaccgccaaggtgagactgcagatccagggcgagaaccaggccgtgcagaccgccagactggtgcagtacagaggcgtgctgggcaccatcctgaccatggtgagaaccgagggcccctgcagcccctacaacggcctggtggccggcctgcagagacagatgagcttcgccagcatcagaatctag

SEQ ID NO: 213204 - DNA, 633 bp, Artificial Sequence
  derived and/or modified sequence
atggtaggtcttaaaccctcagatgtgcccccgactatggccgtcaagttcctcggcgccggaactgcagcttgctttgctgaccttgtcacattccctctcgatactgcgaaagtaagactgcagatccagggagaaaaccaagccgtacaaactgctagactggtacagtaccgtggagttctgggcacaatcctcaccatggtgcgcaccgagggcccctgctcaccttataacggcctggttgccgggctccagagacaaatgagtttcgcatccatcagaattggtctctatgactccgtgaagcaggtctatactcctaagggcgccgataacaatttcccttgtcactttgtatccgccttcggtgccgggttttgtgcaacggttgtggcttccccagtggacgtcgttaaaacccgttacatgaacagtccaccaggccaatacttttctcctttggactgcatgattaagatggtcgcacaggagggcccaactgcgttctataaaggctttactccttctttcctccgacttggttcctggaacgttgtcatgtttgtcacttatgagcaactgaagagagccttaatgaaagtacagatgctcagagaatcacctttctag

SEQ ID NO: 213205 - DNA, 828 bp, Artificial Sequence
  derived and/or modified sequence
atggtcggcctgaaaccgtcagatgtgccccctacgatggcggttaaatttctgggagcgggcacggcagcctgctttgctgacctggtcaccttccccctagatacagcgaaggtcagattgcagattcaaggagaaaaccaggccgtccagacagcacgactagtccagtaccgtggagtcctcggaactatccttaccatggtccggacagaaggtccatgctctccttataatggtctggtcgccggactgcagcggcagatgtcttttgcttccattaggatcggtttatacgactccgtcaagcaggtgtacaccccaaaaggcgctgataacagctcattaactacacggatcttagccggatgcacaaccggtgctatggctgttacatgtgctcagccaaccgacgttgtcaaagtgcgtttccaggcctcgatacatcttggtcctagccggtcagaccgcaagtatagtgggaccatggacgcttaccggacaatcgccagagaagaaggggtgagaggcttgtggaaaggtacactacccaatatcatgcgcaacgcgattgtcaactgcgccgaagtggtaacttacgatatcttgaaagagaagttgctggactaccacctcctgaccgacaatttcccctgccacttcgtgagcgccttcggagcaggcttctgtgcgaccgttgtggcaagtcccgtagacgttgtgaagacccgatacatgaattctccccccggacaatacttctctcctctcgattgcatgattaagatggtcgctcaagagggccccactgccttttacaaagggtag

SEQ ID NO: 213206 - DNA, 291 bp, Artificial Sequence
  derived and/or modified sequence
atggtgggtctcaagccgtctgacgtgccacccacaatggccgttaaatttctgggggctggaactgccgcttgcttcgccgacctggtcacctttcctttggatactgcgaaggtgcggcttcagatccagggggagaaccaagctgtgcagacggctcggcttgtgcagtaccgaggagtcctgggcaccattctcacaatggtgaggactgaggggccatgctctccctataacggcctggtagccgggctgcagcgacagatgagtttcgcttccattcgcatctag

SEQ ID NO: 213207 - DNA, 633 bp, Artificial Sequence
  derived and/or modified sequence
atggtgggcctgaagcccagtgatgtgccccccaccatggctgtgaagttcctgggcgccggcacagctgcctgctttgctgacctggtgaccttccccctggacacagccaaggtgcggctgcagatccagggcgagaaccaggccgtgcagacagcccggctggtgcagtaccggggcgtgctgggcaccatcctgaccatggtgaggacagagggcccctgcagcccctacaacggcctggtggccggcctgcagaggcagatgagctttgccagcatccgcatcggcctgtatgattctgtgaagcaggtgtacacccccaagggagctgacaacaacttcccctgccactttgtgtctgcctttggagctggcttctgtgccaccgtggtggccagccctgtggatgtggtgaagacccgctacatgaacagccccccaggccagtacttcagccccctggactgcatgatcaagatggtggcccaggagggccccacagccttctacaagggcttcacccccagcttcctgcggctgggctcctggaatgtggtgatgtttgtgacctatgagcagctgaagagggccctgatgaaggtgcagatgctgcgggagagccccttctag

SEQ ID NO: 213208 - DNA, 828 bp, Artificial Sequence
  derived and/or modified sequence
atggtgggcctgaagcccagtgatgtgccccccaccatggctgtgaagttcctgggcgccggcacagctgcctgctttgctgacctggtgaccttccccctggacacagccaaggtgcggctgcagatccagggcgagaaccaggccgtgcagacagcccggctggtgcagtaccggggcgtgctgggcaccatcctgaccatggtgaggacagagggcccctgcagcccctacaacggcctggtggccggcctgcagaggcagatgagctttgccagcatccgcatcggcctgtatgattctgtgaagcaggtgtacacccccaagggagctgacaacagcagcctgaccacccgcatcctggccggctgcaccaccggggccatggctgtgacctgtgcccagcccacagatgtggtgaaggtgcgcttccaggccagcatccacctgggccccagcagaagtgacaggaagtacagcggcaccatggatgcctaccgcaccatcgcccgggaggagggcgtgcggggcctgtggaagggcaccctgcccaacatcatgagaaatgccatcgtgaactgtgccgaggtggtgacctatgacatcctgaaggagaagctgctggactaccacctgctgacagacaacttcccctgccactttgtgtctgcctttggagctggcttctgtgccaccgtggtggccagccctgtggatgtggtgaagacccgctacatgaacagccccccaggccagtacttcagccccctggactgcatgatcaagatggtggcccaggagggccccacagccttctacaagggctag

SEQ ID NO: 213209 - DNA, 291 bp, Artificial Sequence
  derived and/or modified sequence
atggtgggcctgaagcccagtgatgtgccccccaccatggctgtgaagttcctgggcgccggcacagctgcctgctttgctgacctggtgaccttccccctggacacagccaaggtgcggctgcagatccagggcgagaaccaggccgtgcagacagcccggctggtgcagtaccggggcgtgctgggcaccatcctgaccatggtgaggacagagggcccctgcagcccctacaacggcctggtggccggcctgcagaggcagatgagctttgccagcatccgcatctag

SEQ ID NO: 213210 - DNA, 633 bp, Artificial Sequence
  derived and/or modified sequence
atggtgggcctgaagcccagcgacgtgccccccaccatggccgtgaagtttttaggagcaggaacggcggcttgtttcgcggatctggtaacattccccctggacaccgcaaaagtaaggttgcaaatccagggtgagaatcaagccgtgcagaccgcccgattggtccagtatagaggcgtactgggaactatcctgactatggtgcgtaccgaggggccctgttctccctacaacggcctggtggctggactccaacgacagatgtcttttgcctccatcagaattggtctctatgactccgtgaagcaggtgtatactcctaaaggagcagataacaattttccttgccactttgtgtctgctttcggggctgggttctgcgctaccgtggtggcctctcctgtggatgtggtgaagactagatacatgaatagcccaccagggcagtacttcagtcccctggactgcatgatcaaaatggttgcacaggagggacctaccgcgttttacaaaggctttacccctagttttctccgcttggggtcttggaatgttgttatgtttgtcacctatgagcaactcaagcgggccctcatgaaggtgcagatgttgcgagagtcacctttttag

SEQ ID NO: 213211 - DNA, 828 bp, Artificial Sequence
  derived and/or modified sequence
atggtgggcctgaagcccagcgacgtgccccccaccatggccgtgaagtttctgggtgcaggtaccgccgcttgttttgctgacctggtaactttcccactggataccgccaaggtacgtttacagatccaaggcgagaaccaggccgtccagacagctcggctggtacaatatcgcggcgtcttagggacgattctgaccatggtgaggacagagggtccctgtagtccctacaatggcctggtggccggactccaaaggcagatgtcctttgcctcaattaggatcggtctgtatgactctgtcaaacaggtctatactccaaaaggggcagacaactcatccttaactacccgtatcctcgccggctgtacaactggagctatggcagtgacctgtgctcaaccaactgacgtggtaaaagtgcggtttcaagcctccatccatttgggccccagtagatccgataggaagtatagtggcactatggatgcataccgcacgattgcgagagaagagggagtccgcggtctctggaagggcacgctgccgaacattatgcgaaatgctatcgtgaactgtgcagaagtggtcacctatgacattcttaaagagaagcttttggactaccatctattaacagataatttcccttgtcacttcgtaagcgcctttggagcaggcttttgcgctactgtggtcgccagtcctgttgacgtcgttaagactcggtacatgaatagtcctccagggcagtactttagtcccctagactgtatgattaagatggtagcccaagagggccccaccgcattttacaaaggatag

SEQ ID NO: 213212 - DNA, 291 bp, Artificial Sequence
  derived and/or modified sequence
atggtgggcctgaagcccagcgacgtgccccccaccatggccgtgaaattcctcggcgctggcaccgctgcttgcttcgctgatttggtgaccttcccactcgatacagctaaggtgcgcctgcagatacagggtgagaaccaagctgtccagaccgcccggcttgttcaataccgaggcgtgctcggtacaatactgactatggtgcgcacggaaggaccttgtagtccctacaacggcttggtggccggtctccagcgccagatgtcattcgcgtccataaggatttag

SEQ ID NO: 213213 - DNA, 633 bp, Artificial Sequence
  derived and/or modified sequence
atggtgggcctcaaaccaagcgacgtcccacctacgatggccgtgaagttcttaggcgcaggaaccgctgcatgctttgctgatctagttacctttcctctcgataccgctaaggtgcgactccagattcagggcgaaaatcaagctgtgcaaaccgcaagactcgtgcaataccggggagtgctgggcacaattctcaccatggtacgaacagagggcccatgctccccttataacgggctggtggccggtctccagcgacagatgtctttcgcgtctatccgaattggactgtatgattccgtaaaacaggtctacacccccaaaggagccgacaataactttccctgccactttgtaagcgctttcggggctggattttgcgctaccgtggttgcctctcccgtggatgtggtgaaaacccgttacatgaacagtcctcccggtcaatacttttccccccttgactgcatgatcaagatggttgcccaggagggacctacagcattttataagggcttcacccccagtttccttaggcttggatcctggaacgtggtcatgtttgtcacctacgaacagctgaagcgcgcactaatgaaggttcaaatgctccgggagagccccttctag

SEQ ID NO: 213214 - DNA, 828 bp, Artificial Sequence
  derived and/or modified sequence
atggtcggtctaaagccgtctgatgtcccgcctacaatggctgtgaaatttctgggggctggcacagctgcctgctttgctgacctcgtaacgtttccgttagacacggctaaagtcagactgcaaattcagggggagaatcaggccgtgcaaacggctcgccttgtgcagtatcgcggtgtacttgggaccatccttaccatggttagaaccgagggtccttgttccccgtataatggcctagttgcgggtttgcagaggcagatgagcttcgcgagtatcagaatcgggctgtacgattctgttaagcaggtgtataccccaaagggggcagataattccagcctaacaaccaggatcctggcgggatgcaccaccggcgctatggccgtcacatgtgcacagcctaccgatgtagtgaaggtgcgctttcaagcctccatccatttgggacctagccggtcagaccggaagtattctgggactatggacgcctatcggacaatagctagggaggagggagttcggggtttgtggaaaggcacattgcccaacatcatgcgaaatgccattgtcaattgcgccgaggtggttacctacgacatactgaaggagaagctactggactatcatttgctgactgacaacttcccctgccatttcgtgtcagcgtttggggctgggttttgcgccaccgttgtggcaagtcccgtggacgtcgtcaagacgcgatatatgaactcccccccaggccagtatttctcacccctggattgcatgataaagatggtggcccaggaaggcccaaccgctttctataaggggtag

SEQ ID NO: 213215 - DNA, 291 bp, Artificial Sequence
  derived and/or modified sequence
atggtaggattaaaaccttcagatgtgcctccaacaatggccgttaagttccttggggctggaaccgccgcatgcttcgctgacctcgtgacattccctctcgatactgccaaggtccgcctgcagatccagggagagaaccaggccgtccagaccgccaggctcgttcagtaccgcggagtcctaggcaccatcctgacaatggtacgcactgaggggccatgctctccctataacggcctggtcgccggactccagaggcagatgagcttcgcatccattcggatttag

SEQ ID NO: 213216 - DNA, 2112 bp, Artificial Sequence
  derived and/or modified sequence
gaaccagatctggaactcactcacctcccctctcacctcactgccctcaccagccagcctcttgtcaagtgatcaggctgtcaaccaacttctctaggataaggtttcaggtcagcccgtgtgtataagaccagtgccaagccagaagcagcagagacaacagtgaatgacaaggaggggccatccaatccctgctgccacctcctgggatggagccctagggagcccctgtgctgcccctgccgtggcaggactcacagccccaccgctgcactgaagcccagggctgtggagcagcctctctccttggacctcctctcggccctaaagggactgggcagagccttccaggactatggttggactgaagccttcagacgtgcctcccaccatggctgtgaagttcctgggggcaggcacagcagcctgttttgctgacctcgttacctttccactggacacagccaaggtccgcctgcagatccagggggagaaccaggcggtccagacggcccggctcgtgcagtaccgtggcgtgctgggcaccatcctgaccatggtgcggactgagggtccctgcagcccctacaatgggctggtggccggcctgcagcgccagatgagcttcgcctccatccgcatcggcctctatgactccgtcaagcaggtgtacacccccaaaggcgcggacaacaacttcccctgccactttgtctctgcctttggagccggcttctgtgccacagtggtggcctccccggtggacgtggtgaagacccggtatatgaactcacctccaggccagtacttcagccccctcgactgtatgataaagatggtggcccaggagggccccacagccttctacaagggatttacaccctcctttttgcgtttgggatcctggaacgtggtgatgttcgtaacctatgagcagctgaaacgggccctgatgaaagtccagatgttacgggaatcaccgttttgaacaagacaagaaggccactggtagctaacgtgtccgaaaccagttaagaatggaagaaaacggtgcatccacgcacacatggacacagacccacacatgtttacagaactgttgtttacttgttgctgattcaagaaacagaagtagaagaggaggagggattctggtcttcactgccatgcctcaagaacacctttgttttgcactgacaagatggaaaataaattatattaatttttgaaacccattaggcatgcctaatatttaggcaagagaaaataaaccaagatagatccatttggacaaaatggaaggttggagacgtgtatccccgtgaaatctggttagataatgaatgataagcaggaaggatggcaagcacgggacaggaggggcccacaatggagtgggagatcagccacggagcctggagggatgccacccagcaacacagagctggcgactgcagctgcaccatcacacatgcatcatcagcctatttgtaatatgtctgccacagagagtcctttgggattctaggaaacccaaggaacaagagaaaaaactagagcctgtgctaaagaagccctgctgggcccatgtgaggctggggctcgtaaatattccctgacgacactgaagaatcaagagggcagcccccactttcctacaaaatggagggagccatcccttccctgtccacctcaccaggggtgctatgacatgcaagtgagaagctgggcatgaacgcactttataaaagcaaaagctctgtgtaaatctaactacaaggacaatgccttgggagagattttgtcgggacagagaggagttgccagggaagaaggtttgaaagatacggttgtctagaggtgagaccaaaggatccagagacttggggaccagaggtgacagtggatgacgtgaagccacaggagccccacccccatgcagcctcttccccaccccccccaccacgtgctcaatcatgagtacctcaaaggattgttgggcttgggggaaaagaggtggattcctgggcaagaacctaaagtagcaggactcggaattctcgggaaattattatgactcaataaaagaattcacaccttaggtgtgggagt

SEQ ID NO: 213217 - DNA, 1406 bp, Artificial Sequence
  derived and/or modified sequence
agagacaacagtgaatgacaaggaggggccatccaatccctgctgccacctcctgggatggagccctagggagcccctgtgctgcccctgccgtggcaggactcacagccccaccgctgcactgaagcccagggctgtggagcagcctctctccttggacctcctctcggccctaaagggactgggcagagccttccaggactatggttggactgaagccttcagacgtgcctcccaccatggctgtgaagttcctgggggcaggcacagcagcctgttttgctgacctcgttacctttccactggacacagccaaggtccgcctgcagatccagggggagaaccaggcggtccagacggcccggctcgtgcagtaccgtggcgtgctgggcaccatcctgaccatggtgcggactgagggtccctgcagcccctacaatgggctggtggccggcctgcagcgccagatgagcttcgcctccatccgcatcggcctctatgactccgtcaagcaggtgtacacccccaaaggcgcggacaactccagcctcactacccggattttggccggctgcaccacaggagccatggcggtgacctgtgcccagcccacagatgtggtgaaggtccgatttcaggccagcatacacctcgggccatccaggagcgacagaaaatacagcgggactatggacgcctacagaaccatcgccagggaggaaggagtcaggggcctgtggaaaggaactttgcccaacatcatgaggaatgctatcgtcaactgtgctgaggtggtgacctacgacatcctcaaggagaagctgctggactaccacctgctcactgacaacttcccctgccactttgtctctgcctttggagccggcttctgtgccacagtggtggcctccccggtggacgtggtgaagacccggtatatgaactcacctccaggccagtacttcagccccctcgactgtatgataaagatggtggcccaggagggccccacagccttctacaaggggtgagcctcctcctgcctccagcactccctcccagagaacaggggcttctttcttttcgaatgtggctaccgtgggtcaacctgggatgtagcggtgaagagtacagatgtaaatgccacaaagaagaagtttaaaaaaccatgcaagtaaaagaaaaaaagtgaaccatacctgatggggagggttagggaagcctgactgagaacaaacactccaggaataggtaaaagtactgcctgtctccagaggaagttagcaatcctgagacctcctggacctcctgccatggccattgagcaccacactgaccatggccagtgccttcctcactgtctccacacgctccacgttttcttgcacttactgctccctctgcgt

SEQ ID NO: 213218 - DNA, 551 bp, Artificial Sequence
  derived and/or modified sequence
attcaagggataggaacgtgacctgtttttataggccaaattcatgcagcttaagtatggcaccacccaggcttctccctttctaaagcccctcctgggtaaggaagagttcctgggagccaggccagacatcactccatcagccttctctggcctgtctcctgcagccccaccgctgcactgaagcccagggctgtggagcagcctctctccttggacctcctctcggccctaaagggactgggcagagccttccaggactatggttggactgaagccttcagacgtgcctcccaccatggctgtgaagttcctgggggcaggcacagcagcctgttttgctgacctcgttacctttccactggacacagccaaggtccgcctgcagatccagggggagaaccaggcggtccagacggcccggctcgtgcagtaccgtggcgtgctgggcaccatcctgaccatggtgcggactgagggtccctgcagcccctacaatgggctggtggccggcctgcagcgccagatgagcttcgcctccatccgcatcg

SEQ ID NO: 213219 - protein, 288 aa, Artificial Sequence
  derived and/or modified sequence
MTVGKSSKMLQHIDYRMRCILQDGRIFIGTFKAFDKHMNLILCDCDEFRKIKPKNSKQAEREEKRVLGLVLLRGENLVSMTVEGPPPKDTGIARVPLAGAAGGPGIGRAAGRGIPAGVPMPQAPAGLAGPVRGVGGPSQQVMTPQGRGTVAAAAAAATASIAGAPTQYPPGRGGPPPPMGRGAPPPGMMGPPPGMRPPMGPPMGIPPGRGTPMGMPPPGMRPPPPGCEAFFDPWPQSMEVAPQRRGLDSSGPRYHRPVCFLCCCSWSLMGLSGFLTGPPPPGMRPPRP

SEQ ID NO: 213220 - protein, 124 aa, Artificial Sequence
  derived and/or modified sequence
MTPQGRGTVAAAAVAATASIAGAPTQYPPGRGTPPPPVGRATPPPGIMAPPPGMRPPMGPPIGLPPARGTPIGMPPPGMRPPPPGIRGEAFLLALVCWYGWPLDFGMSDYAAYLKKTCFQDLFN

SEQ ID NO: 213221 - protein, 240 aa, Artificial Sequence [sequence omitted]

SEQ ID NO: 213222 - protein, 244 aa, Artificial Sequence
  derived and/or modified sequence
MMDSQTVGKSSKMLQHIDYRMRCILQDGRIFIGTFKAFDKHMNLILCDCDEFRKIKPKNAKQPEREEKRVLGLVLLRGENLVSMTVEGPPPKDTGIARVPLAGAAGGPGVGRAAGRGVPAGVPIPQAPAGLAGPVRGVGGPSQQVMTPQGRGTVAAAAVAATASIAGAPTQYPPGRGTPPPPVGRATPPPGIMAPPPGMRPPMGPPIGLPPARGTPIGMPPPGMRPPPPGIRGPPPPGMRPPRP

SEQ ID NO: 213223 - DNA, 1326 bp, Artificial Sequence
  derived and/or modified sequence
cagagtggagcggccgccggagatgcctgacgcatctgtctgaggagcggtcagtgacgcgatggagcgggcaagggatcgcttacacctgagacgaactacagaacagcacgtaccagaggtggaagtccaagtcaaacgcagaaggactgcctcactgagcaaccaagagtgtcagttgtacccgaggcgttctcagcagcagcaagtacctgtggtggatttccaggctgaactgaggcaggcattcttagctgagacaccaagaggtggttaaagccatattggagtagcgaggaatctgattccaagcaaaaaccaggctccatctactctttgaagcttctgcccagcttgcattgtttctaggagaacctgcgtcatacctttatctatagccttcccctaggtcttcagaagcatcaagttttaactgtggacattggatttggtggaacagcaatcatgactgttggcaagagtagcaagatgctgcagcacattgactatagaatgagatgtatcctgcaagatggccgaatcttcattggcacctttaaggcttttgacaagcatatgaatttgatcctctgtgattgtgatgagttcagaaagatcaagccaaagaatgcgaagcaaccagagcgtgaagaaaagcgggttttgggtctggtgttgctgcgtggggagaacttggtatccatgactgtggaggggccaccccccaaagatactggcattgctcgggtaccacttgctggagctgctggaggccctggggttggtagggcagctggtagaggagtaccagctggtgtgccaattccccaggcccctgctggattggcaggccctgtccgaggagttgggggaccatcccagcaggtaatgactccacagggaagaggcactgtagcagctgctgctgttgctgcgactgccagtattgctggagccccaacacagtacccaccaggacggggcactccgcccccacccgtcggcagagcaaccccacctccaggcattatggctcctccacctggtatgagaccacccatgggcccaccaattgggcttccccctgctcgagggacgccaataggcatgccgcctccgggaatgagaccccctccaccaggcattagaggtccacctcccccaggaatgcgtccaccaagaccttagcatactgttgatccatctcagtcactttttcccctgcaatgcgtcttgtgaaattgtgtagagtgtttgtgagctttttgttccctcattctgcattaataatagctaataataaatgcatagagcaattaaactgtg

SEQ ID NO: 213224 - DNA, 723 bp, Artificial Sequence
  derived and/or modified sequence
atgacagttgggaagagtagtaagatgctgcaacacattgactatagaatgcgctgcattttgcaggacggacgtatctttattgggaccttcaaagcattcgataaacacatgaatctgatcctgtgcgattgtgatgagtttcggaagataaaacctaagaacgcgaagcagcccgaacgcgaggagaagcgggtactcggactggtgcttctgcggggcgaaaatctggtgtctatgacagtggaggggccccccccaaaggacacaggaatcgctagagttcctctggctggggccgctggcggcccaggcgtgggtcgcgctgcaggaaggggggtccccgcaggagtgcccattccacaagccccagcgggtctggctgggccagtgagaggggtgggaggccccagtcaacaagtgatgactccccaggggcgggggacagtagcagctgccgcggtggccgcaacagctagtattgccggcgctccaacccagtatccccctggcagagggactcctccacccccggtcgggcgggctactccacctcccgggattatggcacctccgcccggcatgcggccccccatggggcctcccattggccttccacctgctcgtggcactccgatcggcatgcccccaccagggatgaggccgccccctccggggattcgcggaccacccccccccggaatgagacccccccgaccctag

SEQ ID NO: 213225 - DNA, 723 bp, Artificial Sequence
  derived and/or modified sequence
atgactgtgggaaaaagttctaagatgctgcagcacatcgactaccggatgcgctgcatcctgcaggacggacggatttttataggaacatttaaagctttcgataagcacatgaacctgatcttgtgtgattgcgacgagttccggaaaatcaagcccaaaaatgcaaaacagcctgagcgcgaggagaagagagtgcttggtttggttctgctgcgtggggaaaacctcgtcagcatgactgtcgagggccctcctccaaaggacacaggtatcgctagggtccctttggcgggcgcggctggaggccccggcgttgggcgagcagcggggagaggtgtcccagcaggggtgccgatcccgcaggcaccagccgggctggctgggcccgtcaggggagtgggaggcccgtcacagcaggtgatgaccccccagggaaggggcacagtggctgctgcagccgtggctgcaacagcgtctattgccggcgcccctacccagtacccacctggccgaggaacccctcccccgcccgtgggaagagctacccccccccccggcatcatggcgccgccccccgggatgaggcctcctatggggccccccataggactgccgccagcaaggggtactcctattgggatgccccctcccggaatgcgcccccccccccctgggatacgcggtccgcccccaccaggcatgcggccccctcggccatag

SEQ ID NO: 213226 - DNA, 723 bp, Artificial Sequence
  derived and/or modified sequence
atgaccgttggcaagagttctaaaatgctgcagcacatcgattacaggatgcgctgcatccttcaagatgggcgaatctttattggcactttcaaggcgtttgacaaacacatgaatctgatactgtgcgactgtgatgagttccggaagataaaacctaagaatgcaaaacagccagagagggaagaaaagcgcgtgctcggactggtgctcctgcgcggtgagaaccttgtgtcaatgaccgtggaagggcccccacccaaagacaccggaatcgcccgtgtgcctctcgccggcgctgcaggcgggcccggcgttggtcgggccgccgggagaggggtcccagcaggggtgccgattccacaagctcctgccggtctggccggccccgtccgcggtgtgggggggccatcccagcaagtaatgaccccccagggcagaggaacagtggctgctgccgctgtcgccgctaccgcaagtatcgccggtgcgcctactcagtacccaccaggccgcggaactcctccaccacctgtcggccgagccaccccccctcctggcatcatggcacctccccccggtatgcgcccgcctatgggtcccccaataggcctgcctccagccaggggtactccaatcggtatgccccccccaggaatgcgcccacccccgcctggcatacgtggtcccccgcctccggggatgcggcccccgcgcccctag

SEQ ID NO: 213227 - DNA, 723 bp, Artificial Sequence
  derived and/or modified sequence
atgaccgttggcaagtccagcaaaatgctgcagcacatagactaccggatgcgctgcatcctacaggacggtagaatattcattgggacctttaaagcattcgacaagcatatgaatctgattttgtgcgactgtgacgagtttcgcaaaatcaagccgaagaatgccaaacagcccgaacgagaggaaaaacgagtgttgggcctggtgctcctgagaggggagaacctggtaagcatgactgttgagggacctccaccaaaggacacgggtatcgctagggtaccgctcgccggggctgccggggggccaggggtggggcgagccgcgggaagaggtgttcctgcgggtgttccgatcccgcaagctcccgctggtcttgccggccctgtgcgaggtgtcggtggcccatctcaacaggttatgacaccacagggtagggggaccgtcgctgccgcggcagttgccgccactgcatccattgcgggggcccctacccagtacccacctggccgcggaacaccacctcctccggtggggcgcgctactcctccaccgggtatcatggctcccccccccggcatgagacctcctatggggccccccatcgggctgcctcccgcacgaggcaccccaattggtatgcctcctcccgggatgaggcccccacctcccgggatccgcggacctccacctcccggcatgcggccccctcgcccttag

SEQ ID NO: 213228 - DNA, 735 bp, Artificial Sequence
  derived and/or modified sequence
atgatggattctcagaccgtgggtaagagtagtaaaatgttacagcacatcgattatcgcatgaggtgtatcctgcaagatgggaggatctttatcggcaccttcaaggcgttcgataaacacatgaacctgattttgtgcgattgcgatgaattccgtaaaatcaaaccaaagaatgcgaagcagcccgagcgagaggaaaagcgggtgctgggactcgtgcttttgcggggggagaatctagtctccatgacggtggaggggccgccacctaaggataccgggattgccagggtccctttggcgggagccgcaggaggacccggcgtaggcagagcagctgggcgcggggtgcctgctggtgtccccattccacaggctcccgccggattggctggacctgtccggggtgtcgggggcccatcccagcaagtgatgacaccccagggccgggggaccgtggcagccgcagcggtggcggctacggcctcaatagccggggcccccacccagtacccaccggggagaggcacacccccccctccagtgggtcgggctacgccccctcccgggatcatggcacctcccccaggcatgcggcccccaatgggtccacctataggcctgccacccgcccggggaaccccgattggaatgcccccgcctgggatgcgccctcctccccctggaatccgcggacctcccccacccggtatgcggccccctaggccttag

SEQ ID NO: 213229 - DNA, 723 bp, Artificial Sequence
  derived and/or modified sequence
atgacagtgggcaagagcagcaagatgctgcagcacatcgactacaggatgcgctgcatcctgcaggacggccgcatcttcatcggcaccttcaaggcctttgacaagcacatgaacctgatcctgtgtgactgtgatgagttcaggaagatcaagcccaagaatgccaagcagcctgagcgggaggagaagagggtgctgggcctggtgctgctgcggggggagaacctggtgtccatgacagtggagggccccccacccaaggacaccggcatcgcccgggtgcccctggccggggctgctgggggccctggggtgggccgggccgccggccggggcgtgcctgctggggtgcccatcccccaggccccagctggcctggccggccctgtgcggggcgtgggcggccccagccagcaggtgatgaccccccagggccggggcaccgtggccgctgctgctgtggccgccacagccagcattgctggggcccccacccagtacccacctggccggggcaccccacctcctcctgtgggccgggccaccccacctcctggcatcatggcccctcctcctggcatgaggcctcccatgggcccccccatcggcctgcccccagcccggggcacccccatcggcatgcctcctcctggcatgaggcctcctcctcctggcatccggggccccccacctcctggcatgaggcctccccggccctag

SEQ ID NO: 213230 - DNA, 735 bp, Artificial Sequence
  derived and/or modified sequence
atgatggacagccagacagtgggcaagagcagcaagatgctgcagcacatcgactacaggatgcgctgcatcctgcaggacggccgcatcttcatcggcaccttcaaggcctttgacaagcacatgaacctgatcctgtgtgactgtgatgagttcaggaagatcaagcccaagaatgccaagcagcctgagcgggaggagaagagggtgctgggcctggtgctgctgcggggggagaacctggtgtccatgacagtggagggccccccacccaaggacaccggcatcgcccgggtgcccctggccggggctgctgggggccctggggtgggccgggccgccggccggggcgtgcctgctggggtgcccatcccccaggccccagctggcctggccggccctgtgcggggcgtgggcggccccagccagcaggtgatgaccccccagggccggggcaccgtggccgctgctgctgtggccgccacagccagcattgctggggcccccacccagtacccacctggccggggcaccccacctcctcctgtgggccgggccaccccacctcctggcatcatggcccctcctcctggcatgaggcctcccatgggcccccccatcggcctgcccccagcccggggcacccccatcggcatgcctcctcctggcatgaggcctcctcctcctggcatccggggccccccacctcctggcatgaggcctccccggccctag

SEQ ID NO: 213231 - DNA, 723 bp, Artificial Sequence
  derived and/or modified sequence
atgaccgtgggcaagagcagcaagatgctgcagcacatcgactacagaatgcggtgtatcctgcaggacggcagaattttcataggaacgtttaaggcatttgataaacacatgaacctgatattatgcgactgcgatgagttccggaagataaaacccaaaaacgccaagcagcctgagcgagaggaaaaaagggttttggggctcgtactactccgaggtgagaatctcgtgagcatgaccgtcgaggggcctcccccaaaagatacgggaatcgccagagtgcctctcgccggggccgctgggggaccaggcgtgggacgcgcggctggacggggggtccctgctggggtgccaatcccccaggctcctgccggtctggccggcccggtcaggggtgtaggaggaccctcacagcaagtcatgactccgcaagggagggggaccgttgccgccgcggccgttgcagctacggcctcaatcgcaggggcacccacccagtaccccccaggccgggggactccaccaccgccggtgggacgcgcaaccccccctcccggtatcatggctcctccacctggcatgcgcccgccaatgggccctcccataggcctcccaccagctcggggcactcctatcggcatgccgccccccggaatgagaccccccccacccggtattagagggccaccccctcctggtatgcgtcccccgaggccatag

SEQ ID NO: 213232 - DNA, 723 bp, Artificial Sequence
  derived and/or modified sequence
atgaccgtgggcaagagcagcaagatgctgcagcacatcgactacagaatgaggtgtatcctgcaggacggccggattttcattggcacatttaaagcctttgacaagcacatgaatctgatactatgcgactgtgacgagtttaggaagattaaacccaagaacgccaaacaacccgagcgcgaagagaagagggtgttggggcttgtgctcctgaggggagagaatttggtgagcatgaccgtcgagggcccgcctccaaaagataccgggatcgctcgggtgcctctggctggcgccgccgggggccccggtgttgggcgagccgctggccgcggggtccccgccggcgtgcccattccacaggcccccgccggtctagcggggcccgtgcgaggtgtgggaggcccatcccagcaagtgatgacaccccagggacgcggtaccgtggctgccgccgccgtcgcagccacagcgtctatagccggcgcaccaacacagtatccacctggcagaggcactccgccaccaccagtcggccgcgcgaccccacctcccggaatcatggcccctccccctggtatgcgcccacccatgggtccaccaatcggcttaccaccagccaggggcaccccaatcggcatgcctccccccggaatgcgaccccctcctcccggcatacggggaccccccccccccggaatgaggccgccccggccatag

SEQ ID NO: 213233 - DNA, 723 bp, Artificial Sequence
  derived and/or modified sequence
atgaccgtgggcaagagcagcaagatgctgcagcacatcgactacagaatgagatgtatcttgcaggatggtaggatttttatcggaaccttcaaggcctttgataagcacatgaatttgatcctgtgcgattgtgacgaatttaggaagattaagcctaaaaatgcgaaacagcctgagagagaagagaaaagagtactcgggctagtgttactcagaggggagaatctggtatctatgaccgtggagggaccccccccaaaggataccggtatcgcccgcgtccctttggcaggggccgcagggggccccggcgtgggtagggcagctggccgcggagtacctgctggggtgcccatccctcaggcacccgccggcctggctggccctgtacgaggcgtggggggacctagccaacaagtgatgactcctcaggggcgaggcacggttgccgcagccgccgtcgcggccactgcctctatcgcaggtgcccctacgcagtatcccccagggcggggaacgccccctcccccagttgggagagccactccgccccccggtattatggctcccccccctggtatgcggccgccaatgggtccaccgattgggctccctcctgcaagaggcacaccgatcgggatgccgcctcctggcatgagaccaccaccacccgggatccgcgggcctccaccgcctggaatgcgcccaccccggccctag

SEQ ID NO: 213234 - DNA, 723 bp, Artificial Sequence
  derived and/or modified sequence
atgaccgtgggcaagagcagcaagatgctgcagcacatcgactaccggatgaggtgtatcctccaggacgggagaattttcatcggtacctttaaagctttcgataagcatatgaatttgattttgtgtgactgtgacgaattcaggaaaattaagccaaaaaacgctaaacagccggagcgggaggagaagcgggtgctgggactggtgctgctccgcggggaaaacctggtgagtatgacagtcgaaggaccacctcccaaggataccggcatcgcaagggtgcccctcgccggagccgccggcggacccggagtgggccgcgccgccggtaggggagtgcctgccggtgtgcccatcccccaggctcctgccggcttggccggacctgtgcggggtgtaggcggcccaagtcagcaggtgatgacacctcaaggccggggtacagtggctgctgccgccgtcgctgcgacagctagcattgcaggagcgccgactcagtacccacctggcaggggtacgcctccacctcctgtggggcgtgcaacccccccgcccgggattatggcgccgccgcccggaatgagaccacctatgggtcctcccatcggcttgccccccgctcgcggcactccgatcgggatgccaccccctggaatgcggccaccacctccaggcattagaggacctccacctcctggtatgagaccgcctagaccctag

SEQ ID NO: 213235 - DNA, 735 bp, Artificial Sequence
  derived and/or modified sequence
atgatggacagccagaccgtgggcaagagcagcaagatgctgcagcacatcgactaccggatgagatgtatcctgcaggacggccgcatcttcattggtacgtttaaggcttttgataaacacatgaacctcatcctctgtgattgtgacgaattcaggaagattaaacccaagaatgctaaacagccagagagagaagaaaagcgggtgcttggactagtgttgctgaggggagagaacctcgtgtctatgactgtggaaggccctccgcctaaagataccgggatcgccagagttcccctggcaggcgctgcaggagggcctggtgtgggcagagcagcaggacgcggagtgcctgccggtgttcctattccacaggctcccgccgggttggcggggcccgtgagaggagtagggggtccgagccaacaggtgatgaccccgcaaggtcgaggaacggtagctgccgccgccgttgcggccactgctagtatcgccggggcccctacccagtaccctcctggcagaggcacccctccacctcccgtggggcgggctacccctccgcctggtatcatggctccaccaccagggatgcggccaccaatgggcccccctatcggattgccccctgccagaggtactcctattggtatgcctccccccgggatgagacctccacctcccggcatccgaggtccgcctccgccaggcatgcgcccacctaggccctag

SEQ ID NO: 213236 - DNA, 723 bp, Artificial Sequence
  derived and/or modified sequence
atgacagtggggaagtctagtaagatgttacaacatattgactaccggatgcgttgtatcctgcaagatggacgaatattcattggaactttcaaagcgttcgataagcatatgaaccttattctctgcgactgcgatgaatttcggaagatcaagcccaagaatgccaagcagcctgagagggaagaaaaacgggttctcggacttgtgcttttgaggggagagaatctggtaagcatgactgtcgagggacctccgcctaaggacacaggaatcgcccgtgtgccactcgccggtgcagccggaggtccgggagtgggaagggccgcaggccgtggagttcctgcgggagtgcccattccacaggcccctgccggtctcgcgggaccagttcggggtgtgggcggtccgtcacagcaagtcatgacaccacagggaagaggaacagtcgcggctgcggctgtcgcagccacagctagtatcgcaggagcgcctacacagtacccccctggaaggggtaccccgcctccacccgtcggccgagctacccctccccctgggattatggcccctccaccgggaatgcgtccaccaatgggccctcccataggtctgcccccagcacgcggaacccccattgggatgcccccacccggaatgaggccacctcctcccggaattaggggcccaccccctcccggaatgcggccacccagaccatag

SEQ ID NO: 213237 - DNA, 723 bp, Artificial Sequence
  derived and/or modified sequence
atgaccgtcggcaagagcagcaaaatgctgcagcacattgactatcggatgcgttgtatactacaggacggccgaatttttattggcaccttcaaagcttttgataagcacatgaatttaatcctgtgcgactgtgatgagttccggaagatcaaacctaagaatgccaaacagccagaaagggaagagaagcgtgtcctcgggctagtccttctcagaggtgaaaacctcgtgtccatgactgtcgagggccctcctccaaaggacactggcattgccagagtgcctctcgcaggcgctgccggaggcccaggtgttgggcgtgcagctgggaggggcgtgcccgctggcgttcccataccacaggctcctgctggacttgctggccctgtgcgtggcgttgggggtccttcgcagcaggtgatgaccccccaaggacggggaacggtagcagctgccgctgtcgctgcaacggctagcattgcgggagcaccaacccagtaccctccgggaagaggcacgccgcctcctcctgttggcagggcgaccccgccaccaggtattatggcacctccccctgggatgagaccaccaatgggcccacctataggtctccctcccgctaggggaactcctatcggaatgcctcctccgggaatgagaccaccccctccaggcattagaggccctccaccacctgggatgaggcctccaagaccttag

SEQ ID NO: 213238 - DNA, 723 bp, Artificial Sequence
  derived and/or modified sequence
atgaccgtcggcaagtcaagcaaaatgctgcagcacattgactacagaatgagatgtattctccaggacggcaggatttttatcggaacattcaaggccttcgataaacacatgaacctaatcctttgtgactgtgatgagttcaggaaaatcaagccgaagaatgccaaacagccggaaagggaggagaaaagggtgctgggacttgtacttctacggggagagaatctggtgtccatgactgtggagggaccccctccaaaagacacaggtatcgccagagtgccattggctggcgctgcaggcggaccaggtgtgggaagagctgccggtaggggcgttccggctggagtccctatcccgcaagcccctgccggactggccggaccagtcaggggtgttgggggtccttctcagcaagtgatgaccccacaggggagggggactgtggccgctgccgcagttgccgcaacggcgagtattgctggggctcccacacaataccctcccggacgtggcacaccccctcctcctgttggaagagctacccccccacctggaattatggcaccaccacccggtatgcgccctccaatgggccctcccataggactgccaccagcacgcggaacccctattggtatgccgcctcctgggatgcggcctccaccacctggcatcagggggccaccccctcctggcatgagacccccaagaccttag

SEQ ID NO: 213239 - DNA, 723 bp, Artificial Sequence
  derived and/or modified sequence
atgacagtaggcaaatcaagcaagatgctacagcatatcgattaccggatgcgatgtatcctgcaagatggcaggattttcattggtacgtttaaagccttcgataaacacatgaatctcatcctctgtgattgcgacgaattccgtaaaatcaaacctaagaacgccaagcaaccggagcgcgaggaaaaaagagtgctgggcctggtgttgctccggggtgagaatctggtgtctatgaccgtggaaggtcccccacccaaggatactgggatcgcccgtgtccctctggctggtgccgctggaggaccaggcgtggggagggcagcgggtcggggagtcccagccggtgtccctatcccccaggcccctgcaggcctggccggacccgtgcgtggcgtgggtgggccttctcaacaggtgatgacaccgcagggccgagggactgtggcagcagctgccgtggctgcgactgcctccatcgctggggcaccgactcagtacccacccggacgtgggactcctcccccacctgtcggacgggctactcctccacccggaattatggctcctccacccggtatgcggccaccaatgggcccacccattggcttgccgccagcacggggtacccctattggaatgccacccccagggatgaggccaccaccgcctggcatcagaggtccccctccgccaggaatgaggccaccgagaccttag

SEQ ID NO: 213240 - DNA, 735 bp, Artificial Sequence
  derived and/or modified sequence
atgatggattctcagactgtcgggaagagcagtaagatgttacagcacattgattaccgaatgagatgcattcttcaggacggcagaatctttataggcaccttcaaggcatttgacaaacacatgaacctgatcctgtgcgattgtgatgaattcagaaaaattaagccaaaaaacgctaagcaaccggagagggaagagaagagagtcctcggcctggtattgctgaggggcgagaacttagtgagcatgactgtagagggtccgcctcctaaggatacaggcatagcgagggtgcccttggcaggagcagctgggggacccggagtgggcagagcagcaggacgcggtgtccctgccggagtaccaataccccaagccccagcaggccttgctggtcccgttaggggcgtcggaggtcctagccagcaggtgatgacccctcagggcagagggacagtagctgccgcagcagtggctgccaccgcctccatcgcgggagctcctacccaatacccacccggtcgcggaactcctccaccacccgtcgggagggcaacaccccctccagggataatggcgcctcctccaggcatgagacccccaatgggaccacctattggcctcccccctgctcgagggactcccattggtatgccccctccagggatgcgtcccccaccccctggcattagaggcccaccacccccaggtatgcgcccacccaggccctag

SEQ ID NO: 213241 - DNA, 1528 bp, Artificial Sequence
  derived and/or modified sequence
tggcgcgcatgctcaggcggggatgtgtgcgaagcctgccgctgctgcagcgagtctggcgcagagtggagcggccgccggagatgcctgacgcatctgtctgaggagcggtcagtgacgcgatggagcgggcaagggatcgcttacacctgagacgaactacagaacagcacgtaccagaggtggaagtccaagtcaaacgcagaaggactgcctcactgagcaaccaagagtgtcagttgtacccgaggcgttctcagcagcagcaagtacctgtggtggatttccaggctgaactgaggcaggcattcttagctgagacaccaagaggtggttaaagccatattggagtagcgaggaatctgattccaagcaaaaaccaggctccatctactctttgaagcttctgcccagcttgcattgtttctaggagaacctgcgtcatacctttatctatagccttcccctaggtcttcagaagcatcaagttttaactgtggacattggatttggtggaacagcaatcatgactgttggcaagagtagcaagatgctgcagcacattgactatagaatgagatgtatcctgcaagatggccgaatcttcattggcacctttaaggcttttgacaagcatatgaatttgatcctctgtgattgtgatgagttcagaaagatcaagccaaagaatgcgaagcaaccagagcgtgaagaaaagcgggttttgggtctggtgttgctgcgtggggagaacttggtatccatgactgtggaggggccaccccccaaagatactggcattgctcgggtaccacttgctggagctgctggaggccctggggttggtagggcagctggtagaggagtaccagctggtgtgccaattccccaggcccctgctggattggcaggccctgtccgaggagttgggggaccatcccagcaggtaatgactccacagggaagaggcactgtagcagctgctgctgttgctgcgactgccagtattgctggagccccaacacagtacccaccaggacggggcactccgcccccacccgtcggcagagcaaccccacctccaggcattatggctcctccacctggtatgagaccacccatgggcccaccaattgggcttccccctgctcgagggacgccaataggcatgccgcctccgggaatgagaccccctccaccaggcattagaggtccacctcccccaggaatgcgtccaccaagaccttagcatactgttgatccatctcagtcactttttcccctgcaatgcgtcttgtgaaattgtgtagagtgtttgtgagctttttgttccctcattctgcattaataatagctaataataaatgcatagagcaattaaactgtgaggtactgttgtatatatttttttgcctgttgattttgatgagatcttaagttactgtggatgagggtgatgcctattaagcagttgattcaaatcatattctctttaattcttaggataaaaaggttttctgctatctaa

SEQ ID NO: 213242 - DNA, 1605 bp, Artificial Sequence
  derived and/or modified sequence
agctgagctcagagccttctgtggggtctgcagtggcaaggccagccgccccctgtcttccctctggagctgtttgaggaatgcagttcttttgcataagaaaggcttttctctccagtcattctgcttgctgatcaagaacacttaacagcttcaggctttcctgatactttgacgaaggtaattgggactcccatcaagtctccacacagctagcagccacgtggggcacttctccagcatatgtaagtggaactcagaaggcaacattccctgaacatactcttccaccagaatctcctctacagatttttgctgccccttttaccagtggctgaatctactttctcttatggatcgcttacacctgagacgaactacagaacagcacgtaccagaggtggaagtccaagtcaaacgcagaaggactgcctcactgagcaaccaagagtgtcagttgtacccgaggcgttctcagcagcagcaagtacctgtggtggatttccaggctgaactgaggcaggcattcttagctgagacaccaagaggtggttaaagccatattggagtagcgaggaatctgattccaagcaaaaaccaggctccatctactctttgaagcttctgcccagcttgcattgtttctaggagaacctgcgtcatacctttatctatagccttcccctaggtcttcagaagcatcaagttttaactgtggacattggatttggtggaacagcaatcatgactgttggcaagagtagcaagatgctgcagcacattgactatagaatgagatgtatcctgcaagatggccgaatcttcattggcacctttaaggcttttgacaagcatatgaatttgatcctctgtgattgtgatgagttcagaaagatcaagccaaagaatgcgaagcaaccagagcgtgaagaaaagcgggttttgggtctggtgttgctgcgtggggagaacttggtatccatgactgtggaggggccaccccccaaagatactggcattgctcgggtaccacttgctggagctgctggaggccctggggttggtagggcagctggtagaggagtaccagctggtgtgccaattccccaggcccctgctggattggcaggccctgtccgaggagttgggggaccatcccagcaggtaatgactccacagggaagaggcactgtagcagctgctgctgttgctgcgactgccagtattgctggagccccaacacagtacccaccaggacggggcactccgcccccacccgtcggcagagcaaccccacctccaggcattatggctcctccacctggtatgagaccacccatgggcccaccaattgggcttccccctgctcgagggacgccaataggcatgccgcctccgggaatgagaccccctccaccaggcattagaggtccacctcccccaggaatgcgtccaccaagaccttagcatactgttgatccatctcagtcactttttcccctgcaatgcgtcttgtgaaattgtgtagagtgtttgtgagctttttgttccctcattctgcattaataatagctaataataaatgcatagagcaattaaactgtg

SEQ ID NO: 213243 - DNA, 1643 bp, Artificial Sequence
  derived and/or modified sequence
caccaagggctggccgcagccactgtagctgagctcagagccttctgtgtggtttgcgggggcaaggtcagctgccccctgccctctctctggggctatttgaggaatgcggcctttttgcataagaaaggcttttctctacagtaactgtggtcgctgatcaatgacaccttcctggtaacatttcatattgcttttttggagatactttgacgaaggtaattgggactcccatcaagtctccacacagctagcagccacgtggggcacttctccagcatatgtaagtggaactcagaaggcaacattccctgaacatactcttccaccagaatctcctctacagatttttgctgccccttttaccagtggctgaatctactttctcttatggatcgcttacacctgagacgaactacagaacagcacgtaccagaggtggaagtccaagtcaaacgcagaaggactgcctcactgagcaaccaagagtgtcagttgtacccgaggcgttctcagcagcagcaagtacctgtggtggatttccaggctgaactgaggcaggcattcttagctgagacaccaagaggtggttaaagccatattggagtagcgaggaatctgattccaagcaaaaaccaggctccatctactctttgaagcttctgcccagcttgcattgtttctaggagaacctgcgtcatacctttatctatagccttcccctaggtcttcagaagcatcaagttttaactgtggacattggatttggtggaacagcaatcatgactgttggcaagagtagcaagatgctgcagcacattgactatagaatgagatgtatcctgcaagatggccgaatcttcattggcacctttaaggcttttgacaagcatatgaatttgatcctctgtgattgtgatgagttcagaaagatcaagccaaagaatgcgaagcaaccagagcgtgaagaaaagcgggttttgggtctggtgttgctgcgtggggagaacttggtatccatgactgtggaggggccaccccccaaagatactggcattgctcgggtaccacttgctggagctgctggaggccctggggttggtagggcagctggtagaggagtaccagctggtgtgccaattccccaggcccctgctggattggcaggccctgtccgaggagttgggggaccatcccagcaggtaatgactccacagggaagaggcactgtagcagctgctgctgttgctgcgactgccagtattgctggagccccaacacagtacccaccaggacggggcactccgcccccacccgtcggcagagcaaccccacctccaggcattatggctcctccacctggtatgagaccacccatgggcccaccaattgggcttccccctgctcgagggacgccaataggcatgccgcctccgggaatgagaccccctccaccaggcattagaggtccacctcccccaggaatgcgtccaccaagaccttagcatactgttgatccatctcagtcactttttcccctgcaatgcgtcttgtgaaattgtgtagagtgtttgtgagctttttgttccctcattctgcattaataatagctaataataaatgcatagagcaattaaactgtg

SEQ ID NO: 213244 - DNA, 1751 bp, Artificial Sequence
  derived and/or modified sequence
caccaagggctggccgcagccactgtagctgagctcagagccttctgtgtggtttgcgggggcaaggtcagctgccccctgccctctctctggggctatttgaggaatgcggcctttttgcataagaaaggcttttctctacagtaactgtggtcgctgatcaatgacaccttcctggtaacatttcatattgcttttttggagatgtaagtgggatctgtggatctgaaaattcacagtggccagctcaccaccacctgatgaaagatacaccacagggtgagagcatcctaacagcaaactgcaaatgagatactttgacgaaggtaattgggactcccatcaagtctccacacagctagcagccacgtggggcacttctccagcatatgtaagtggaactcagaaggcaacattccctgaacatactcttccaccagaatctcctctacagatttttgctgccccttttaccagtggctgaatctactttctcttatggatcgcttacacctgagacgaactacagaacagcacgtaccagaggtggaagtccaagtcaaacgcagaaggactgcctcactgagcaaccaagagtgtcagttgtacccgaggcgttctcagcagcagcaagtacctgtggtggatttccaggctgaactgaggcaggcattcttagctgagacaccaagaggtggttaaagccatattggagtagcgaggaatctgattccaagcaaaaaccaggctccatctactctttgaagcttctgcccagcttgcattgtttctaggagaacctgcgtcatacctttatctatagccttcccctaggtcttcagaagcatcaagttttaactgtggacattggatttggtggaacagcaatcatgactgttggcaagagtagcaagatgctgcagcacattgactatagaatgagatgtatcctgcaagatggccgaatcttcattggcacctttaaggcttttgacaagcatatgaatttgatcctctgtgattgtgatgagttcagaaagatcaagccaaagaatgcgaagcaaccagagcgtgaagaaaagcgggttttgggtctggtgttgctgcgtggggagaacttggtatccatgactgtggaggggccaccccccaaagatactggcattgctcgggtaccacttgctggagctgctggaggccctggggttggtagggcagctggtagaggagtaccagctggtgtgccaattccccaggcccctgctggattggcaggccctgtccgaggagttgggggaccatcccagcaggtaatgactccacagggaagaggcactgtagcagctgctgctgttgctgcgactgccagtattgctggagccccaacacagtacccaccaggacggggcactccgcccccacccgtcggcagagcaaccccacctccaggcattatggctcctccacctggtatgagaccacccatgggcccaccaattgggcttccccctgctcgagggacgccaataggcatgccgcctccgggaatgagaccccctccaccaggcattagaggtccacctcccccaggaatgcgtccaccaagaccttagcatactgttgatccatctcagtcactttttcccctgcaatgcgtcttgtgaaattgtgtagagtgtttgtgagctttttgttccctcattctgcattaataatagctaataataaatgcatagagcaattaaactgtg

SEQ ID NO: 213245 - DNA, 1904 bp, Artificial Sequence
  derived and/or modified sequence
ttgtccttcattacttgatctatgaaagttgtttatgtgagtctatatatatatattccatagtcatgtgttctcttttgacatgggaagtcttaggcaggtttataacacacttggctcttagtggggaaagattacctgccatcatcttgaagcgaatttaggggaagaaagaatattgcaaatgacaacataggtatttcagaaaaaaggaaaaatctgaatgaaagagtaattgagatgttgatacagagatgacttcatattaattctgaactagagagagagacactaccttaaataaggatggaaagaaaaatactaaatttgggaaaatgacgcttagtttttgaaacatttaggaattactaggtaaaataaaattcaatgactttcatcagtcctaagtgtgtcaaatgtgagagttaagaatgagggactagggaaatgtggcagtcccttggtgaggaagctagtatgagaggaaggatgtttttgaacgtgtctgtcatagtgattttcatgcaaaattgtctgcctgttttaaaacatggtagattgcagtgcagctttaacatgctttcctctgcaggctccatctactctttgaagcttctgcccagcttgcattgtttctaggagaacctgcgtcatacctttatctatagccttcccctaggtcttcagaagcatcaagttttaactgtggacattggatttggtggaacagcaatcatgacggggtcttgctctgtctcccagtctggagtgcagtggtgcggtcttggctcactgcaaccctgggttcaagagattctcgtgcctcagcctctttattagaaacagggtttcactgtgttggccaggctggtctcaggctcctgacctctggtgatccacccacctcggcctcccaaagtgctgggattacaggcatgagatgagccactgtgcctggccatgagaaatgtttcatgatgtgagaaaatacaggagtttttggtcatgattccaccagtggtgaaggactgtcctgcagatgatggactctcagactgttggcaagagtagcaagatgctgcagcacattgactatagaatgagatgtatcctgcaagatggccgaatcttcattggcacctttaaggcttttgacaagcatatgaatttgatcctctgtgattgtgatgagttcagaaagatcaagccaaagaatgcgaagcaaccagagcgtgaagaaaagcgggttttgggtctggtgttgctgcgtggggagaacttggtatccatgactgtggaggggccaccccccaaagatactggcattgctcgggtaccacttgctggagctgctggaggccctggggttggtagggcagctggtagaggagtaccagctggtgtgccaattccccaggcccctgctggattggcaggccctgtccgaggagttgggggaccatcccagcaggtaatgactccacagggaagaggcactgtagcagctgctgctgttgctgcgactgccagtattgctggagccccaacacagtacccaccaggacggggcactccgcccccacccgtcggcagagcaaccccacctccaggcattatggctcctccacctggtatgagaccacccatgggcccaccaattgggcttccccctgctcgagggacgccaataggcatgccgcctccgggaatgagaccccctccaccaggcattagaggtccacctcccccaggaatgcgtccaccaagaccttagcatactgttgatccatctcagtcactttttcccctgcaatgcgtcttgtgaaattgtgtagagtgtttgtgagctttttgttccctcattctgcattaataatagctaataataaatgcatagagcaatt

SEQ ID NO: 213246 - DNA, 723 bp, Artificial Sequence
  derived and/or modified sequence
atgaccgtgggcaagagcagcaagatgctgcagcacatcgactacagaatgagatgcatcctgcaggacggcagaatcttcatcggcaccttcaaggccttcgacaagcacatgaacctgatcctgtgcgactgcgacgagttcagaaagatcaagcccaagaacgccaagcagcccgagagagaggagaagagagtgctgggcctggtgctgctgagaggcgagaacctggtgagcatgaccgtggagggccccccccccaaggacaccggcatcgccagagtgcccctggccggcgccgccggcggccccggcgtgggcagagccgccggcagaggcgtgcccgccggcgtgcccatcccccaggcccccgccggcctggccggccccgtgagaggcgtgggcggccccagccagcaggtgatgaccccccagggcagaggcaccgtggccgccgccgccgtggccgccaccgccagcatcgccggcgcccccacccagtacccccccggcagaggcaccccccccccccccgtgggcagagccacccccccccccggcatcatggcccccccccccggcatgagaccccccatgggcccccccatcggcctgccccccgccagaggcacccccatcggcatgcccccccccggcatgagaccccccccccccggcatcagaggcccccccccccccggcatgagaccccccagaccctag

SEQ ID NO: 213247 - DNA, 735 bp, Artificial Sequence
  derived and/or modified sequence
atgatggacagccagaccgtgggcaagagcagcaagatgctgcagcacatcgactacagaatgagatgcatcctgcaggacggcagaatcttcatcggcaccttcaaggccttcgacaagcacatgaacctgatcctgtgcgactgcgacgagttcagaaagatcaagcccaagaacgccaagcagcccgagagagaggagaagagagtgctgggcctggtgctgctgagaggcgagaacctggtgagcatgaccgtggagggccccccccccaaggacaccggcatcgccagagtgcccctggccggcgccgccggcggccccggcgtgggcagagccgccggcagaggcgtgcccgccggcgtgcccatcccccaggcccccgccggcctggccggccccgtgagaggcgtgggcggccccagccagcaggtgatgaccccccagggcagaggcaccgtggccgccgccgccgtggccgccaccgccagcatcgccggcgcccccacccagtacccccccggcagaggcaccccccccccccccgtgggcagagccacccccccccccggcatcatggcccccccccccggcatgagaccccccatgggcccccccatcggcctgccccccgccagaggcacccccatcggcatgcccccccccggcatgagaccccccccccccggcatcagaggcccccccccccccggcatgagaccccccagaccctag

SEQ ID NO: 213248 - protein, 400 aa, Artificial Sequence
  derived and/or modified sequence
MSTELFSSTREEGSSGSGPSFRSNQRKMLNLLLERDTSFTVCPDVPRTPVGKFLGDSANLSILSGSPGFFRTSGSAFSWDDNGNLVDSEMKYLGSPITTVPKLDKNPNLGEDQAEEISDELMEFSLKDQEAKVSRSGLYRSPSMPENLNRPRLKQVEKFKDNTIPDKVKKKYFSGQGKLRKGLCLKKTVSLCDITITQMLEEDSNQGHLIGDFSKVCALPTVSGKHQDLKYVNPETVAALLSGKFQGLIEKFYVIDCRYPYEYLGGHIQGALNLYSQEELFNFFLKKPIVPLDTQKRIIIVFHCEFSSERGPRMCRCLREEDRSLNQYPALYYPELYILKGGYRDFFPEYMELCEPQSYCPMHHQDHKTELLRCRSQSKVQEGERQLREQIALLVKDMSP

SEQ ID NO: 213249 - DNA, 1203 bp, Artificial Sequence
  derived and/or modified sequence
atgagcaccgagctgttcagcagcaccagagaggagggcagcagcggcagcggccccagcttcagaagcaaccagagaaagatgctgaacctgctgctggagagagacaccagcttcaccgtgtgccccgacgtgcccagaacccccgtgggcaagttcctgggcgacagcgccaacctgagcatcctgagcggcagccccggcttcttcagaaccagcggcagcgccttcagctgggacgacaacggcaacctggtggacagcgagatgaagtacctgggcagccccatcaccaccgtgcccaagctggacaagaaccccaacctgggcgaggaccaggccgaggagatcagcgacgagctgatggagttcagcctgaaggaccaggaggccaaggtgagcagaagcggcctgtacagaagccccagcatgcccgagaacctgaacagacccagactgaagcaggtggagaagttcaaggacaacaccatccccgacaaggtgaagaagaagtacttcagcggccagggcaagctgagaaagggcctgtgcctgaagaagaccgtgagcctgtgcgacatcaccatcacccagatgctggaggaggacagcaaccagggccacctgatcggcgacttcagcaaggtgtgcgccctgcccaccgtgagcggcaagcaccaggacctgaagtacgtgaaccccgagaccgtggccgccctgctgagcggcaagttccagggcctgatcgagaagttctacgtgatcgactgcagatacccctacgagtacctgggcggccacatccagggcgccctgaacctgtacagccaggaggagctgttcaacttcttcctgaagaagcccatcgtgcccctggacacccagaagagaatcatcatcgtgttccactgcgagttcagcagcgagagaggccccagaatgtgcagatgcctgagagaggaggacagaagcctgaaccagtaccccgccctgtactaccccgagctgtacatcctgaagggcggctacagagacttcttccccgagtacatggagctgtgcgagccccagagctactgccccatgcaccaccaggaccacaagaccgagctgctgagatgcagaagccagagcaaggtgcaggagggcgagagacagctgagagagcagatcgccctgctggtgaaggacatgagcccctag

SEQ ID NO: 213250 - DNA, 1203 bp, Artificial Sequence
  derived and/or modified sequence
atgtccaccgagctgttctcgtcaacgagagaggagggcagctctgggagtggaccttcattccggagtaaccagcgcaaaatgctcaatctgttactggagcgggacacctcgttcacagtatgtcccgacgtgccaagaactcccgtgggtaaattccttggggatagcgccaatctctctattttatctggctcccccggtttctttcgcacttcagggtccgcgtttagctgggatgataacggtaatctagtggattcagaaatgaagtaccttgggtcacccatcaccacagtcccaaagcttgacaagaacccgaatctgggagaagatcaagcggaggaaataagtgatgagcttatggaattctcgctgaaggaccaggaggctaaggtcagccgatctggattatacagatctccaagtatgcccgaaaatctaaatcgacctcgccttaaacaggtggagaagttcaaagataatacaattccggacaaggttaagaaaaagtacttttcaggccagggaaaactgcgcaaaggattgtgcctcaagaaaaccgtgtcactctgcgacatcaccatcacacaaatgttagaggaggactccaaccagggccacctcattggagatttctccaaagtctgtgcccttccaactgtaagcggcaagcatcaggacctgaagtatgtaaatccggagaccgttgcagcactgctttcggggaaattccaaggcctgattgagaagttctatgttatagactgtcggtacccatatgaataccttggtggacacattcaaggagctcttaatctatactcacaggaggagctgtttaattttttccttaagaagcctattgtacccctcgatactcagaagagaatcataatcgtgttccactgcgagttctcctccgaacgaggcccaagaatgtgcaggtgccttcgggaggaagacaggtctctgaatcagtacccagctctgtattaccctgagctttatatcctcaaggggggttatcgcgatttttttcctgaatacatggaactgtgtgaaccgcagagctactgtcctatgcatcatcaggatcacaagaccgaacttctgcgctgtaggagccagtccaaggtgcaggagggagaaagacaactaagagagcagatcgcgttgctggtcaaagatatgtctccttag

SEQ ID NO: 213251 - DNA, 1203 bp, Artificial Sequence
  derived and/or modified sequence
atgtctacggagctgttcagctctaccagggaagaggggtcatctgggagtggcccctcgttccggtctaatcagcggaagatgctgaatctcctgttggagcgtgatacctcgtttactgtgtgccccgatgtccccagaactcccgtcgggaaattcctcggtgatagtgccaacctctccattctatcgggttctcccggctttttcaggacctccggtagcgcattctcttgggacgacaatggaaatttagtggattcagaaatgaagtacctaggatctcctatcaccaccgtgcctaaactggataaaaatcctaatctgggagaggaccaagctgaagagatttcggacgaactgatggagttctctcttaaggaccaagaagcaaaagtcagcagatccggcctgtatagaagcccttccatgcccgaaaatctgaataggccacgtctgaaacaggtagaaaaattcaaagataatactattccagataaggtcaaaaagaaatactttagcgggcaggggaagctccggaaagggctttgcttgaaaaagaccgtctcattgtgtgacattaccataacacaaatgctagaggaggacagtaatcaaggtcatttaatcggcgacttctccaaagtgtgtgcgcttcccactgtgtctgggaaacatcaggacctaaaatatgtgaaccctgagacagtggcggccctgctatcaggtaaatttcagggactcatcgaaaagttttacgttattgattgcagatacccatacgaatatctgggcggccacatacagggagcactgaatttatactcccaagaagagctcttcaatttttttttgaagaaaccaatcgttccccttgatacacagaaacgcatcataattgtgttccattgcgagttttcttcagaacggggaccgcgaatgtgtcggtgtctcagggaggaagatcgttctctcaatcagtaccccgccctgtactaccctgagctgtatattcttaaaggagggtatagagacttttttccagaatacatggaactgtgtgaacctcaatcatactgcccaatgcaccaccaagaccacaaaacagagctccttaggtgcaggagccagagtaaggtccaggaaggggaacggcagctgcgggaacagatcgcgctgttggttaaggatatgagtccgtag

SEQ ID NO: 213252 - DNA, 1203 bp, Artificial Sequence
  derived and/or modified sequence
atgagcacagagctgttcagcagcacccgggaggagggcagcagcggcagcggccccagcttccgcagcaaccagaggaagatgctgaacctgctgctggagcgggacaccagcttcaccgtgtgcccagatgtgcccaggacccctgtgggcaagttcctgggggacagcgccaacctgagcatcctgagcggcagccctggcttcttccgcaccagcggcagcgccttctcctgggatgacaatggaaacctggtggacagcgagatgaagtacctgggcagccccatcaccaccgtgcccaagctggacaagaaccccaacctgggggaggaccaggccgaggagatcagtgatgagctgatggagttcagcctgaaggaccaggaggccaaggtgagccgcagcggcctgtaccgcagccccagcatgcctgagaacctgaaccggccccggctgaagcaggtggagaagttcaaggacaacaccatcccagacaaggtgaagaagaagtacttcagcggccagggcaagctgaggaagggcctgtgcctgaagaagacagtgtccctgtgtgacatcaccatcacccagatgctggaggaggacagcaaccagggccacctgattggagacttcagcaaggtgtgtgccctgcccaccgtgtctgggaagcaccaggacctgaagtatgtgaaccctgagaccgtggccgccctgctgagcggcaagttccagggcctgattgagaagttctacgtgattgactgccgctacccctatgagtacctgggcggccacatccagggcgccctgaacctgtacagccaggaggagctgttcaacttcttcctgaagaagcccatcgtgcccctggacacccagaagaggatcatcatcgtgttccactgtgagttcagcagcgagcggggccccaggatgtgccgctgcctgcgggaggaggacaggagcctgaaccagtacccagccctgtactacccagagctgtacatcctgaagggcggctacagagacttcttccctgagtacatggagctgtgtgagccccagagctactgccccatgcaccaccaggaccacaagacagagctgctgcgctgccgcagccagagcaaggtgcaggagggggagcggcagctgcgggagcagatcgccctgctggtgaaggacatgagcccctag

SEQ ID NO: 213253 - DNA, 1203 bp, Artificial Sequence
  derived and/or modified sequence
atgagcaccgagctgttcagcagcacccgggaggagggcagcagcgggagtggtccaagctttcgcagcaatcagagaaaaatgttaaatctcttgctcgaacgcgacactagtttcacggtctgccccgatgtgccccgtaccccagtcggcaagtttttgggggattccgcaaacctctctatacttagcggctcaccaggctttttcaggacttcgggctccgctttctcatgggatgacaacgggaacctggtcgatagcgagatgaagtatcttgggagccccattactactgtgcccaagttggacaagaatcctaatctgggtgaggaccaagccgaggaaatcagtgatgaactgatggaattttcactcaaggaccaggaggcgaaggtttcccgaagtggcctgtacaggtcgcccagcatgccagaaaatctgaatcggccaaggttgaagcaggtggagaagtttaaggataacacaattccagacaaagtgaaaaaaaagtatttttctgggcagggcaaactgcgaaagggtctttgccttaaaaaaactgtgtccctgtgtgacataacaattacacagatgcttgaggaggacagcaatcagggtcacctgatcggagatttttccaaagtgtgcgctctgcctactgtgtctggaaagcaccaggatctgaagtacgttaatcccgagaccgtggccgctttgctttcaggcaagtttcagggattgatcgagaagttctatgtaatcgactgcaggtacccctatgagtatctgggtggtcatattcagggtgctctaaatctctattcccaggaggagttatttaacttcttcctcaaaaagcctattgttcccctcgatacacagaagcggatcattatcgtgtttcactgtgagttctcctcggagagaggcccccgaatgtgtcgctgcttgagggaggaagacagaagcctgaatcaataccctgctctgtactacccagagctttacattctgaaaggcggctacagagatttcttcccagagtatatggaactctgcgagccccagtcatattgtcccatgcaccatcaggatcataagaccgagcttctgcgatgcagatctcaatcaaaggtgcaagagggcgaaaggcagctgcgcgagcagatcgcgctcctggtgaaggatatgagtccttag

SEQ ID NO: 213254 - DNA, 1203 bp, Artificial Sequence
  derived and/or modified sequence
atgagcaccgagctgttcagcagcacccgggaggagggcagcagcggatctgggccatcttttagatcgaatcaacggaagatgctcaatctgcttctggagagggataccagtttcaccgtgtgccccgatgtgccgagaactcccgtgggcaagttcctcggcgactctgccaatcttagcatcttatctggatctcccgggttcttcagaacgtcaggctctgcgttcagctgggatgataatggaaacctggtggactccgaaatgaaatatcttggctctcctatcactactgtcccgaagctcgataaaaatcccaacctcggtgaagaccaggccgaagaaatttcagacgagcttatggaatttagtcttaaagatcaggaggcaaaggtgtcgcggagcgggctctatcgatcacctagcatgccggagaacttaaatcgtcccagactgaaacaggtagagaagttcaaggataataccatccccgataaggtcaagaagaaatacttctccggtcagggtaaactgagaaaaggtctgtgccttaagaaaaccgtgagtttatgcgatattacaatcacacagatgctggaggaggactccaaccagggacacctcatcggggatttctcaaaagtttgtgcgctgcctactgtgagtggaaagcaccaagacctgaaatacgtcaaccccgaaacagtggctgcacttctgtcaggtaaatttcagggcctcattgagaaattctatgtgatcgactgccgctatccgtatgaatacctcggtggccatatccagggtgcgcttaatttatactcccaggaggaactgttcaatttcttccttaagaaacctattgtccctttggatacgcagaaacggataataatcgtatttcattgtgaattctcatctgaaagaggtccacggatgtgtcggtgcctgagggaagaggataggagtctgaatcagtacccagcgctgtactatcccgaactttacatcttgaaggggggctatcgcgactttttcccggagtacatggagctgtgtgagcctcagtcttactgtcccatgcatcaccaggaccacaaaaccgaactgctgaggtgcagatcccagagtaaggtacaggaaggcgaaaggcagctaagagaacagatcgccctgcttgtgaaagatatgtcaccatag

SEQ ID NO: 213255 - DNA, 1203 bp, Artificial Sequence
  derived and/or modified sequence
atgtccacagaactgttttcaagtacaagggaggagggctcgagtggatccggaccttctttccgctcaaatcagcgcaagatgctgaatctcctgttagagagggacacaagctttactgtgtgtcccgacgtgccacgcacaccggtgggcaagttcctgggagatagcgccaatctgagcatcctgagcgggagtcccggtttctttcgtactagcgggtccgctttttcttgggacgataacgggaacctggtggatagcgagatgaaatacttgggatcaccaattacaacagtacccaagctggataagaatccaaacttaggcgaagaccaagccgaagaaatcagtgatgagttgatggaattctctctgaaggaccaggaggctaaagtctcccgatcaggtctgtatcgctccccgtcgatgcctgagaacctgaatcggcctcgtctcaagcaggtagagaagttcaaggacaacacaatacctgataaagtgaaaaaaaagtacttctccggccagggcaagctccggaaggggttatgcctgaagaagaccgtttctctttgtgacataactatcactcagatgcttgaagaggacagcaaccagggccacctgattggggatttcagtaaggtgtgtgcgctcccaacagtgtctggaaaacatcaagatttgaaatatgttaacccagagactgtggccgcactgctgtccgggaaattccaggggcttatcgagaaattttacgtaattgactgtcggtatccctacgaatacctgggcggtcacatccagggtgcattaaacctctattcccaggaggaactcttcaatttcttcctgaagaagccaatagtgccactggatacacagaaacgcattatcatcgtgtttcattgcgaattcagctccgagagaggtccacgcatgtgccgatgtctgcgcgaggaagacagatcgcttaaccagtaccccgctctctattatccagagctgtacatcctgaagggcggatatagggattttttcccagagtacatggagctgtgcgagccccagtcatattgtcccatgcaccatcaggaccacaagactgagctgctgcgctgtcgcagtcaatcgaaggtccaagaaggcgaacggcagctcagagagcaaatcgcacttctggttaaagacatgtctccgtag

SEQ ID NO: 213256 - DNA, 1203 bp, Artificial Sequence
  derived and/or modified sequence
atgtccacagaactcttctctagcacccgcgaagagggttcaagcggatccggaccaagtttcagaagtaaccagcgaaagatgcttaacctgcttctagagcgtgatacatcatttactgtatgtcccgacgttccaaggactcctgttggcaagttcttgggcgattccgccaacctcagcattctgtccgggagccccggattcttccggactagcggcagcgcgttctcttgggatgataacggaaaccttgtggatagtgagatgaaatatctggggagccctattaccacggtgcccaaacttgacaaaaacccaaaccttggagaagatcaggccgaggagatttctgacgagttgatggagttcagcctgaaggaccaggaagccaaggtatccaggtccggactatacaggtcccctagcatgccagaaaatctgaatagaccccgactgaaacaagtggaaaagttcaaagacaacaccatccccgacaaggtcaaaaagaagtatttttcgggccaaggcaaactgcgaaaaggactctgtctcaaaaaaacggtcagtttgtgcgacataaccattacgcagatgttggaagaagacagtaaccagggacacctcatcggcgacttttccaaggtctgcgctcttcctactgtttccgggaagcatcaggatctaaagtatgtcaaccccgagaccgtggccgcattgctatccggaaaatttcagggcctgattgagaaattttatgtcattgattgcaggtatccttatgagtatttgggagggcacatccagggggctctgaatctctactcacaggaagaactgttcaatttttttctgaaaaagcctatcgtgcctttagacactcagaagcgtatcattatcgtctttcactgcgagttttcatcggaacgaggacccaggatgtgccgctgcctacgggaggaagaccgaagccttaatcaatacccagcgttatactaccccgagctgtatatcctgaaaggcggataccgggattttttccccgaatacatggaattgtgtgagcctcaaagctactgccctatgcaccaccaagaccacaaaaccgagttactgaggtgtagatcacaatcaaaagtgcaggagggggagcgacagctcagagagcagatcgccctcctggtgaaagacatgtcaccctag

SEQ ID NO: 213257 - protein, 1255 aa, Artificial Sequence
  derived and/or modified sequence
MNGYAEFPPSPSNPTKEPVEPQPSQVPLQEDVDMSSGSSGHETNENCSTGRDSQGSDCDDSGKELGMLVEPPDARQSPDTFSLMMAKSEHNPSTSGCSSDQSSKVDTHKELIKTLKELKVHLPADKKAKGKASTLATLKYALRSVKQVKANEEYYQLLMSSEGHPCGADVPSYTVEEMESVTSEHIVKNADMFAVAVSLVSGKILYISDQVASIFHCKRDAFSDAKFVEFLAPHDVGVFHSFTSPYKLPLWSMCSGADSFTQECMEEKSFFCRVSVRKSHENEIRYHPFRMTPYLVKVRDQQGAESQLCCLLLAERVHSGYEAPRIPPEKRIFTTTHTPNCLFQDVDERAVPLLGYLPQDLIETPVLVQLHPSDRPLMLAIHKKILQSGGQPFDYSPIRFRARNGEYITLDTSWSSFINPWSRKISFIIGRHKVRVGPLNEDVFAAHPCTEEKALHPSIQELTEQIHRLLLQPVPHSGSSGYGSLGSNGSHEHLMSQTSSSDSNGHEDSRRRRAEICKNGNKTKNRSHYSHESGEQKKKSVTEMQTNPPAEKKAVPAMEKDSLGVSFPEELACKNQPTCSYQQISCLDSVIRYLESCNEAATLKRKCEFPANVPALRSSDKRKATVSPGPHAGEAEPPSRVNSRTGVGTHLTSLALPGKAESVASLTSQCSYSSTIVHVGDKKPQPELEMVEDAASGPESLDCLAGPALACGLSQEKEPFKKLGLTKEVLAAHTQKEEQSFLQKFKEIRKLSIFQSHCHYYLQERSKGQPSERTAPGLRNTSGIDSPWKKTGKNRKLKSKRVKPRDSSESTGSGGPVSARPPLVGLNATAWSPSDTSQSSCPAVPFPAPVPAAYSLPVFPAPGTVAAPPAPPHASFTVPAVPVDLQHQFAVQPPPFPAPLAPVMAFMLPSYSFPSGTPNLPQAFFPSQPQFPSHPTLTSEMASASQPEFPSRTSIPRQPCACPATRATPPSAMGRASPPLFQSRSSSPLQLNLLQLEEAPEGGTGAMGTTGATETAAVGADCKPGTSRDQQPKAPLTRDEPSDTQNSDALSTSSGLLNLLLNEDLCSASGSAASESLGSGSLGCDASPSGAGSSDTSHTSKYFGSIDSSENNHKAKMNTGMEESEHFIKCVLQDPIWLLMADADSSVMMTYQLPSRNLEAVLKEDREKLKLLQKLQPRFTESQKQELREVHQWMQTGGLPAAIDVAECVYCENKEKGNICIPYEEDIPSLGLSEVSDTKEDENGSPLNHRIEEQT

SEQ ID NO: 213258 - protein, 404 aa, Artificial Sequence
  derived and/or modified sequence
MNGYAEFPPSPSNPTKEPVEPQPSQVPLQEDVDMSSGSSGHETNENCSTGRDSQGSDCDDSGKELGMLVEPPDARQSPDTFSLMMAKSEHNPSTSGCSSDQSSKVDTHKELIKTLKELKVHLPADKKAKGKASTLATLKYALRSVKQVKANEEYYQLLMSSEGHPCGADVPSYTVEEMESVTSEHIVKNADMFAVAVSLVSGKILYISDQVASIFHCKRDAFSDAKFVEFLAPHDVGVFHSFTSPYKLPLWSMCSGADSFTQECMEEKSFFCRVSVRKSHENEIRYHPFRMTPYLVKVRDQQGAESQLCCLLLAERVHSGYEAPRIPPEKRIFTTTHTPNCLFQDVDESPAVRRAAFRLFSHSVSRPERRVHHVGHQLVQLHQPMEQENLLHHWEAQSQGGPFE

SEQ ID NO: 213259 - protein, 109 aa, Artificial Sequence
  derived and/or modified sequence
MNGYAEFPPSPSNPTKEPVEPQPSQVPLQEDVDMSSGSSGHETNENCSTGRDSQGSDCDDSGKELGMLVEPPDARQSPDTFSLMMAKSEHNPSTSGCSSDQSSKVDTHK

SEQ ID NO: 213260 - protein, 483 aa, Artificial Sequence
  derived and/or modified sequence
MNGYAEFPPSPSNPTKEPVEPQPSQVPLQEDVDMSSGSSGHETNENCSTGRDSQGSDCDDSGKELGMLVEPPDARQSPDTFSLMMAKSEHNPSTSGCSSDQSSKVDTHKELIKTLKELKVHLPADKKAKGKASTLATLKYALRSVKQVKANEEYYQLLMSSEGHPCGADVPSYTVEEMESVTSEHIVKNADMFAVAVSLVSGKILYISDQVASIFHCKRDAFSDAKFVEFLAPHDVGVFHSFTSPYKLPLWSMCSGADSFTQECMEEKSFFCRVSVRKSHENEIRYHPFRMTPYLVKVRDQQGAESQLCCLLLAERVHSGYEAPRIPPEKRIFTTTHTPNCLFQDVDERAVPLLGYLPQDLIETPVLVQLHPSDRPLMLAIHKKILQSGGQPFDYSPIRFRARNGEYITLDTSWSSFINPWSRKISFIIGRHKVRVGPLNEDVFAAHPCTEEKALHPSIQELTEQIHRLLLQVGVVPACPPPR

SEQ ID NO: 213261 - DNA, 1337 bp, Artificial Sequence
  derived and/or modified sequence
gtggtcgagccgcgcgcagggtgcgctcgtttgaactgcggtgacaccgagggttggggactcgaacccccgcttcgcagctcaggagcctgaggtccgaaagcttcgttccagagcccagcatgaatggatacgcggaatttccgcccagccccagtaaccccaccaaggagcccgtggagccccagcccagccaggtcccactgcaggaagatgtggacatgagcagtggctccagtggacatgagaccaacgaaaactgctccacggggcgggactcgcagggcagtgactgtgacgacagtgggaaggagctggggatgctggtggagccaccggatgcccgccagagtccagatacctttagcctgatgatggcaaaatctgaacacaacccatctacaagtggctgcagtagcgaccagtcttcgaaagtggacacacacaaagaactgataaaaacactaaaggagctgaaggtccacctccctgcagacaagaaggccaagggcaaggccagtacgctggccaccttgaagtacgccctcaggagcgtgaagcaggtgaaagccaatgaagagtattaccagctgctgatgtccagcgagggtcacccctgtggagcagacgtgccctcctacaccgtggaggagatggagagcgttacctctgagcacattgtgaagaatgccgatatgtttgcggtggccgtgtccctggtgtctgggaagatcctgtacatctctgaccaggttgcatccatatttcactgtaaaagagatgccttcagcgatgccaagtttgtggagttcctggcgcctcacgatgtgggcgtgttccacagtttcacctccccgtacaagcttcccttgtggagcatgtgcagtggagcagattcttttactcaagaatgcatggaggagaaatctttcttttgccgtgtcagtgtccggaaaagccacgagaatgaaatccgctaccaccccttccgcatgacgccctacctggtcaaggtgcgggaccaacaaggtgctgagagtcagctttgctgccttctgctggcagagagagtgcactctggttatgaagcccctagaattcctcctgaaaagagaatttttacaaccacccatacaccaaattgtttgttccaggatgtggatgaaagtcctgcagtcaggcgggcagcctttcgactattctcccattcggtttcgcgcccggaacggagagtacatcacgttggacaccagctggtccagcttcatcaacccatggagcaggaaaatctccttcatcattgggaggcacaaagtcagggtgggccctttgaatga

SEQ ID NO: 213262 - DNA, 3768 bp, Artificial Sequence
  derived and/or modified sequence
atgaacggttatgccgagtttccaccaagcccatccaatccaaccaaggaaccggtggaaccgcagcccagtcaggtgccactgcaggaagatgtggacatgtcctccggaagcagtggccacgaaaccaatgagaactgctcaaccggacgggatagtcagggatcagactgtgacgattctggtaaggagctgggtatgctggtggagcccccggacgcaaggcagagccccgataccttttcactgatgatggcgaaatctgagcataacccgagtacgagcgggtgcagctcagatcagtctagtaaggttgacacccataaggagctgattaagacattgaaggaattgaaggtgcacttaccagccgataagaaggcaaagggaaaggcctcaacccttgccaccctgaagtacgccctgcgctcagtgaagcaagtgaaagccaacgaggaatattatcagttgttaatgagctcggaggggcatccctgtggggccgatgtcccctcctataccgtagaagagatggagtccgtcaccagcgagcatatcgtgaagaacgcagacatgtttgccgtggctgtgagccttgtaagcgggaagatcttatatatctcggatcaagtggcctccatatttcactgcaagcgggatgccttctcggacgctaagtttgttgaatttttggcaccacacgatgttggagtcttccactcctttacttccccctataaactacctctttggagtatgtgttccggtgcagattcctttacacaggaatgcatggaagagaagtcttttttttgtagggtgagcgtgaggaaaagccacgagaacgagatccggtatcaccccttcaggatgacgccctacctggttaaagtgagagaccagcagggagccgaatcacaactctgctgtctgctattggctgaaagggtccactccggctacgaagctccaaggatcccccctgaaaaacgaatcttcacgaccacacacacaccaaactgccttttccaagatgttgatgagagagctgtgccactcctgggctaccttccacaagacctgatcgaaactcccgtcctcgttcaactgcatccttctgatcggcccttgatgttggccatccataagaaaattctccagagcggcggtcagcccttcgattacagtccaattagattccgtgctcgaaacggagagtacattacattggatacttcatggtctagcttcatcaatccctggagccgaaagattagcttcatcataggacggcacaaggtgagagtaggccccctgaatgaagatgtgttcgcagcccacccttgtacggaagagaaggctttgcacccctccattcaggaactgacggaacagattcatcggctgctgttacagcccgtgccccactctgggtctagcgggtacgggtccctggggtccaatggctctcacgagcacctgatgtctcagacctctagttccgactctaatggccacgaagatagtcgtcgccggagagccgaaatttgcaagaatggtaataagacaaagaacagatcccattacagccacgagtccggagagcagaaaaagaagtctgtcactgaaatgcagactaatccgcccgctgaaaagaaagctgtgcccgccatggagaaggatagtctgggcgtgagcttccccgaggaacttgcgtgcaaaaatcaaccgacttgctcttatcagcaaatcagctgcctggacagtgtcatccgctatctggagtcttgcaatgaggccgccacactgaaacgcaagtgtgagttccccgctaacgttcctgccctgaggtcttctgacaaacggaaggctaccgtatctcctggcccccacgctggagaggccgagccaccatcccgggtcaattctagaaccggcgtcggaacccacctcacttccctggccctccccggcaaggctgagtctgtagcatctctgacatcacaatgctcctactcatccacaatagtacatgtgggagacaagaaacctcagccggaactggaaatggtcgaagatgccgcttccgggccagagagcctcgactgtctcgccgggccggcacttgcctgcgggctctcccaggaaaaggagccgtttaagaaactgggactgacgaaggaagtgctcgcagcccacacccaaaaagaagagcagagcttcctgcagaaatttaaagagataaggaagctgtctatttttcagagtcactgccactattacctgcaagaaagatctaaggggcagccaagcgagcggactgcacctgggttgcgtaacacatctggaatagattccccttggaaaaaaacaggaaagaacagaaagctcaagtccaagagagttaagcctcgcgatagctctgaatctacaggcagcggcggcccagtctctgccagacctcctctggtgggccttaacgcaaccgcctggagtccctctgataccagtcagtcttcttgcccagctgtgccatttccagcaccggtgccagcggcatacagccttcccgtgtttcccgccccaggcacggtggctgcaccccccgcacctcctcatgcatcctttaccgtaccagccgtaccagtggacttgcagcatcagttcgccgtgcagccacctccgtttcctgcgccactagcgcctgtgatggcttttatgctgcctagttactcatttcctagcggaacacccaacttaccgcaggcatttttccctagccagcctcagttcccatcccacccaaccttgaccagtgaaatggctagtgcaagtcagcctgaatttcctagccggacttcaattcccaggcaaccgtgcgcatgccccgctacacgagccacacccccatcggctatgggaagggccagcccccccctgtttcagagccgatcctcatcacccctgcagctgaatctgcttcagctcgaggaggcccccgaaggcggaaccggagcaatgggaaccacaggcgctactgagaccgcagcagtgggagctgattgtaaacctgggacatccagggatcagcagcctaaagccccactcaccagagacgaaccgtccgatacccagaatagcgatgcactaagtactagctccggactcttaaacctgctgctgaatgaggatctgtgctccgccagcggttccgccgcctccgagagcctgggaagcggctctcttggttgcgatgcgagcccctctggcgccggctcgtcagacacatctcacacttcaaaatattttggctccatcgacagtagcgaaaataatcacaaggcaaaaatgaatacggggatggaagaatccgagcactttattaaatgcgtattgcaggacccaatctggttgttgatggcagacgccgacagctctgtgatgatgacataccagctcccatctaggaatctcgaagctgtgcttaaagaagatagggagaagctgaaactcctacaaaaactacagccacggttcaccgaaagccagaaacaggagctccgggaggtacatcagtggatgcagactgggggactccctgcagctatcgacgttgccgaatgcgtctattgtgagaataaggagaagggcaatatctgcattccctacgaggaagacatcccttcactgggactcagcgaagtgagtgacacaaaggaggacgagaacgggtcccctctcaatcacagaatcgaggaacagacttag

SEQ ID NO: 213263 - DNA, 1215 bp, Artificial Sequence
  derived and/or modified sequence
atgaacgggtatgctgaattcccgccctcgccttccaacccgacaaaagaaccagttgagccacagccttctcaggtgcccctgcaggaggacgtggacatgtcttcaggtagctccgggcatgaaacaaacgaaaactgcagcacgggaagggatagccagggaagtgattgtgacgattccggaaaagagctgggtatgcttgttgaaccacccgacgccagacaatcaccagacaccttttccctgatgatggctaaaagcgagcacaacccaagcacctctggttgctcaagcgaccaatcatctaaggtggacacacacaaggagcttattaaaacattgaaggaactgaaggtccacctacccgccgacaagaaggcaaagggcaaggccagtacactagccacactgaagtacgccttgaggagtgtgaaacaagtcaaggccaacgaggagtactatcagctgcttatgtctagcgaggggcatccttgtggagctgatgtgccttcctacaccgtggaggaaatggaatcggtgacctcagaacacatagttaagaatgcggatatgtttgccgtcgccgtttcactggtttctggaaaaatcctgtatatcagcgaccaggtcgcttcaatcttccattgcaaacgcgacgcattttctgacgccaagtttgtcgaattcctggccccccacgatgtcggcgtcttccactcgtttactagcccgtacaaacttccattgtggtcaatgtgcagtggtgccgatagcttcacgcaagaatgcatggaggagaagtccttcttttgcagagttagcgtgagaaaatcgcatgagaatgaaatcagatatcaccccttccgcatgacaccctacctggtgaaggtccgtgaccagcagggcgcagagagccagctttgctgcctgctcctggccgaaagagttcactccggatacgaggcacctagaattccccccgaaaagcgcatctttaccacgacccataccccaaattgcctctttcaggacgtagatgagagtcctgccgtgagacgtgcagcttttcgcctgttctcccatagcgtgtcacgtccggaacggagggtgcatcacgtgggccaccagctcgtgcagctgcaccagcctatggaacaggaaaatctgctgcaccactgggaagcccagtcacaggggggaccctttgaatag

SEQ ID NO: 213264 - DNA, 1215 bp, Artificial Sequence
  derived and/or modified sequence
atgaacggttacgccgaatttcccccttcccctagcaatcctacgaaagagccagtcgagccacaaccttcccaggttcccttgcaggaagacgttgacatgtccagtggatcaagcggtcacgaaacgaacgaaaattgtagcactggccgcgactcgcaaggttcagactgtgatgattctggcaaggagctgggcatgcttgtagaaccgccagacgccagacagagtccggatacattttccttaatgatggcaaagtctgaacacaacccgtctacctcaggttgttctagtgatcagtcgagtaaagtcgatacacacaaagagttaatcaagaccctgaaggagttgaaagtccatctgcccgccgataaaaaggcaaaggggaaggcctcgacactggccactctcaagtacgcactgcgctcagtcaagcaggttaaagccaatgaggagtattaccagctcctcatgagttctgagggccacccttgtggagcagatgtgcctagctacaccgtggaagaaatggaatccgtgacgtcagaacacattgtcaagaacgccgatatgttcgccgtcgccgttagccttgtgagtggaaagattctgtacatatcggaccaagtagcttcaatctttcattgtaagcgagacgctttcagtgacgcaaagttcgtggagtttctggcgccccacgatgtgggagtgttccactcctttaccagtccctacaaactgccactctggtccatgtgttctggggccgactcattcacacaggaatgcatggaggagaagagcttcttttgccgcgtatcagtcaggaagtcacatgaaaacgagatccgctaccacccttttaggatgacgccatatctggtgaaggtgcgcgaccagcagggcgccgagtctcagttgtgttgtcttctactcgccgaacgagtacactctgggtacgaggccccgagaatccctccggagaagaggatatttactaccacccatacccctaactgcctgtttcaggacgtggatgagagccccgctgtccgtcgcgccgcctttagactttttagtcacagcgtgtccagacccgaaagacgggttcaccacgtgggccatcagctggtccaactgcaccagccaatggagcaggagaacctacttcatcattgggaggcacagagccaggggggaccctttgagtag

SEQ ID NO: 213265 - DNA, 330 bp, Artificial Sequence
  derived and/or modified sequence
atgaacgggtatgccgagtttccccctagcccaagtaaccccactaaggagccagtggagccccagcctagccaggtacccctacaagaggatgtagacatgagctcaggatcttccgggcatgaaaccaacgaaaactgtagtactggacgggacagtcagggatctgattgcgacgattcgggtaaggagctaggaatgctcgtcgaacctccagatgctagacagagtccagatacattttctctcatgatggcaaagagcgagcataaccctagcaccagtgggtgctcttctgatcaaagctctaaagtggacacacataaatag

SEQ ID NO: 213266 - DNA, 1452 bp, Artificial Sequence
  derived and/or modified sequence
atgaacggatacgctgagtttcctccatcaccatccaatcccaccaaggagcccgtcgaaccacagccttcgcaggtgccactgcaggaggacgttgacatgtctagcgggtcctccggccacgaaaccaacgagaactgctccactggccgcgacagccaggggtccgattgtgatgactcaggaaaggaactcggtatgttggtcgagccgccagacgcacgtcagtctcctgacacgttttctctgatgatggcgaagtcagagcacaaccctagtacaagcggctgcagctccgaccaatccagcaaggtagacacacataaagagcttatcaaaacgctgaaggaactgaaggttcacctgcccgcagataagaaagccaaggggaaagcgtccacgctggccactctgaaatacgccttacgaagcgtaaaacaggtcaaagctaacgaagaatactatcagttgctcatgagttccgaaggtcacccatgtggagctgatgtgcctagttatactgtggaggagatggaatctgtgactagtgaacacattgtgaagaacgccgacatgtttgcagttgccgtgtctttggtgagcggcaaaatcctctatataagtgatcaagtcgcttctattttccactgcaaacgcgacgccttctcagatgcaaaatttgttgagtttctggccccacacgatgttggagtgttccattcctttacgtccccttacaaactgccattgtggagtatgtgtagtggggccgatagcttcacccaggaatgtatggaggagaaaagttttttttgtcgcgttagcgttcggaagagccatgagaacgagattcgctatcatcccttcagaatgacgccctacctggttaaagtacgagaccaacagggagccgaaagccagctgtgttgcctgctactcgccgagagagtccacagcgggtatgaggctccgaggatcccgcccgaaaagaggatcttcaccactactcacacacccaactgcctctttcaggatgtggatgagcgcgcagtgccccttttgggctatctgccccaagaccttatcgagacccctgttctggttcaactgcacccttcagacagacctctcatgttagccatacacaagaagatactgcagagcggaggccagccatttgattattctcccataagatttagggccagaaatggcgaatacattacgctggatacttcatggtcctcttttattaacccgtggagccgaaagatttcttttatcatcggacgccacaaagtgagagttggcccactgaatgaagacgtctttgccgctcacccatgtacagaggaaaaggctcttcatccttcaatccaggagctgactgaacagatccacagactgctcctccaagtaggcgtggttccagcctgccctcccccccgttag

SEQ ID NO: 213267 - DNA, 3768 bp, Artificial Sequence
  derived and/or modified sequence
atgaatggctatgcagagttcccccccagccccagcaaccccaccaaggagcctgtggagccccagcccagccaggtgcccctgcaggaggatgtggacatgagcagcggcagcagcggccacgagaccaatgaaaactgcagcacaggccgggacagccagggcagtgactgtgatgattctgggaaggagctgggcatgctggtggagcccccagatgcccggcagagcccagacaccttcagcctgatgatggccaagtctgagcacaaccccagcaccagcggctgcagcagtgaccagagcagcaaggtggacacccacaaggagctgatcaagaccctgaaggagctgaaggtgcacctgcctgctgacaagaaggccaagggcaaggccagcaccctggccaccctgaagtatgccctgcggtctgtgaagcaggtgaaggccaatgaggagtactaccagctgctgatgagcagcgagggccacccctgtggggctgatgtgcccagctacacagtggaggagatggagagcgtgaccagcgagcacatcgtgaagaatgctgacatgtttgctgtggccgtgtccctggtgtctgggaagatcctgtacatcagtgaccaggtggccagcatcttccactgcaagagagatgccttcagtgatgccaagtttgtggagttcctggcccctcatgatgtgggcgtcttccacagcttcaccagcccctacaagctgcccctgtggagcatgtgcagcggggctgacagcttcacccaggagtgcatggaggagaagagcttcttctgccgggtgtctgtgaggaagagccatgaaaatgagatccgctaccaccccttcaggatgaccccctacctggtgaaggtgcgggaccagcagggcgctgagagccagctgtgctgcctgctgctggccgagcgggtgcacagcggctatgaggccccccgcatccccccagagaagaggatcttcaccaccacccacacccccaactgcctcttccaggatgtggatgaaagagctgtgcccctgctgggctacctgccccaggacctgattgagacccctgtgctggtgcagctgcaccccagcgaccggcccctgatgctggccatccacaagaagatcctgcagagcggcggccagccctttgactacagccccatccgcttccgggccagaaatggagagtacatcaccctggacacctcctggagcagcttcatcaacccctggagcaggaagatctccttcatcatcggccgccacaaggtgcgggtgggccccctgaatgaagatgtgtttgctgcccacccctgcacagaggagaaggccctgcaccccagcatccaggagctgacagagcagatccaccggctgctgctgcagcctgtgccccacagcggcagcagcggctacggcagcctgggcagcaatggcagccatgagcacctgatgagccagaccagcagcagtgacagcaatggacatgaggacagcagaagaagaagagctgagatctgcaagaatggaaacaagaccaagaacagaagccactacagccatgaaagtggagagcagaagaagaagtctgtgacagagatgcagaccaaccccccagctgagaagaaggctgtgcctgccatggagaaggacagcctgggcgtgtccttccctgaggagctggcctgcaagaaccagcccacctgcagctaccagcagatcagctgcctggacagcgtcatccgctacctggagagctgcaatgaggccgccaccctgaagaggaaatgtgagttccctgccaacgtgcctgccctgcggagcagtgacaagaggaaggccaccgtgtccccaggcccccacgccggggaggccgagccccccagccgggtgaacagcaggactggagtgggcacccacctgaccagcctggccctgcccgggaaggccgagagcgtggccagcctgaccagccagtgcagctacagcagcaccatcgtgcacgtgggggacaagaagccccagcctgagctggagatggtggaggatgctgccagcggccctgagagcctggactgcctggccggccctgccctggcctgtggcctgagccaggagaaggagcccttcaagaagctgggcctgaccaaggaggtgctggccgcccacacccagaaggaggagcagagcttcctgcagaagttcaaggagatcaggaagctgagcatcttccagagccactgccactactacctgcaggagaggagcaagggccagcccagcgagaggacagcccctggcctgaggaacaccagcggcatcgacagcccctggaagaagacaggcaagaacaggaagctgaagagcaagagggtgaagccccgggacagcagcgagagcactggaagtggcggccctgtgtctgcccggccccccctggtgggcctgaatgccacagcctggagccccagcgacaccagccagagcagctgcccagctgtgcccttccctgcccctgtgcctgctgcctacagcctgcctgtgtttcctgcccctggcaccgtggccgcccccccagcccctcctcatgccagcttcaccgtgcctgctgtgcctgtggacctgcagcaccagtttgctgtgcagcccccacccttccctgcccccctggcccctgtgatggccttcatgctgcccagctacagcttccccagcggcacccccaacctgccccaggccttcttccccagccagccccagttccccagccaccccaccctgaccagcgagatggccagcgccagccagcctgagttccccagcaggaccagcatcccccggcagccctgtgcctgcccagccacccgggccaccccaccttctgccatgggccgggccagccccccactcttccagagccgcagcagcagccccctgcagctgaacctgctgcagctggaggaggcccctgagggcggcaccggggccatgggcaccaccggggccacagaaacagctgctgtgggcgctgactgcaagccaggcaccagccgggaccagcagcccaaggcccccctgaccagagatgagcccagcgacacccagaacagtgatgccctgagcaccagcagcggcctgctgaacctgctgctgaatgaagacctgtgcagcgccagcggcagcgctgccagcgagagcctgggcagcggcagcctgggctgtgatgccagccccagcggggccggcagcagtgacaccagccacaccagcaagtacttcggcagcattgacagcagcgagaacaaccacaaggccaagatgaacacaggcatggaggagagcgagcacttcatcaagtgtgtgctgcaggaccccatctggctgctgatggctgatgctgacagctctgtgatgatgacctaccagctgcccagcaggaacctggaggccgtgctgaaggaggaccgggagaagctgaagctgctgcagaagctgcagccccgcttcacagagagccagaagcaggagctgcgggaggtgcaccagtggatgcagacaggaggcctgcctgctgccattgatgtggctgaatgtgtgtactgtgagaacaaggagaagggcaacatctgcatcccctatgaggaggacatccccagcctgggcctgtctgaggtgtctgacaccaaggaggatgaaaatggcagccccctgaaccacagaattgaggagcagacctag

SEQ ID NO: 213268 - DNA, 1215 bp, Artificial Sequence
  derived and/or modified sequence
atgaatggctatgcagagttcccccccagccccagcaaccccaccaaggagcctgtggagccccagcccagccaggtgcccctgcaggaggatgtggacatgagcagcggcagcagcggccacgagaccaatgaaaactgcagcacaggccgggacagccagggcagtgactgtgatgattctgggaaggagctgggcatgctggtggagcccccagatgcccggcagagcccagacaccttcagcctgatgatggccaagtctgagcacaaccccagcaccagcggctgcagcagtgaccagagcagcaaggtggacacccacaaggagctgatcaagaccctgaaggagctgaaggtgcacctgcctgctgacaagaaggccaagggcaaggccagcaccctggccaccctgaagtatgccctgcggtctgtgaagcaggtgaaggccaatgaggagtactaccagctgctgatgagcagcgagggccacccctgtggggctgatgtgcccagctacacagtggaggagatggagagcgtgaccagcgagcacatcgtgaagaatgctgacatgtttgctgtggccgtgtccctggtgtctgggaagatcctgtacatcagtgaccaggtggccagcatcttccactgcaagagagatgccttcagtgatgccaagtttgtggagttcctggcccctcatgatgtgggcgtcttccacagcttcaccagcccctacaagctgcccctgtggagcatgtgcagcggggctgacagcttcacccaggagtgcatggaggagaagagcttcttctgccgggtgtctgtgaggaagagccatgaaaatgagatccgctaccaccccttcaggatgaccccctacctggtgaaggtgcgggaccagcagggcgctgagagccagctgtgctgcctgctgctggccgagcgggtgcacagcggctatgaggccccccgcatccccccagagaagaggatcttcaccaccacccacacccccaactgcctcttccaggatgtggatgagagccctgctgtgagaagagctgccttccgcctcttcagccacagcgtgtccaggcctgagaggagagtgcaccacgtgggccaccagctggtgcagctgcaccagcccatggagcaggagaacctgctgcaccactgggaggcccagagccagggcggcccctttgaatag

SEQ ID NO: 213269 - DNA, 330 bp, Artificial Sequence
  derived and/or modified sequence
atgaatggctatgcagagttcccccccagccccagcaaccccaccaaggagcctgtggagccccagcccagccaggtgcccctgcaggaggatgtggacatgagcagcggcagcagcggccacgagaccaatgaaaactgcagcacaggccgggacagccagggcagtgactgtgatgattctgggaaggagctgggcatgctggtggagcccccagatgcccggcagagcccagacaccttcagcctgatgatggccaagtctgagcacaaccccagcaccagcggctgcagcagtgaccagagcagcaaggtggacacccacaagtag

SEQ ID NO: 213270 - DNA, 1452 bp, Artificial Sequence
  derived and/or modified sequence
atgaatggctatgcagagttcccccccagccccagcaaccccaccaaggagcctgtggagccccagcccagccaggtgcccctgcaggaggatgtggacatgagcagcggcagcagcggccacgagaccaatgaaaactgcagcacaggccgggacagccagggcagtgactgtgatgattctgggaaggagctgggcatgctggtggagcccccagatgcccggcagagcccagacaccttcagcctgatgatggccaagtctgagcacaaccccagcaccagcggctgcagcagtgaccagagcagcaaggtggacacccacaaggagctgatcaagaccctgaaggagctgaaggtgcacctgcctgctgacaagaaggccaagggcaaggccagcaccctggccaccctgaagtatgccctgcggtctgtgaagcaggtgaaggccaatgaggagtactaccagctgctgatgagcagcgagggccacccctgtggggctgatgtgcccagctacacagtggaggagatggagagcgtgaccagcgagcacatcgtgaagaatgctgacatgtttgctgtggccgtgtccctggtgtctgggaagatcctgtacatcagtgaccaggtggccagcatcttccactgcaagagagatgccttcagtgatgccaagtttgtggagttcctggcccctcatgatgtgggcgtcttccacagcttcaccagcccctacaagctgcccctgtggagcatgtgcagcggggctgacagcttcacccaggagtgcatggaggagaagagcttcttctgccgggtgtctgtgaggaagagccatgaaaatgagatccgctaccaccccttcaggatgaccccctacctggtgaaggtgcgggaccagcagggcgctgagagccagctgtgctgcctgctgctggccgagcgggtgcacagcggctatgaggccccccgcatccccccagagaagaggatcttcaccaccacccacacccccaactgcctcttccaggatgtggatgaaagagctgtgcccctgctgggctacctgccccaggacctgattgagacccctgtgctggtgcagctgcaccccagcgaccggcccctgatgctggccatccacaagaagatcctgcagagcggcggccagccctttgactacagccccatccgcttccgggccagaaatggagagtacatcaccctggacacctcctggagcagcttcatcaacccctggagcaggaagatctccttcatcatcggccgccacaaggtgcgggtgggccccctgaatgaagatgtgtttgctgcccacccctgcacagaggagaaggccctgcaccccagcatccaggagctgacagagcagatccaccggctgctgctgcaggtgggcgtggtgcctgcctgccccccaccaagatag

SEQ ID NO: 213271 - DNA, 3768 bp, Artificial Sequence
  derived and/or modified sequence
atgaacggctacgccgagttcccccccagccccagcaaccccaccaaagaacccgttgagccccagcctagccaggtcccactgcaggaagatgtggacatgtccagcggctcatccggtcacgagacaaatgagaactgttcaacggggagagattcgcaggggtctgattgcgatgattccgggaaggaactgggcatgttagtcgagcccccagacgctcggcagagccctgatacatttagtctgatgatggccaagtctgaacataacccctctacaagcggatgttcctcagatcagagctcaaaggtggacacccacaaggaactcattaagacgctaaaagagctgaaggtgcatctgcctgcggataaaaaggccaaagggaaagctagtactctggcaactctgaaatatgccttgcgcagcgtcaaacaggtgaaggctaatgaggagtactatcaactgctcatgtcttctgaggggcacccctgcggggccgacgtgccctcttacactgtggaggagatggaaagcgtgaccagtgaacatatagtgaaaaatgctgacatgtttgctgttgccgtgtccctggtgtcaggcaaaattttatacataagcgatcaggttgcaagtatctttcactgtaaacgggacgcctttagcgacgccaagtttgttgagtttttagcaccacacgacgtgggcgtctttcactcatttactagcccatacaaacttccactatggtctatgtgttccggggcagatagctttacccaggagtgcatggaagaaaaatccttcttttgtcgggtgtctgtgaggaaatcacacgaaaatgaaataagatatcaccctttcagaatgaccccatacttggtaaaagtgcgggatcagcagggggcggaaagtcagctgtgctgtctccttttggctgaacgcgtgcatagtggatacgaggctccgaggattccgcccgaaaaacgcatcttcaccaccacccatactcctaactgcctgtttcaggacgtggacgagcgggccgtcccgctgctgggttatttaccccaggatctgattgagacccctgttttagtccagctccacccctccgacaggccactgatgctggccatacataagaaaattctgcagagcggcggacaaccattcgactactcaccgattcggtttagagcacggaacggagaatacatcactctggatacatcctggtcctccttcattaacccatggtcaagaaaaatatcatttatcatcgggcggcataaggtgcgcgtgggtcctctcaacgaggatgtgtttgcagcacatccatgcaccgaggaaaaagccctgcacccaagcatccaggaattgaccgagcagatacacagactgctgctgcaacctgtaccccacagcggatccagtggctacggcagcctcggctccaacggttcacacgagcacctgatgtcacagaccagcagttctgacagtaacggccatgaagattcaagacgacggcgagccgagatctgtaaaaacggcaataaaactaaaaacaggagccactactctcatgagagcggcgaacaaaagaaaaagtctgtgactgagatgcaaactaaccctcccgctgagaagaaggctgtgccagcaatggaaaaggattcactcggcgtctccttccctgaggaactggcgtgcaagaatcaacctacttgcagctaccagcaaatatcctgtctagattcagttatccgttatctggagtcatgtaacgaggctgctacactcaaacgtaaatgcgagtttcccgccaatgtgccagcgttgcgatcttctgataaacgtaaggccactgtgtcccctggaccacatgccggcgaggcagaaccacccagtcgagtgaatagtagaaccggggtgggaacccacttgacgtctctggcactcccgggtaaagcggaatctgtggcgtcgctgacttcccaatgctcatactcttccaccatcgtgcacgtgggcgataagaaaccacaacctgagttagagatggtggaggacgcagccagtgggccagagagccttgattgtctggcaggcccggcgctagcttgcggattatcgcaggaaaaagagccctttaaaaaactggggctgacaaaggaggtgctcgctgctcatactcagaaggaggaacagagtttcctgcagaagttcaaggagatcagaaaattgtcaatctttcagagtcactgccactactatctgcaggagaggagcaagggccagccgagcgagcggactgcacctggattgcgcaatactagcggcatcgattctccctggaagaaaaccgggaagaatagaaagttgaagagtaagcgggtaaaacctagagattcctcagaaagcaccggatcaggaggaccagtgtcagctcggccgccgctggttggactgaacgctactgcctggagcccctccgacacgagccaatcttcctgtccggccgtgccatttcctgctcctgttcctgccgcatactctctcccagtgtttcctgccccaggtaccgtagctgccccacctgccccccctcacgcaagtttcactgtccccgccgtcccagtggatctccagcaccagtttgccgtgcagccgccaccctttccagcccccttggcacctgtgatggcattcatgctgccttcttacagtttcccctcaggcactcccaatctgccccaagccttctttcccagtcaaccacagtttccttctcaccccactctgacgtcagagatggcctcggccagtcagcctgagttcccgtctagaacttccataccacgccagccttgtgcgtgcccggctacccgagccactcccccctccgctatgggaagggcaagccccccccttttccagtcccgaagctcttcccctctccaactgaatctacttcaattagaggaagccccagaaggcggtaccggagccatgggcacaactggcgccacggaaactgcagcagttggagccgattgtaagcctggcacctcccgggatcagcagcccaaggcaccactcaccagggacgagccgagcgatacgcaaaactctgatgccctcagcactagctccgggctgctgaacctcctgcttaatgaagacctatgctccgcctctggctccgctgcctccgaaagtctagggagtggatccctgggatgcgatgcttccccctccggggcaggcagttccgataccagtcatacctcgaagtactttggctcaattgactcctccgaaaataatcacaaggccaaaatgaacacaggaatggaggaatctgaacattttattaaatgcgtgctacaggatcctatttggctgctgatggcggacgcagattcctcagtgatgatgacatatcagctccctagcaggaatctggaagctgttcttaaagaggaccgcgagaagctcaagttactgcaaaaacttcagccccgtttcacagagagccaaaagcaggaattacgtgaggtccaccagtggatgcagactggcgggttacctgcagcaatcgatgtggcagagtgtgtgtattgtgagaacaaagaaaaagggaacatttgcatcccctacgaggaggacattccctccttagggctgtccgaagtgagcgataccaaggaagatgaaaatgggagtccgctgaatcataggattgaagagcagacgtag

SEQ ID NO: 213272 - DNA, 1215 bp, Artificial Sequence
  derived and/or modified sequence
atgaacggctacgccgagttcccccccagccccagcaaccccaccaaagagcctgtggagccccaaccttcccaagtccccctgcaagaggatgttgatatgtcgtctgggtcctcaggccacgagactaacgaaaactgcagtaccggacgggatagtcagggcagtgattgcgatgactccggaaaggaactgggtatgctggtggagccccccgatgccagacagtcgcctgacaccttcagcttgatgatggccaagtccgagcacaaccccagcacaagtgggtgttcgagcgatcaaagcagtaaggtggatacgcacaaagagttgattaagaccctaaaagaattgaaagtgcatctgccggccgataaaaaggcaaagggaaaagcttccacactggccaccctgaaatatgcgttgcgctctgtgaaacaggtaaaagcaaacgaagaatattatcagctgctaatgtcctccgaggggcatccctgtggagccgatgttcccagttacactgtggaggagatggagtccgtgacgtccgagcatattgttaaaaacgctgacatgttcgctgtggccgtcagcctcgtctcaggaaagattctttacatcagtgaccaggtcgccagcatcttccattgtaagcgggacgcatttagtgacgccaaattcgttgaatttttggccccccacgacgttggcgtgttccattctttcaccagcccatataagctgccgctgtggagtatgtgcagtggcgccgatagcttcacgcaggaatgcatggaagagaagagtttcttctgcagagtctcagtccgtaagtcccacgagaatgaaataagatatcaccctttcagaatgaccccatacctggttaaggtccgtgaccaacaaggcgcagagagtcagctgtgctgcctgttgctggccgaacgcgtccacagcggttatgaggcacctaggattcctcccgaaaagagaatttttactaccactcacacgccgaattgtctgtttcaggacgtagacgagtcacctgcggtgcggcgagcagctttcagactcttttcacactctgtaagtcggcccgagagaagagtgcaccacgtgggccatcaacttgtgcagctgcatcaaccaatggaacaggaaaatctgttgcaccattgggaggcacagtcacagggaggcccattcgagtag

SEQ ID NO: 213273 - DNA, 1215 bp, Artificial Sequence
  derived and/or modified sequence
atgaacggctacgccgagttcccccccagccccagcaaccccaccaaggaaccagtggaaccccagccctcccaggttcctttacaagaagatgtggatatgtcctctggctcatcaggccacgagacaaacgagaattgtagcaccggcagggatagccagggttccgattgcgatgacagcggcaaggaactcgggatgctagtggagcccccagatgcccgacagagtcctgacacattttctttgatgatggctaaaagcgagcataatccttcaacatctggttgttcgtctgatcagtcctcaaaggtggatactcataaggaacttataaagactttgaaggagttgaaggttcacctgccggcagacaaaaaggctaaagggaaagcaagtacactagccaccctgaaatatgcgctgaggtcggtgaaacaggtcaaggccaacgaggaatattaccagttgttaatgagttcggaggggcacccttgcggcgcagatgtaccttcatataccgtggaggaaatggagtccgtcacatcggagcacatagtgaaaaatgccgacatgtttgctgtggcagtgtctctcgtcagtggaaagatcttatatatttccgatcaggtggcgagtatcttccattgcaaaagggacgcgtttagcgacgcgaagtttgtggagttcctcgcgccacatgacgtgggagtctttcactcattcacatccccttacaaactgccattatggtcaatgtgctctggtgcggatagctttacccaggagtgtatggaagagaagtcattcttctgtagggtaagcgtgcggaaatcccatgaaaacgagattcggtaccaccccttccggatgacaccttatctggtgaaggttcgcgatcagcagggtgccgaatcccaactttgttgtctgctgctcgcagagagggttcactccggctacgaagctcctcgcatccctccagagaaacgcatttttacaactacccacacacccaactgtcttttccaggatgtggacgagtccccagcagttaggcgggctgcgttccggctgttttcacactccgtctcccgaccagagaggcgggtgcaccacgtgggacatcagctagtccaactccatcagccgatggagcaggagaatctactccaccattgggaggcgcagtctcagggtggaccattcgagtag

SEQ ID NO: 213274 - DNA, 330 bp, Artificial Sequence
  derived and/or modified sequence
atgaacggctacgccgagttcccccccagccccagcaaccccaccaaagagcccgttgaaccacagccaagtcaggtccctttacaggaggatgtggacatgagttctgggtcctctggtcacgagacaaacgagaactgcagtacagggcgcgattcccagggatctgactgcgatgattcaggtaaagagctgggaatgctcgtcgaaccccctgatgccagacaatcccccgatacattctccctaatgatggctaagtctgagcacaacccctccaccagtggctgttccagcgaccaatcctccaaagtcgacactcataagtag

SEQ ID NO: 213275 - DNA, 1452 bp, Artificial Sequence
  derived and/or modified sequence
atgaacggctacgccgagttcccccccagccccagcaaccccaccaaagagcctgtagagccacagcccagccaggtgcctcttcaggaggacgtagatatgtcctcagggagctcaggccatgaaacaaacgaaaattgtagtacaggcagagattcccagggaagtgactgcgacgacagcgggaaggaattgggcatgttagtggagcctcccgatgctcggcagtcccccgacactttcagtctcatgatggccaaatccgaacacaatccaagcacaagtgggtgcagtagcgaccagtcctccaaggttgatacgcataaagaattgattaaaactctgaaggaactgaaggtgcatctaccagctgataagaaggcgaaaggaaaagcgtccaccctggctacattaaaatacgctttacggtccgtaaagcaggtgaaagctaacgaggagtactaccaactgctgatgagttccgaaggccacccttgtggggcggacgtcccatcctacaccgtcgaggagatggaatccgtaactagtgaacatatcgtgaagaatgcagacatgtttgccgtcgccgtctccctggtttcagggaagattctgtacatctcggatcaggtggcgagtattttccactgtaagcgagatgcattttccgatgccaagttcgtggaattcctggcacctcacgatgtgggagtcttccactcgttcaccagcccgtataagctgcctctatggtccatgtgtagcggagcggattctttcacgcaggaatgcatggaagagaagtccttcttttgcagggttagcgtcaggaaatcccacgaaaatgagatccgctaccatccctttcgcatgacaccgtatctcgtcaaagtgcgagatcagcagggagcagagtctcaactgtgctgcctgctcctggccgagagggtccatagcggatacgaggctcctagaataccacccgagaagagaatcttcaccaccacccacacacctaattgcctgtttcaggatgtggatgaacgcgctgtccccttgctgggctatctgcctcaagatctgatcgagacgcccgtcctggttcagttgcaccctagtgaccggcctttaatgctagccatccacaaaaaaattttgcaaagcggcggccagcctttcgattactcccccattcggtttcgcgccaggaacggcgagtacataactctcgatacctcatggtcatcatttatcaacccatggtctcgcaagatttcttttatcatcgggcgccataaagtgcgcgtgggccccctcaatgaagatgtattcgcggcccatccatgtacggaggagaaggccttacatccctccatccaagagctgacagagcagatccaccggctgctgcttcaggtcggagtagtgccggcatgccccccacctcgttag

SEQ ID NO: 213276 - DNA, 87 bp, Artificial Sequence
  derived and/or modified sequence
atgcggcctcctcagtgcctgctgcacacaccctccctggcttcccccctactgttgctgctgctgtggctcctcggtggcggttag

SEQ ID NO: 213277 - DNA, 6385 bp, Artificial Sequence
  derived and/or modified sequence
gtaaccgccgccggcgcgcgggcctcgggcaggtcggggtcccagcgccggctcgggcagcggaggcgccgccggaagttccttgggctgctggactcctcggcttgaaacggcgccggcgtgggggcgtgtgcccttggccctgtcccaggtggagagtggtcgagccgcgcgcagggtgcgctcgtttgaactgcggtgacaccgagggttggggactcgaacccccgcttcgcagctcaggagcctgaggtccgaaagcttcgttccagagcccagcatgaatggatacgcggaatttccgcccagccccagtaaccccaccaaggagcccgtggagccccagcccagccaggtcccactgcaggaagatgtggacatgagcagtggctccagtggacatgagaccaacgaaaactgctccacggggcgggactcgcagggcagtgactgtgacgacagtgggaaggagctggggatgctggtggagccaccggatgcccgccagagtccagatacctttagcctgatgatggcaaaatctgaacacaacccatctacaagtggctgcagtagcgaccagtcttcgaaagtggacacacacaaagaactgataaaaacactaaaggagctgaaggtccacctccctgcagacaagaaggccaagggcaaggccagtacgctggccaccttgaagtacgccctcaggagcgtgaagcaggtgaaagccaatgaagagtattaccagctgctgatgtccagcgagggtcacccctgtggagcagacgtgccctcctacaccgtggaggagatggagagcgttacctctgagcacattgtgaagaatgccgatatgtttgcggtggccgtgtccctggtgtctgggaagatcctgtacatctctgaccaggttgcatccatatttcactgtaaaagagatgccttcagcgatgccaagtttgtggagttcctggcgcctcacgatgtgggcgtgttccacagtttcacctccccgtacaagcttcccttgtggagcatgtgcagtggagcagattcttttactcaagaatgcatggaggagaaatctttcttttgccgtgtcagtgtccggaaaagccacgagaatgaaatccgctaccaccccttccgcatgacgccctacctggtcaaggtgcgggaccaacaaggtgctgagagtcagctttgctgccttctgctggcagagagagtgcactctggttatgaagcccctagaattcctcctgaaaagagaatttttacaaccacccatacaccaaattgtttgttccaggatgtggatgaaagggcggtccctctcctgggctacctacctcaggacctgattgaaaccccagtgctcgtgcagctccaccctagtgacaggcccttgatgctggccatccacaaaaagatcctgcagtcaggcgggcagcctttcgactattctcccattcggtttcgcgcccggaacggagagtacatcacgttggacaccagctggtccagcttcatcaacccatggagcaggaaaatctccttcatcattgggaggcacaaagtcagggtgggccctttgaatgaggacgtgtttgcagcccacccctgcacagaggagaaggccctgcaccccagcattcaggagctcacagagcagatccaccggctcctgctgcagcccgtcccccacagcggctccagtggctacgggagtctgggcagcaacgggtcccacgagcaccttatgagccagacctcctccagcgacagcaacggccatgaggactcacgccggaggagagccgaaatttgtaaaaatggtaacaagaccaaaaatagaagtcattattctcatgaatctggagaacaaaagaaaaaatccgttacagaaatgcaaactaatcccccagctgagaagaaagctgtccctgccatggaaaaggacagcctgggggtcagcttccccgaggagttggcctgcaagaaccagcccacctgctcctaccagcagatcagctgcttggacagcgtcatcaggtacttggagagctgcaatgaggctgccaccctgaagaggaaatgcgagttcccagcaaacgtcccagcgctaaggtccagtgataagcggaaggccacagtcagcccagggccacacgctggagaggcagagccgccctccagggtgaacagccgcacgggagtaggtacgcacctgacctcgctggcactgccgggcaaggcagagagtgtggcgtcgctcaccagccagtgcagctacagcagcaccatcgtccatgtgggagacaagaagccgcagccggagttagagatggtggaagatgctgcgagtgggccagaatccctggactgcctggcgggccctgccctggcctgtggtctcagccaagagaaggagcccttcaagaagctgggcctcaccaaggaggtactcgctgcacacacacagaaggaggagcagagcttcctgcagaagttcaaagaaataagaaaactcagcattttccagtcccactgccattactacttgcaagaaagatccaaggggcagccaagtgaacgaactgcccctggactaagaaatacttccggaatagattcaccttggaaaaaaacaggaaagaacagaaaattgaagtccaagcgggtcaaacctcgagactcatctgagagcaccggatctggggggcccgtgtccgcccggcccccgctggtgggcttgaacgccacagcctggtcaccctcagacacgtcccagtccagctgcccagccgtgccctttcccgccccagtgccagcagcttattcactgcccgtgtttccagcgccagggactgtggcagcacccccggcacctccccacgccagcttcacagtgcctgctgtgcccgtggacctccagcaccagtttgcagtccagcccccacctttccctgcccctttggcgcctgtcatggcattcatgctacccagttattccttcccctcggggaccccaaacctgccccaggccttcttccccagccagcctcagtttccgagccaccccacactcacatccgagatggcctctgcctcacagcctgagttccccagccggacctcgatccccagacagccatgtgcttgtccagccacccgggccaccccaccatcggccatgggtagggcctccccaccgctctttcagtcccgcagcagctcgcccctgcagctcaacctgctgcagctggaggaagcccctgagggtggcactggagccatggggaccacaggggccacagagacagcagctgtaggggcggactgcaaacctggcacttctcgggaccagcagccgaaggcgcctctgacccgtgatgaaccctcagacacacagaacagtgacgccctttccacgtcaagcggcctcctaaacctcctgctgaatgaggacctctgctcagcctcgggctctgctgcttcggagtctctgggctccggctcactgggctgcgacgcctccccgagtggggcaggcagtagtgacacaagtcataccagcaaatattttggaagcattgactcctcagagaataatcacaaagcaaaaatgaacactggtatggaagaaagtgagcatttcattaagtgcgtcctgcaggatcccatctggctgctgatggcagatgcggacagcagcgtcatgatgacgtaccagctgccttcccgaaatttagaagcggttttgaaggaggacagagagaagctgaagctcctacagaaactccagcccaggttcacggagagtcagaagcaggagctgcgcgaggtccaccagtggatgcagacgggcggcctgcccgcagccatcgacgtggcagaatgtgtttactgtgaaaacaaggaaaaaggtaatatttgcataccatatgaggaagatattccttctctgggactcagcgaagtgtcggacaccaaagaagacgaaaatggatcccccttgaatcacaggatcgaagagcagacgtaacccctgccccacctcagcccggcagccagcgaggtacaccaggtggtgcttggaagagatgaaagatcttcatggctgtttccactgaaatggacacatatgctcatgttgctttttttgttttagaaaaaaaaacaacatagttttctgaaggggcgacttaaaactgtggagagtggggagagttcggaaagaaatatgtttttatatataaaatatatatgtggagttttgtgggatggggaagagattttagttgttatttaacttgagaaagactaagcgcctcttagtgtcagggaagttgcctcagtgctcccagaagtcctgtgactgtgacgagacctctgtctgctgcaccagctggggactctggcttccagagctttcccagggtgtttggatcagatcaaattttgtcctctcttggggactgctttttatctgaattatcatttagtcaaggtagagtgtttttttatacataccaaatggagatagcagcctctcctagttttatttcaaaacgtttcacattaaatggtgtgaagcgttgtttggcaaaccaacagctttggcttctggtgtggtcaatatttcagtctgacataggttttgtttgtagtgaacaaagttgaaacatttgctctggactaaagaagcctagtggtttgtgtggccaactccatcggatgaatgcacacgcagacagaccctctgtatatttctgcattattcttgtctccttttcagaccatgatggccaatatggagattaaaatatgtcatcagtcatctctttatggtgacttccctttgcaaaccaggctgtgaccaacacatgtgagacccagtcctgtttggttttcttccgttggaaccacccagacatctgcttccacccagccaagcccacatcacatctcctggccgagagcagccactgccactcagtctgacagcttgcgactgcatctgtattttcaggggtgcagtgagctcacctctcccactgcaccctgggttgggtgcacagccctcattcttttcatgagcccgacctctctcggagcagcttcaggcctctgccagtgtccccagcacttttaggtcatttggacacttggggaaaagtgaggccagtctgcccggctttttacaaaacctcatgttgcattgtatattccaaagatggttcagaaaatttaatattggtccctggtggaaattcaaagttatcactgaagaacagttgacttaaaattggaccaagactatgaggcttaaaagggaccagggttttcttttttttttttttttttttttttttttagatggagtttctttttgcccaggctggagtgcagtggcgccatcttggctcactgcaacctctgcctcccaggttcaagcgattctcctgcctcagcctcctgagtagctgggaccacaggcgactgccaccacacccagctaattttttgtatttttagtagagacagggtttcaccatgttggccaggctggtctcgaactcctgacctcaagcgatccacccacctcggcctcccaaagtgctgggattacaggcgtgagccaccacgcccaactgggaccagggttttctgttttttgatggaggtgaaatctctttgtaatccactaggttttcatcgtaaaaccatcttatgcctgactattaaacctattcttcataaacacaagaacactttaatttttcgttaatttacaaagtaacatcagctgcctatgcctatgataaggtagcagtctgcattcttatggccattagatgttacaaactccttgcctctaaagtcagatcatgaagggataggtgttcatctaaggttacagttatgttaccgaaacacaaaactgccaaaatcttactctgctgttatgaatgtttaccatcagcattattttatcatttaatatgtgctcactgattgttaactgtagcttcagcgcgtgccaagcagttgacttaataggatcatcttgtgaatttgtttacgtgatgccaagcatcaagtcatgttttctttagtgtgtgtgcttacacaggtgttaaacagtttttctctattttaaactgagccttctttttaatatattcccgaagagatatgtaaataagctctcagagtttctgtgatgatttgttgagccttgctggacaagtggtttgtttgtgtgcaaaccaaactttctttacccagtgcaatagatttgtttgactgcttgtgtctttttatgacctgtttgccttttagaaaattggtaaataaagcaagtatatttttattttta

SEQ ID NO: 213278 - DNA, 6235 bp, Artificial Sequence
  derived and/or modified sequence
agcgccggctcgggcagcggaggcgccgccggaagttccttgggctgctggactcctcggcttgaaacggcgccggcgtgggggcgtgtgcccttggccctgtcccaggtggagagtggtcgagccgcgcgcagggtgcgctcgtttgaactgcggtgacaccgagggttggggactcgaacccccgcttcgcagctcaggagcctgaggtccgaaagcttcgttccagagcccagcatgaatggatacgcggaatttccgcccagccccagtaaccccaccaaggagcccgtggagccccagcccagccaggtcccactgcaggaagatgtggacatgagcagtggctccagtggacatgagaccaacgaaaactgctccacggggcgggactcgcagggcagtgactgtgacgacagtgggaaggagctggggatgctggtggagccaccggatgcccgccagagtccagatacctttagcctgatgatggcaaaatctgaacacaacccatctacaagtggctgcagtagcgaccagtcttcgaaagtggacacacacaaagaactgataaaaacactaaaggagctgaaggtccacctccctgcagacaagaaggccaagggcaaggccagtacgctggccaccttgaagtacgccctcaggagcgtgaagcaggtgaaagccaatgaagagtattaccagctgctgatgtccagcgagggtcacccctgtggagcagacgtgccctcctacaccgtggaggagatggagagcgttacctctgagcacattgtgaagaatgccgatatgtttgcggtggccgtgtccctggtgtctgggaagatcctgtacatctctgaccaggttgcatccatatttcactgtaaaagagatgccttcagcgatgccaagtttgtggagttcctggcgcctcacgatgtgggcgtgttccacagtttcacctccccgtacaagcttcccttgtggagcatgtgcagtggagcagattcttttactcaagaatgcatggaggagaaatctttcttttgccgtgtcagtgtccggaaaagccacgagaatgaaatccgctaccaccccttccgcatgacgccctacctggtcaaggtgcgggaccaacaaggtgctgagagtcagctttgctgccttctgctggcagagagagtgcactctggttatgaagcccctagaattcctcctgaaaagagaatttttacaaccacccatacaccaaattgtttgttccaggatgtggatgaaagtcctgcagtcaggcgggcagcctttcgactattctcccattcggtttcgcgcccggaacggagagtacatcacgttggacaccagctggtccagcttcatcaacccatggagcaggaaaatctccttcatcattgggaggcacaaagtcagggtgggccctttgaatgaggacgtgtttgcagcccacccctgcacagaggagaaggccctgcaccccagcattcaggagctcacagagcagatccaccggctcctgctgcagcccgtcccccacagcggctccagtggctacgggagtctgggcagcaacgggtcccacgagcaccttatgagccagacctcctccagcgacagcaacggccatgaggactcacgccggaggagagccgaaatttgtaaaaatggtaacaagaccaaaaatagaagtcattattctcatgaatctggagaacaaaagaaaaaatccgttacagaaatgcaaactaatcccccagctgagaagaaagctgtccctgccatggaaaaggacagcctgggggtcagcttccccgaggagttggcctgcaagaaccagcccacctgctcctaccagcagatcagctgcttggacagcgtcatcaggtacttggagagctgcaatgaggctgccaccctgaagaggaaatgcgagttcccagcaaacgtcccagcgctaaggtccagtgataagcggaaggccacagtcagcccagggccacacgctggagaggcagagccgccctccagggtgaacagccgcacgggagtaggtacgcacctgacctcgctggcactgccgggcaaggcagagagtgtggcgtcgctcaccagccagtgcagctacagcagcaccatcgtccatgtgggagacaagaagccgcagccggagttagagatggtggaagatgctgcgagtgggccagaatccctggactgcctggcgggccctgccctggcctgtggtctcagccaagagaaggagcccttcaagaagctgggcctcaccaaggaggtactcgctgcacacacacagaaggaggagcagagcttcctgcagaagttcaaagaaataagaaaactcagcattttccagtcccactgccattactacttgcaagaaagatccaaggggcagccaagtgaacgaactgcccctggactaagaaatacttccggaatagattcaccttggaaaaaaacaggaaagaacagaaaattgaagtccaagcgggtcaaacctcgagactcatctgagagcaccggatctggggggcccgtgtccgcccggcccccgctggtgggcttgaacgccacagcctggtcaccctcagacacgtcccagtccagctgcccagccgtgccctttcccgccccagtgccagcagcttattcactgcccgtgtttccagcgccagggactgtggcagcacccccggcacctccccacgccagcttcacagtgcctgctgtgcccgtggacctccagcaccagtttgcagtccagcccccacctttccctgcccctttggcgcctgtcatggcattcatgctacccagttattccttcccctcggggaccccaaacctgccccaggccttcttccccagccagcctcagtttccgagccaccccacactcacatccgagatggcctctgcctcacagcctgagttccccagccggacctcgatccccagacagccatgtgcttgtccagccacccgggccaccccaccatcggccatgggtagggcctccccaccgctctttcagtcccgcagcagctcgcccctgcagctcaacctgctgcagctggaggaagcccctgagggtggcactggagccatggggaccacaggggccacagagacagcagctgtaggggcggactgcaaacctggcacttctcgggaccagcagccgaaggcgcctctgacccgtgatgaaccctcagacacacagaacagtgacgccctttccacgtcaagcggcctcctaaacctcctgctgaatgaggacctctgctcagcctcgggctctgctgcttcggagtctctgggctccggctcactgggctgcgacgcctccccgagtggggcaggcagtagtgacacaagtcataccagcaaatattttggaagcattgactcctcagagaataatcacaaagcaaaaatgaacactggtatggaagaaagtgagcatttcattaagtgcgtcctgcaggatcccatctggctgctgatggcagatgcggacagcagcgtcatgatgacgtaccagctgccttcccgaaatttagaagcggttttgaaggaggacagagagaagctgaagctcctacagaaactccagcccaggttcacggagagtcagaagcaggagctgcgcgaggtccaccagtggatgcagacgggcggcctgcccgcagccatcgacgtggcagaatgtgtttactgtgaaaacaaggaaaaaggtaatatttgcataccatatgaggaagatattccttctctgggactcagcgaagtgtcggacaccaaagaagacgaaaatggatcccccttgaatcacaggatcgaagagcagacgtaacccctgccccacctcagcccggcagccagcgaggtacaccaggtggtgcttggaagagatgaaagatcttcatggctgtttccactgaaatggacacatatgctcatgttgctttttttgttttagaaaaaaaaacaacatagttttctgaaggggcgacttaaaactgtggagagtggggagagttcggaaagaaatatgtttttatatataaaatatatatgtggagttttgtgggatggggaagagattttagttgttatttaacttgagaaagactaagcgcctcttagtgtcagggaagttgcctcagtgctcccagaagtcctgtgactgtgacgagacctctgtctgctgcaccagctggggactctggcttccagagctttcccagggtgtttggatcagatcaaattttgtcctctcttggggactgctttttatctgaattatcatttagtcaaggtagagtgtttttttatacataccaaatggagatagcagcctctcctagttttatttcaaaacgtttcacattaaatggtgtgaagcgttgtttggcaaaccaacagctttggcttctggtgtggtcaatatttcagtctgacataggttttgtttgtagtgaacaaagttgaaacatttgctctggactaaagaagcctagtggtttgtgtggccaactccatcggatgaatgcacacgcagacagaccctctgtatatttctgcattattcttgtctccttttcagaccatgatggccaatatggagattaaaatatgtcatcagtcatctctttatggtgacttccctttgcaaaccaggctgtgaccaacacatgtgagacccagtcctgtttggttttcttccgttggaaccacccagacatctgcttccacccagccaagcccacatcacatctcctggccgagagcagccactgccactcagtctgacagcttgcgactgcatctgtattttcaggggtgcagtgagctcacctctcccactgcaccctgggttgggtgcacagccctcattcttttcatgagcccgacctctctcggagcagcttcaggcctctgccagtgtccccagcacttttaggtcatttggacacttggggaaaagtgaggccagtctgcccggctttttacaaaacctcatgttgcattgtatattccaaagatggttcagaaaatttaatattggtccctggtggaaattcaaagttatcactgaagaacagttgacttaaaattggaccaagactatgaggcttaaaagggaccagggttttcttttttttttttttttttttttttttttagatggagtttctttttgcccaggctggagtgcagtggcgccatcttggctcactgcaacctctgcctcccaggttcaagcgattctcctgcctcagcctcctgagtagctgggaccacaggcgactgccaccacacccagctaattttttgtatttttagtagagacagggtttcaccatgttggccaggctggtctcgaactcctgacctcaagcgatccacccacctcggcctcccaaagtgctgggattacaggcgtgagccaccacgcccaactgggaccagggttttctgttttttgatggaggtgaaatctctttgtaatccactaggttttcatcgtaaaaccatcttatgcctgactattaaacctattcttcataaacacaagaacactttaatttttcgttaatttacaaagtaacatcagctgcctatgcctatgataaggtagcagtctgcattcttatggccattagatgttacaaactccttgcctctaaagtcagatcatgaagggataggtgttcatctaaggttacagttatgttaccgaaacacaaaactgccaaaatcttactctgctgttatgaatgtttaccatcagcattattttatcatttaatatgtgctcactgattgttaactgtagcttcagcgcgtgccaagcagttgacttaataggatcatcttgtgaatttgtttacgtgatgccaagcatcaagtcatgttttctttagtgtgtgtgcttacacaggtgttaaacagtttttctctattttaaactgagccttctttttaatatattcccgaagagatatgtaaataagctctcagagtttctgtgatgatttgttgagccttgctggacaagtggtttgtttgtgtgcaaaccaaactttctttacccagtgcaatagatttgtttgactgcttgtgtctttttatgacctgtttgccttttagaaaattggtaaataaagcaagtatatttttattttta

SEQ ID NO: 213279 - DNA, 1228 bp, Artificial Sequence
  derived and/or modified sequence
atgaatggatacgcggaatttccgcccagccccagtaaccccaccaaggagcccgtggagccccagcccagccaggtcccactgcaggaagatgtggacatgagcagtggctccagtggacatgagaccaacgaaaactgctccacggggcgggactcgcagggcagtgactgtgacgacagtgggaaggagctggggatgctggtggagccaccggatgcccgccagagtccagatacctttagcctgatgatggcaaaatctgaacacaacccatctacaagtggctgcagtagcgaccagtcttcgaaagtggacacacacaaagaactgataaaaacactaaaggagctgaaggtccacctccctgcagacaagaaggccaagggcaaggccagtacgctggccaccttgaagtacgccctcaggagcgtgaagcaggtgaaagccaatgaagagtattaccagctgctgatgtccagcgagggtcacccctgtggagcagacgtgccctcctacaccgtggaggagatggagagcgttacctctgagcacattgtgaagaatgccgatatgtttgcggtggccgtgtccctggtgtctgggaagatcctgtacatctctgaccaggttgcatccatatttcactgtaaaagagatgccttcagcgatgccaagtttgtggagttcctggcgcctcacgatgtgggcgtgttccacagtttcacctccccgtacaagcttcccttgtggagcatgtgcagtggagcagattcttttactcaagaatgcatggaggagaaatctttcttttgccgtgtcagtgtccggaaaagccacgagaatgaaatccgctaccaccccttccgcatgacgccctacctggtcaaggtgcgggaccaacaaggtgctgagagtcagctttgctgccttctgctggcagagagagtgcactctggttatgaagcccctagaattcctcctgaaaagagaatttttacaaccacccatacaccaaattgtttgttccaggatgtggatgaaagtcctgcagtcaggcgggcagcctttcgactattctcccattcggtttcgcgcccggaacggagagtacatcacgttggacaccagctggtccagcttcatcaacccatggagcaggaaaatctccttcatcattgggaggcacaaagtcagggtgggccctttgaatgaggacgtgtttgca

SEQ ID NO: 213280 - DNA, 551 bp, Artificial Sequence
  derived and/or modified sequence
atcacactcaggaattcctgatgtgggttcataacttttccttctgtcccatccctggtccccaggtgagtccaggtaaagaagaacaagaagagtaaagagagatgctgcgggctccagcttcttggacagtctcgccttccccatgagagcctacacattcagagcctgctgcgtgggagcctgaaagctccttcctgtcctcttcgttccagagcccagcatgaatggatacgcggaatttccgcccagccccagtaaccccaccaaggagcccgtggagccccagcccagccaggtcccactgcaggaagatgtggacatgagcagtggctccagtggacatgagaccaacgaaaactgctccacggggcgggactcgcagggcagtgactgtgacgacagtgggaaggagctggggatgctggtggagccaccggatgcccgccagagtccagatacctttagcctgatgatggcaaaatctgaacacaacccatctacaagtggctgcagtagcgaccagtcttcgaaagtggacacacacaaag

SEQ ID NO: 213281 - DNA, 1826 bp, Artificial Sequence
  derived and/or modified sequence
atcacactcaggaattcctgatgtgggttcataacttttccttctgtcccatccctggtccccaggtgagtccaggtaaagaagaacaagaagagtaaagagagatgctgcgggctccagcttcttggacagtctcgccttccccatgagagcctacacattcagagcctgctgcgtgggagcctgaaagctccttcctgtcctcttcgttccagagcccagcatgaatggatacgcggaatttccgcccagccccagtaaccccaccaaggagcccgtggagccccagcccagccaggtcccactgcaggaagatgtggacatgagcagtggctccagtggacatgagaccaacgaaaactgctccacggggcgggactcgcagggcagtgactgtgacgacagtgggaaggagctggggatgctggtggagccaccggatgcccgccagagtccagatacctttagcctgatgatggcaaaatctgaacacaacccatctacaagtggctgcagtagcgaccagtcttcgaaagtggacacacacaaagaactgataaaaacactaaaggagctgaaggtccacctccctgcagacaagaaggccaagggcaaggccagtacgctggccaccttgaagtacgccctcaggagcgtgaagcaggtgaaagccaatgaagagtattaccagctgctgatgtccagcgagggtcacccctgtggagcagacgtgccctcctacaccgtggaggagatggagagcgttacctctgagcacattgtgaagaatgccgatatgtttgcggtggccgtgtccctggtgtctgggaagatcctgtacatctctgaccaggttgcatccatatttcactgtaaaagagatgccttcagcgatgccaagtttgtggagttcctggcgcctcacgatgtgggcgtgttccacagtttcacctccccgtacaagcttcccttgtggagcatgtgcagtggagcagattcttttactcaagaatgcatggaggagaaatctttcttttgccgtgtcagtgtccggaaaagccacgagaatgaaatccgctaccaccccttccgcatgacgccctacctggtcaaggtgcgggaccaacaaggtgctgagagtcagctttgctgccttctgctggcagagagagtgcactctggttatgaagcccctagaattcctcctgaaaagagaatttttacaaccacccatacaccaaattgtttgttccaggatgtggatgaaagggcggtccctctcctgggctacctacctcaggacctgattgaaaccccagtgctcgtgcagctccaccctagtgacaggcccttgatgctggccatccacaaaaagatcctgcagtcaggcgggcagcctttcgactattctcccattcggtttcgcgcccggaacggagagtacatcacgttggacaccagctggtccagcttcatcaacccatggagcaggaaaatctccttcatcattgggaggcacaaagtcagggtgggccctttgaatgaggacgtgtttgcagcccacccctgcacagaggagaaggccctgcaccccagcattcaggagctcacagagcagatccaccggctcctgctgcaggtgggtgtggtgcctgcatgtcctcctcccaggtagcagcctgagagccccctgcagaggacataggctctgaaccctggtcctggcacacccactcagacagcttcatctgtcattctctgaacatcccccaggggacagtttgggcatagactgtgctagtccgagacagtccatagtacccttg

SEQ ID NO: 213282 - DNA, 3768 bp, Artificial Sequence
  derived and/or modified sequence
atgaatgggtacgctgaattccccccaagcccaagtaaccccacaaaggagccagtggagccacagccctctcaggttcccttacaggaagatgtcgacatgtcaagcggatcttcaggacacgagaccaatgaaaattgttccactggaagagactcccaaggcagcgactgtgatgactccggaaaggagttgggaatgttggtggaaccaccagatgccaggcagagtcccgacacatttagtctgatgatggccaaatcggaacacaaccccagtacatccggctgtagcagcgaccaatctagtaaagtagacactcacaaggagctcattaagactcttaaagaactcaaggtgcatctgccagccgacaagaaggcaaaaggaaaggctagcaccctggcgactctgaaatacgctctccgctccgttaaacaggtcaaggcaaatgaagagtactatcagcttctgatgtcctccgagggacatccttgcggggctgacgtgccctcgtataccgttgaggaaatggagagtgtgacaagtgaacacattgtgaaaaatgcagacatgtttgcagtggctgtttcactggtatcaggaaaaatcctgtatatatccgaccaagtggcctctatcttccattgcaagcgcgacgccttttctgacgccaagtttgtggagtttctggcaccacatgacgtgggagtcttccacagttttacttctccctacaaactgcccctctggtctatgtgctctggggcagactcttttactcaggagtgcatggaggagaaaagctttttctgtagggtgtccgtgcgaaagagccacgaaaacgagattagataccatcctttccgaatgaccccctatttagtcaaagtgcgtgatcagcaaggcgcagaaagccagctctgttgtttgctactcgcagagcgcgtgcactccgggtatgaggcacccaggattcccccagagaagagaatttttactacgacacatactcccaactgcttattccaggatgttgacgagcgcgctgtgcctctgctaggctacctgccccaggatctaatcgagactcccgtcctcgttcagctccatccatcagacagaccactgatgctggccattcacaagaagattttgcaaagtggcggtcagccgtttgactactccccaattagattcagggccagaaatggagaatatatcactttggacacatcttggtcatcctttattaatccatggtctcggaaaatctccttcatcatcggtcggcataaggtccgcgtggggccactcaatgaggatgtttttgcagcccatccctgtaccgaggagaaagcacttcaccctagtatccaggagcttactgagcagattcacagacttcttctccagcctgtgccccactccggctcctcaggctacgggagcctgggctctaacggctcccacgagcacctcatgtcgcagacttccagctctgacagcaatggtcacgaggattcgcggcgtcggcgagctgagatctgcaagaacggcaacaaaaccaaaaatagaagccattacagccatgaatccggggagcaaaagaaaaagtctgtgacagaaatgcagacgaatccgcctgccgaaaagaaggctgtccctgccatggaaaaagattctctcggggtgtcattccctgaggaattggcttgcaagaaccagcctacgtgctcatatcagcaaatctcttgtttggatagtgtgatacggtacttggagtcatgtaacgaggccgcaaccttaaaaaggaaatgcgaattccccgctaatgtccccgcactgagatcctcagataagcggaaggccaccgtgagcccaggtcctcatgcaggagaagccgaaccaccctcccgagtgaattcaagaacaggcgtcgggacacatttgactagccttgcactccccggtaaagcggagtcagtggctagcctgacctcccagtgctcttacagttctaccatcgtacatgtcggcgataaaaaaccccaacccgaattagagatggtcgaggatgccgcttccggccctgagtcattggactgcctggccggacctgcccttgcctgcggtttatcgcaggagaaggagccattcaagaaactggggctcacaaaagaggtgctggctgcccacactcagaaagaagaacagagttttctgcagaaatttaaggagatccggaagctctccattttccagtcccattgtcattactacttacaagagagatcaaaaggccagccgtctgagaggaccgcccctgggctgcgcaacacgagtggtatcgacagcccctggaagaaaaccgggaagaacagaaaactcaaatcaaagcgggtgaagcccagggacagctcagaatcgaccggatccggtggcccagtgagcgcacggccaccccttgtggggctgaatgctaccgcttggtctccatccgatacttcacagtctagctgccctgccgtcccgttccccgcacccgttcccgcagcttactcccttcccgttttcccagcaccaggcacggttgcggctccaccagctcctcctcacgcttctttcactgtgcctgccgtgcctgtagatttgcagcaccaattcgctgtccagcccccaccttttccagctccactggctcctgtcatggcattcatgcttccctcctactcatttccgagcggcaccccaaacctgccacaagctttcttcccttctcaacctcagttccccagtcatcccactctcacgtcagagatggctagcgcgtctcagcccgagtttccaagcagaacttcaatcccccgtcagccctgtgcttgcccggcaaccagagccacaccaccttctgccatggggagagcgtcccccccactctttcaatctaggagtagtagccccttacagcttaacctgctccagttggaagaggctcccgaaggcggtaccggcgctatgggcaccacaggtgcaacggagactgccgcagtcggggctgactgcaagcctggaacgtctagggatcagcagcctaaagcaccactaaccagagatgaaccatcagacacccagaactcagacgccctgagcacgtcgtcaggccttttgaatttgctgctgaacgaggacctctgcagcgcttccggctcagcagctagcgaatcgctgggcagcggctccctgggatgcgatgcttctccatctggggcagggtcttcagataccagccatacctccaaatatttcggctccatcgattcctcagaaaacaaccataaggcaaagatgaatacgggtatggaggaatcggaacacttcataaaatgtgtcctacaggacccaatctggctcctgatggccgatgctgactcgagtgtaatgatgacatatcaattgccatctcgtaatttggaggctgtccttaaggaggaccgcgaaaaacttaagcttcttcaaaaacttcagccgaggttcacggagtcccagaagcaggagctccgggaggtgcatcaatggatgcagacaggtggactcccagcagcaatcgatgtcgccgaatgtgtctactgcgaaaacaaggaaaaagggaatatttgcattccttatgaggaggatattccgtccttgggcctgtctgaggtcagcgataccaaggaagatgagaatggttcaccacttaatcacagaatcgaagagcaaacatag

SEQ ID NO: 213283 - DNA, 1215 bp, Artificial Sequence
  derived and/or modified sequence
atgaacggctacgcagaattcccgccatcccccagtaatccaaccaaagagccagtggagccccagcctagccaggtgcctctgcaggaagacgtcgatatgtccagtggctcctccggacacgagacaaacgaaaactgctcaaccggcagggattctcagggcagtgactgcgacgactccggtaaggaactgggaatgttagttgagcctccagatgcaagacagagtcctgacacattcagcctgatgatggccaaatctgaacataacccatcaacctcgggctgcagcagcgaccaatcgtccaaggtggacacgcataaggaactcattaagaccctgaaggaattgaaggtgcatctacctgctgacaaaaaagctaaaggaaaggcctctactctggccacactgaagtatgcccttcgctctgtgaaacaagttaaggctaatgaggagtattaccagcttctgatgtcgagcgaaggacatccctgtggcgcagatgtcccctcttacaccgtggaggaaatggagagtgtcacaagtgagcatattgtcaaaaacgcagacatgttcgccgtggccgtttctctggtgtccgggaaaatcttatacatctccgaccaggtggccagcatatttcactgtaagcgcgatgctttctcagacgctaaattcgttgagttcctggctcctcacgacgttggtgtcttccatagtttcacgagcccttataagctgcccttgtggtccatgtgctctggagccgactctttcacacaggaatgtatggaagagaaatcatttttctgtcgcgtgtccgtgcgcaagtcgcatgagaacgaaattcgctaccacccatttcggatgacaccgtatctggtcaaggtgagagaccaacagggcgctgaatctcaactgtgctgcctgctgttggcggagcgggtccactccggatatgaagcacccagaattccccctgagaagcgaatctttaccacaactcatacccccaattgtttatttcaggacgtcgatgagtcgcctgctgtgcgcagggctgcctttcggttgttttcacattctgtatcccgaccggagcgcagggttcatcacgtgggccaccagctcgtccagttgcaccaaccaatggagcaagagaacttgctccatcactgggaggcccagtcccagggcggaccgttcgaatag

SEQ ID NO: 213284 - DNA, 1215 bp, Artificial Sequence
  derived and/or modified sequence
atgaatggatatgccgagttcccacctagtcccagcaatccaaccaaggagcccgtggaaccgcagccatcgcaggtgccccttcaggaagatgtggatatgtcatctggatcttctgggcatgaaacaaatgagaattgcagtacgggacgtgactctcagggatctgactgtgatgattctggtaaggaattaggtatgttagtggagcccccagacgcccgtcaatccccagacacatttagcttgatgatggccaaaagcgaacacaacccttccacctcgggatgcagttccgaccagagctctaaggtagacactcacaaggaacttattaaaaccctcaaggagctcaaggtccatctgcctgcagacaagaaggctaaaggaaaggcaagcacactcgccacactgaaatatgcactgaggagtgtgaagcaggtcaaggcaaatgaggaatactaccagctgcttatgtctagcgaaggccatccctgtggagcagacgtacctagctacacagtggaggagatggaaagcgtcacaagtgaacatattgtgaagaacgcagatatgtttgctgtggctgtgtcactggtgtcagggaaaattctgtacatctccgaccaggttgcgtctatatttcattgcaaacgcgacgcattcagcgacgccaaatttgtggagttcctggcaccacatgatgtgggcgttttccactcattcacctccccatacaagttacccctttggagtatgtgttctggtgcagatagtttcacacaggaatgcatggaagaaaaatcattcttctgtcgggtgagcgttaggaaatcccatgagaacgaaatccgataccatccttttcgcatgacaccctatctcgtgaaggtacgagaccagcaaggggctgaatcccagctctgctgtcttctgttagccgagcgcgtccactccggttatgaggcacctcggatccccccagagaagaggatcttcacgacaacccacacacctaattgtctgtttcaggatgtggatgagagccccgctgtgagaagagctgcctttcggctgtttagccactcggtgtcacgacccgagcgccgtgtccaccacgtgggacaccagctcgtacagttgcaccaaccaatggagcaagaaaacctgctgcatcactgggaggctcagtcccagggcggacccttcgagtag

SEQ ID NO: 213285 - DNA, 330 bp, Artificial Sequence
  derived and/or modified sequence
atgaatggctatgccgaatttccccctagtccaagcaaccccaccaaagagcctgtcgagccccagccctctcaggtccctctgcaggaggacgttgacatgagcagcggtagcagtgggcatgaaacgaacgaaaactgttcaactggacgggactcacaggggtctgattgcgatgattcaggcaaagaactgggaatgctcgttgagccccctgatgctcggcaatcccctgataccttttccttaatgatggccaagtcagagcacaatccgtctacaagtggatgtagttccgaccagtccagcaaagtagatacccacaaatag

SEQ ID NO: 213286 - DNA, 1452 bp, Artificial Sequence
  derived and/or modified sequence
atgaatggctatgccgagttcccacctagcccaagtaaccctactaaggagcctgtcgagccccagcccagccaagtccccctacaggaggatgtggatatgtcttctggttcctcaggccatgagaccaatgagaactgttccacaggccgtgattctcaaggtagtgattgtgacgatagcggtaaggagttagggatgctagtggaaccacctgatgctcggcagagtccagacaccttttcgttgatgatggccaaaagcgagcacaatccttccacgtctggctgctcaagtgaccaaagctctaaagtcgacacacacaaagaactgattaaaaccctgaaagaacttaaggtgcacctgccggcagataagaaagccaaaggaaaagcctctacactcgctacacttaaatatgctttgcggagtgtgaagcaggtcaaggcgaatgaggagtattatcagcttctcatgagcagcgaagggcacccatgtggggctgacgtgcctagctataccgttgaggagatggaatccgtaacttcggaacacatcgttaaaaacgccgatatgttcgctgttgcagtttcgttagtatccggaaagatcctgtatatcagcgatcaggtagcctcaattttccactgcaaaagggatgctttctccgacgctaagttcgtggagttcctggcaccccacgatgtcggggtgtttcactcattcaccagtccctataagctgcccctttggtcgatgtgctccggagccgactcctttacacaggagtgcatggaggagaaatcattcttctgtagggtgtctgtgaggaagagccatgaaaacgagatcagatatcatcccttcagaatgacaccgtaccttgtcaaggtccgcgaccagcagggagccgagtcccagctgtgttgtctcttattggctgagagagttcattctgggtatgaggctccacgaatcccacccgaaaagcgtatttttacaacaacacacactccgaattgtctgttccaggatgtggacgagcgggcagtgccattactgggctatctgccacaggatctgatcgagaccccagtgctagtacagctgcatccttcagaccgcccacttatgcttgccattcacaagaagatccttcagtccggaggacagccgttcgactatagccccatacgatttcgagcaaggaacggagagtatattaccttggatacaagttggagctctttcattaatccgtggtcccgcaagatctcatttataattggccgtcacaaggtccgcgtgggccctctgaacgaggacgtgtttgctgcgcatccttgtactgaggagaaggcccttcacccttctatacaggagttaactgaacagatccacagactgttactgcaggtgggagtcgtgcccgcttgccctcctcccagatag

SEQ ID NO: 213287 - DNA, 3768 bp, Artificial Sequence
  derived and/or modified sequence
atgaacggctacgccgagttcccccccagccccagcaaccccaccaaggagcccgtggagccccagcccagccaggtgcccctgcaggaggacgtggacatgagcagcggcagcagcggccacgagaccaacgagaactgcagcaccggcagagacagccagggcagcgactgcgacgacagcggcaaggagctgggcatgctggtggagccccccgacgccagacagagccccgacaccttcagcctgatgatggccaagagcgagcacaaccccagcaccagcggctgcagcagcgaccagagcagcaaggtggacacccacaaggagctgatcaagaccctgaaggagctgaaggtgcacctgcccgccgacaagaaggccaagggcaaggccagcaccctggccaccctgaagtacgccctgagaagcgtgaagcaggtgaaggccaacgaggagtactaccagctgctgatgagcagcgagggccacccctgcggcgccgacgtgcccagctacaccgtggaggagatggagagcgtgaccagcgagcacatcgtgaagaacgccgacatgttcgccgtggccgtgagcctggtgagcggcaagatcctgtacatcagcgaccaggtggccagcatcttccactgcaagagagacgccttcagcgacgccaagttcgtggagttcctggccccccacgacgtgggcgtgttccacagcttcaccagcccctacaagctgcccctgtggagcatgtgcagcggcgccgacagcttcacccaggagtgcatggaggagaagagcttcttctgcagagtgagcgtgagaaagagccacgagaacgagatcagataccaccccttcagaatgaccccctacctggtgaaggtgagagaccagcagggcgccgagagccagctgtgctgcctgctgctggccgagagagtgcacagcggctacgaggcccccagaatcccccccgagaagagaatcttcaccaccacccacacccccaactgcctgttccaggacgtggacgagagagccgtgcccctgctgggctacctgccccaggacctgatcgagacccccgtgctggtgcagctgcaccccagcgacagacccctgatgctggccatccacaagaagatcctgcagagcggcggccagcccttcgactacagccccatcagattcagagccagaaacggcgagtacatcaccctggacaccagctggagcagcttcatcaacccctggagcagaaagatcagcttcatcatcggcagacacaaggtgagagtgggccccctgaacgaggacgtgttcgccgcccacccctgcaccgaggagaaggccctgcaccccagcatccaggagctgaccgagcagatccacagactgctgctgcagcccgtgccccacagcggcagcagcggctacggcagcctgggcagcaacggcagccacgagcacctgatgagccagaccagcagcagcgacagcaacggccacgaggacagcagaagaagaagagccgagatctgcaagaacggcaacaagaccaagaacagaagccactacagccacgagagcggcgagcagaagaagaagagcgtgaccgagatgcagaccaacccccccgccgagaagaaggccgtgcccgccatggagaaggacagcctgggcgtgagcttccccgaggagctggcctgcaagaaccagcccacctgcagctaccagcagatcagctgcctggacagcgtgatcagatacctggagagctgcaacgaggccgccaccctgaagagaaagtgcgagttccccgccaacgtgcccgccctgagaagcagcgacaagagaaaggccaccgtgagccccggcccccacgccggcgaggccgagccccccagcagagtgaacagcagaaccggcgtgggcacccacctgaccagcctggccctgcccggcaaggccgagagcgtggccagcctgaccagccagtgcagctacagcagcaccatcgtgcacgtgggcgacaagaagccccagcccgagctggagatggtggaggacgccgccagcggccccgagagcctggactgcctggccggccccgccctggcctgcggcctgagccaggagaaggagcccttcaagaagctgggcctgaccaaggaggtgctggccgcccacacccagaaggaggagcagagcttcctgcagaagttcaaggagatcagaaagctgagcatcttccagagccactgccactactacctgcaggagagaagcaagggccagcccagcgagagaaccgcccccggcctgagaaacaccagcggcatcgacagcccctggaagaagaccggcaagaacagaaagctgaagagcaagagagtgaagcccagagacagcagcgagagcaccggcagcggcggccccgtgagcgccagaccccccctggtgggcctgaacgccaccgcctggagccccagcgacaccagccagagcagctgccccgccgtgcccttccccgcccccgtgcccgccgcctacagcctgcccgtgttccccgcccccggcaccgtggccgccccccccgcccccccccacgccagcttcaccgtgcccgccgtgcccgtggacctgcagcaccagttcgccgtgcagcccccccccttccccgcccccctggcccccgtgatggccttcatgctgcccagctacagcttccccagcggcacccccaacctgccccaggccttcttccccagccagccccagttccccagccaccccaccctgaccagcgagatggccagcgccagccagcccgagttccccagcagaaccagcatccccagacagccctgcgcctgccccgccaccagagccaccccccccagcgccatgggcagagccagcccccccctgttccagagcagaagcagcagccccctgcagctgaacctgctgcagctggaggaggcccccgagggcggcaccggcgccatgggcaccaccggcgccaccgagaccgccgccgtgggcgccgactgcaagcccggcaccagcagagaccagcagcccaaggcccccctgaccagagacgagcccagcgacacccagaacagcgacgccctgagcaccagcagcggcctgctgaacctgctgctgaacgaggacctgtgcagcgccagcggcagcgccgccagcgagagcctgggcagcggcagcctgggctgcgacgccagccccagcggcgccggcagcagcgacaccagccacaccagcaagtacttcggcagcatcgacagcagcgagaacaaccacaaggccaagatgaacaccggcatggaggagagcgagcacttcatcaagtgcgtgctgcaggaccccatctggctgctgatggccgacgccgacagcagcgtgatgatgacctaccagctgcccagcagaaacctggaggccgtgctgaaggaggacagagagaagctgaagctgctgcagaagctgcagcccagattcaccgagagccagaagcaggagctgagagaggtgcaccagtggatgcagaccggcggcctgcccgccgccatcgacgtggccgagtgcgtgtactgcgagaacaaggagaagggcaacatctgcatcccctacgaggaggacatccccagcctgggcctgagcgaggtgagcgacaccaaggaggacgagaacggcagccccctgaaccacagaatcgaggagcagacctag

SEQ ID NO: 213288 - DNA, 1215 bp, Artificial Sequence
  derived and/or modified sequence
atgaacggctacgccgagttcccccccagccccagcaaccccaccaaggagcccgtggagccccagcccagccaggtgcccctgcaggaggacgtggacatgagcagcggcagcagcggccacgagaccaacgagaactgcagcaccggcagagacagccagggcagcgactgcgacgacagcggcaaggagctgggcatgctggtggagccccccgacgccagacagagccccgacaccttcagcctgatgatggccaagagcgagcacaaccccagcaccagcggctgcagcagcgaccagagcagcaaggtggacacccacaaggagctgatcaagaccctgaaggagctgaaggtgcacctgcccgccgacaagaaggccaagggcaaggccagcaccctggccaccctgaagtacgccctgagaagcgtgaagcaggtgaaggccaacgaggagtactaccagctgctgatgagcagcgagggccacccctgcggcgccgacgtgcccagctacaccgtggaggagatggagagcgtgaccagcgagcacatcgtgaagaacgccgacatgttcgccgtggccgtgagcctggtgagcggcaagatcctgtacatcagcgaccaggtggccagcatcttccactgcaagagagacgccttcagcgacgccaagttcgtggagttcctggccccccacgacgtgggcgtgttccacagcttcaccagcccctacaagctgcccctgtggagcatgtgcagcggcgccgacagcttcacccaggagtgcatggaggagaagagcttcttctgcagagtgagcgtgagaaagagccacgagaacgagatcagataccaccccttcagaatgaccccctacctggtgaaggtgagagaccagcagggcgccgagagccagctgtgctgcctgctgctggccgagagagtgcacagcggctacgaggcccccagaatcccccccgagaagagaatcttcaccaccacccacacccccaactgcctgttccaggacgtggacgagagccccgccgtgagaagagccgccttcagactgttcagccacagcgtgagcagacccgagagaagagtgcaccacgtgggccaccagctggtgcagctgcaccagcccatggagcaggagaacctgctgcaccactgggaggcccagagccagggcggccccttcgagtag

SEQ ID NO: 213289 - DNA, 330 bp, Artificial Sequence
  derived and/or modified sequence
atgaacggctacgccgagttcccccccagccccagcaaccccaccaaggagcccgtggagccccagcccagccaggtgcccctgcaggaggacgtggacatgagcagcggcagcagcggccacgagaccaacgagaactgcagcaccggcagagacagccagggcagcgactgcgacgacagcggcaaggagctgggcatgctggtggagccccccgacgccagacagagccccgacaccttcagcctgatgatggccaagagcgagcacaaccccagcaccagcggctgcagcagcgaccagagcagcaaggtggacacccacaagtag

SEQ ID NO: 213290 - DNA, 1452 bp, Artificial Sequence
  derived and/or modified sequence
atgaacggctacgccgagttcccccccagccccagcaaccccaccaaggagcccgtggagccccagcccagccaggtgcccctgcaggaggacgtggacatgagcagcggcagcagcggccacgagaccaacgagaactgcagcaccggcagagacagccagggcagcgactgcgacgacagcggcaaggagctgggcatgctggtggagccccccgacgccagacagagccccgacaccttcagcctgatgatggccaagagcgagcacaaccccagcaccagcggctgcagcagcgaccagagcagcaaggtggacacccacaaggagctgatcaagaccctgaaggagctgaaggtgcacctgcccgccgacaagaaggccaagggcaaggccagcaccctggccaccctgaagtacgccctgagaagcgtgaagcaggtgaaggccaacgaggagtactaccagctgctgatgagcagcgagggccacccctgcggcgccgacgtgcccagctacaccgtggaggagatggagagcgtgaccagcgagcacatcgtgaagaacgccgacatgttcgccgtggccgtgagcctggtgagcggcaagatcctgtacatcagcgaccaggtggccagcatcttccactgcaagagagacgccttcagcgacgccaagttcgtggagttcctggccccccacgacgtgggcgtgttccacagcttcaccagcccctacaagctgcccctgtggagcatgtgcagcggcgccgacagcttcacccaggagtgcatggaggagaagagcttcttctgcagagtgagcgtgagaaagagccacgagaacgagatcagataccaccccttcagaatgaccccctacctggtgaaggtgagagaccagcagggcgccgagagccagctgtgctgcctgctgctggccgagagagtgcacagcggctacgaggcccccagaatcccccccgagaagagaatcttcaccaccacccacacccccaactgcctgttccaggacgtggacgagagagccgtgcccctgctgggctacctgccccaggacctgatcgagacccccgtgctggtgcagctgcaccccagcgacagacccctgatgctggccatccacaagaagatcctgcagagcggcggccagcccttcgactacagccccatcagattcagagccagaaacggcgagtacatcaccctggacaccagctggagcagcttcatcaacccctggagcagaaagatcagcttcatcatcggcagacacaaggtgagagtgggccccctgaacgaggacgtgttcgccgcccacccctgcaccgaggagaaggccctgcaccccagcatccaggagctgaccgagcagatccacagactgctgctgcaggtgggcgtggtgcccgcctgccccccccccagatag

SEQ ID NO: 213291 - protein, 125 aa, Artificial Sequence
  derived and/or modified sequence
MPSEKTFKQRRTFEQRVEDVRLIREQHPTKIPVIIERYKGEKQLPVLDKTKFLVPDHVNMSELIKIIRRRLQLNANQAFFLLVNGHSMVSVSTPISEVYESEKDEDGFLYMVYASQETFGMKLSV

SEQ ID NO: 213292 - protein, 66 aa, Artificial Sequence
  derived and/or modified sequence
MSELIKIIRRRLQLNANQAFFLLVNGHSMVSVSTPISEVYESEKDEDGFLYMVYASQETFGMKLSV

SEQ ID NO: 213293 - DNA, 378 bp, Artificial Sequence
  derived and/or modified sequence
atgcccagcgagaagaccttcaagcagagaagaaccttcgagcagagagtggaggacgtgagactgatcagagagcagcaccccaccaagatccccgtgatcatcgagagatacaagggcgagaagcagctgcccgtgctggacaagaccaagttcctggtgcccgaccacgtgaacatgagcgagctgatcaagatcatcagaagaagactgcagctgaacgccaaccaggccttcttcctgctggtgaacggccacagcatggtgagcgtgagcacccccatcagcgaggtgtacgagagcgagaaggacgaggacggcttcctgtacatggtgtacgccagccaggagaccttcggcatgaagctgagcgtgtag

SEQ ID NO: 213294 - DNA, 201 bp, Artificial Sequence
  derived and/or modified sequence
atgagcgagctgatcaagatcatcagaagaagactgcagctgaacgccaaccaggccttcttcctgctggtgaacggccacagcatggtgagcgtgagcacccccatcagcgaggtgtacgagagcgagaaggacgaggacggcttcctgtacatggtgtacgccagccaggagaccttcggcatgaagctgagcgtgtag

SEQ ID NO: 213295 - DNA, 378 bp, Artificial Sequence
  derived and/or modified sequence
atgccgtcagaaaagacttttaaacagcgccggacatttgagcagagagtggaagatgtcaggttgatccgggaacagcatcccactaaaattcctgtgatcatcgaacggtacaagggggaaaaacagttgcccgtgctcgacaaaactaaattcctggtgccagatcatgtgaacatgtctgagctgattaagattatccgcagacgccttcaacttaacgccaatcaggctttttttctcttggtaaatggccatagcatggtaagtgtttccacccccattagcgaggtgtacgaatccgaaaaagatgaggatggtttcttgtatatggtgtatgcctcgcaggaaacttttggaatgaagctatcagtctag

SEQ ID NO: 213296 - DNA, 201 bp, Artificial Sequence
  derived and/or modified sequence
atgtccgaactgataaagataatccggagacggcttcagctcaacgcaaatcaagcattttttcttctcgtgaacggacactcgatggtctcggtcagtacaccgataagcgaggtgtacgaatcagagaaagacgaggatggcttcctgtatatggtttacgcgtcacaagagaccttcggcatgaaactgagtgtgtag

SEQ ID NO: 213297 - DNA, 378 bp, Artificial Sequence
  derived and/or modified sequence
atgcccagcgagaagaccttcaagcagaggaggacctttgagcagagggtggaggatgtgcggctcatccgggagcagcaccccaccaagatccctgtgatcatcgagcgctacaagggggagaagcagctgcctgtgctggacaagaccaagttcctggtgcctgaccacgtgaacatgtctgagctgatcaagatcatcagaagaaggctgcagctgaatgccaaccaggccttcttcctgctggtgaatggccacagcatggtgtctgtgtccacccccatcagcgaggtgtatgaaagtgagaaggatgaagatggcttcctgtacatggtgtatgccagccaggagaccttcggcatgaagctgtctgtgtag

SEQ ID NO: 213298 - DNA, 201 bp, Artificial Sequence
  derived and/or modified sequence
atgtctgagctgatcaagatcatcagaagaaggctgcagctgaatgccaaccaggccttcttcctgctggtgaatggccacagcatggtgtctgtgtccacccccatcagcgaggtgtatgagagcgagaaggatgaagatggcttcctgtacatggtgtatgccagccaggagaccttcggcatgaagctgtctgtgtag

SEQ ID NO: 213299 - DNA, 2688 bp, Artificial Sequence
  derived and/or modified sequence
acgggcgagcggcgaccctgcctcccggagacggcgcggcctgccctgcgcgcctcagccccgggtgccggcgtctcgggcagcaccaccaagtctctctggaggggaaaggatggtcggatttgccccatgtcccttcctctgacccctccctcaagagtgccccgggacaccccgcctgtggctcagcctcccccgccccgcgctgccatctcctcagggccgggcagcaggctcccgagcgcccacagacccggggtgcggcccagcccacaaccgtcacctcaggggcctcaggcgcccagcggtgctgggcggggctggggcacgaccgggagcatgcgcagagcgcgcgtttcgcccatcgcgcacgcgcacacacctgctccgcccccacgctgcgtgccgctgctgggttccgccacgcccgtcatggcggcggccccggccggctctggccccgcccctcggtgacgcgtcgcgagtcacctgaccaggctgcgggctgaggagatacaagggaagtggctatcgccagagtcggattcgccgccgcagcagccgccgcccccgggagccgccgggaccctcgcgtcgtcgccgccgccgccgcccagatccctgcaccatgccgtcggagaagaccttcaagcagcgccgcaccttcgaacaaagagtagaagatgtccgacttattcgagagcagcatccaaccaaaatcccggtgataatagaacgatacaagggtgagaagcagcttcctgttctggataaaacaaagttccttgtacctgaccatgtcaacatgagtgagctcatcaagataattagaaggcgcttacagctcaatgctaatcaggccttcttcctgttggtgaacggacacagcatggtcagcgtctccacaccaatctcagaggtgtatgagagtgagaaagatgaagatggattcctgtacatggtctatgcctcccaggagacgttcgggatgaaattgtcagtgtaaaaccagaaaaaatgcagctcttctagaattgtttaaacccttaccaaggaaaaaaaagggatgttaccaactgagatcgatcagttcatccaatcacagatcatgaaacagtagtgttcccacctaggagtgttaggaagttgtgtttgtgtttcaagcagaaaaactgagctccaagtgagcacattcagctttggaaactatattatttaatgtaggctagcttgttttcaaattttaaaagtttaaaaataaaatactttgcattctaagttgccaataaaatagaccttcaagttattttaatgctcttttctcactaataggaacttgtaattccagcagtaatttaaaggctttcagagagaccctgagtcttctcttcaggttcacaaaacccgccgcctttttgggtagaagttttctactcagctagagagatctccctaagaggatctttaggcctgagttgtgaagcgcaacccccgcaaaacgcatttgccatcacagttggcacaaacgcagggtaaacgggctgtgtgagaaaacggccctgactgtaaactgctgaaggtccctgactcctaagagaaccacacccaaagtcctcactcttgcaggggtagacatttctggtttggtttgttctctagatagttacacacataaagacaccactcaaaaggaaacttgaataatttataattttgatcgagtttcttaaaagaccctggagaaagagtggcatttcttctgtttcaggttttgtctgagttcaaactagtgcctgtgttgttacggaaagcagcagtgtaccagtgtcactctggagtacagcgggagaaacacaaaatagtataactgaaaacattaacattcagacacactcccttctgccttccggcttaaagctgtggatgatccacgtttttgtttttttaatgttaaatgtgtaactcagtattactgaaaaggtacccacattttgaatagtagttatcactcttaggtcagacagccatcagaattctcccacaccaagtgcatgtcagttgtggagaaaacatagcaaaaagagccgtacgctctttacagatactaatgtcaagagttaaacctcctcaggttcaacctgtgataaaagactagtgcttcccagtacttgcatggggttcactatttatagttttcttgggagtatcacaggaaaatcacaattacaccactttagaccctatgtgtagcaggtcacaacttacccttgtgtgtttagatgtgtatgaaatacctgtatacgttagtgaaagctgtttactgtaacggggaaaaccagattctttgcatctgggccctctactgattgttaaaggagttcctgtcacctgctccccccacccccgcatgcgtctgtccacttggctaacttttaatatgtgtatttttacattatgtatattcttaactggactgtctcgtttagactgtatacatcatatctgacattattgtaactaccgtgtgatcagtaagattcctgtaagaaatactgctttttaagaaaaaaaataacatgctgaggggtgacctatatcccatgtgagtggtcactttatttataggatctttaaaacatttttaatgaactaagttgaataaaggcacaattaaaaactgtcatcaaa

SEQ ID NO: 213300 - DNA, 2618 bp, Artificial Sequence
  derived and/or modified sequence
ggcggggtgcctgccgtaccccggccaccgccgcccccgcaagcgcgctgcgggcgagggtcgcgcttctggggcccaacagcccccggggccgcgctgggccgttcggctctgaagcggggctgcgccgggacccagcgcgtcaccttcagggctggttttcccgtcgagggagcccgcccgggtgcgagtgcctcttacagacctcagtgcctcggtcgagaggaggggaatgtgctgggccccggcctcgccgcgcccgggacggcccacagcggtgttgccagttcctgtctgtagcccaggagctggggtgggagacttctcttgggtttgcgattacgttctcaccttggcaccaggaataccgaatacatcccttttctgccggttcagactggaaacccagcttaggtgtgctggcatttggttaaacgtgcaggtgtcaccatcacaatatttactccacgcagatgatgcgaagtgattatttcccgcttgagcaagagaacgccgcagatccagaacaaagagtagaagatgtccgacttattcgagagcagcatccaaccaaaatcccgggtggaagaattactgtatatagaaaagatgtccgcagcgttcagtaaacacagacactaatgagactcagaggctcatctgtggtcaggtgataatagaacgatacaagggtgagaagcagcttcctgttctggataaaacaaagttccttgtacctgaccatgtcaacatgagtgagctcatcaagataattagaaggcgcttacagctcaatgctaatcaggccttcttcctgttggtgaacggacacagcatggtcagcgtctccacaccaatctcagaggtgtatgagagtgagaaagatgaagatggattcctgtacatggtctatgcctcccaggagacgttcgggatgaaattgtcagtgtaaaaccagaaaaaatgcagctcttctagaattgtttaaacccttaccaaggaaaaaaaagggatgttaccaactgagatcgatcagttcatccaatcacagatcatgaaacagtagtgttcccacctaggagtgttaggaagttgtgtttgtgtttcaagcagaaaaactgagctccaagtgagcacattcagctttggaaactatattatttaatgtaggctagcttgttttcaaattttaaaagtttaaaaataaaatactttgcattctaagttgccaataaaatagaccttcaagttattttaatgctcttttctcactaataggaacttgtaattccagcagtaatttaaaggctttcagagagaccctgagtcttctcttcaggttcacaaaacccgccgcctttttgggtagaagttttctactcagctagagagatctccctaagaggatctttaggcctgagttgtgaagcgcaacccccgcaaaacgcatttgccatcacagttggcacaaacgcagggtaaacgggctgtgtgagaaaacggccctgactgtaaactgctgaaggtccctgactcctaagagaaccacacccaaagtcctcactcttgcaggggtagacatttctggtttggtttgttctctagatagttacacacataaagacaccactcaaaaggaaacttgaataatttataattttgatcgagtttcttaaaagaccctggagaaagagtggcatttcttctgtttcaggttttgtctgagttcaaactagtgcctgtgttgttacggaaagcagcagtgtaccagtgtcactctggagtacagcgggagaaacacaaaatagtataactgaaaacattaacattcagacacactcccttctgccttccggcttaaagctgtggatgatccacgtttttgtttttttaatgttaaatgtgtaactcagtattactgaaaaggtacccacattttgaatagtagttatcactcttaggtcagacagccatcagaattctcccacaccaagtgcatgtcagttgtggagaaaacatagcaaaaagagccgtacgctctttacagatactaatgtcaagagttaaacctcctcaggttcaacctgtgataaaagactagtgcttcccagtacttgcatggggttcactatttatagttttcttgggagtatcacaggaaaatcacaattacaccactttagaccctatgtgtagcaggtcacaacttacccttgtgtgtttagatgtgtatgaaatacctgtatacgttagtgaaagctgtttactgtaacggggaaaaccagattctttgcatctgggccctctactgattgttaaaggagttcctgtcacctgctccccccacccccgcatgcgtctgtccacttggctaacttttaatatgtgtatttttacattatgtatattcttaactggactgtctcgtttagactgtatacatcatatctgacattattgtaactaccgtgtgatcagtaagattcctgtaagaaatactgctttttaagaaaaaaaataacatgctgaggggtgacctatatcccatgtgagtggtcactttatttataggatctttaaaacatttttaatgaactaagttgaataaaggcacaatt

SEQ ID NO: 213301 - DNA, 378 bp, Artificial Sequence
  derived and/or modified sequence
atgcccagcgagaagaccttcaagcagcggcggaccttcgagcagcgggtggaagatgtgagactgattcgtgaacagcatccaactaaaataccggtgattatcgagcgctacaagggggagaagcagctgcccgtgttggataagaccaaatttttggtcccagaccatgtgaacatgtccgagctcatcaaaataatcaggaggcgactccagctgaatgccaaccaggccttttttctgctggtaaatggccactccatggtcagcgttagcacacccatcagcgaagtgtacgaatcagaaaaggatgaagacgggttcctgtatatggtttacgcctctcaggaaacctttggtatgaaattaagtgtatag

SEQ ID NO: 213302 - DNA, 201 bp, Artificial Sequence
  derived and/or modified sequence
atgagcgagctgatcaagatcatccggcggcggctgcagctgaacgcgaatcaagcattcttcttgctggtcaatggacactccatggtttcagttagcactccaatatctgaagtgtatgagtccgaaaaggacgaggacggatttttatacatggtttacgcgtcgcaggaaaccttcgggatgaaactgagcgtgtag

SEQ ID NO: 213303 - DNA, 378 bp, Artificial Sequence
  derived and/or modified sequence
atgcctagtgagaagacatttaagcagagacggacatttgaacagcgcgtggaggacgtgcggttgataagagaacagcacccaaccaaaattccggtgatcattgagaggtacaagggggagaagcagttgccagtgctggacaagactaagtttctcgtgccagaccatgtgaacatgagtgaactcattaagatcatccggaggaggctgcagctgaacgccaaccaagcttttttcttgttggttaacggccactctatggtttccgtaagtacccccattagtgaggtatacgagtctgagaaggacgaagacggcttcctgtacatggtgtatgcctcccaggagactttcggtatgaagctgagcgtgtag

SEQ ID NO: 213304 - DNA, 201 bp, Artificial Sequence
  derived and/or modified sequence
atgagcgagcttatcaaaatcatcagaaggaggctccaactcaatgccaaccaggcgttctttctcctggtaaacggacactctatggtgtcggtgtcaacccccatctctgaggtgtatgagtcggaaaaagatgaggacgggttcttgtacatggtttatgccagccaggaaactttcgggatgaaacttagcgtgtag

SEQ ID NO: 213305 - protein, 504 aa, Artificial Sequence
  derived and/or modified sequence
MDLIPNFAMETWVLVATSLVLLYIYGTHSHKLFKKLGIPGPTPLPFLGTILFYLRGLWNFDRECNEKYGEMWGLYEGQQPMLVIMDPDMIKTVLVKECYSVFTNQMPLGPMGFLKSALSFAEDEEWKRIRTLLSPAFTSVKFKEMVPIISQCGDMLVRSLRQEAENSKSINLKDFFGAYTMDVITGTLFGVNLDSLNNPQDPFLKNMKKLLKLDFLDPFLLLISLFPFLTPVFEALNIGLFPKDVTHFLKNSIERMKESRLKDKQKHRVDFFQQMIDSQNSKETKSHKALSDLELVAQSIIIIFAAYDTTSTTLPFIMYELATHPDVQQKLQEEIDAVLPNKAPVTYDALVQMEYLDMVVNETLRLFPVVSRVTRVCKKDIEINGVFIPKGLAVMVPIYALHHDPKYWTEPEKFCPESRFSKKNKDSIDLYRYIPFGAGPRNCIGMRFALTNIKLAVIRALQNFSFKPCKETQIPLKLDNLPILQPEKPIVLKVHLRDGITSGP

SEQ ID NO: 213306 - DNA, 1515 bp, Artificial Sequence
  derived and/or modified sequence
atggatctgatccctaatttcgctatggagacttgggtcttggtcgcaacaagcctcgtcttgctgtacatttacggcacacacagccacaagctatttaagaagctcggcatccccgggccaacccctcttccctttctgggaacaattctcttttacctgcggggtctttggaacttcgatagagaatgcaatgaaaagtacggagaaatgtggggattgtacgagggccaacaacccatgctcgtaatcatggaccctgatatgattaagactgttttggttaaggaatgttacagcgtgttcacgaaccagatgcccctgggcccgatgggcttccttaagtctgcgctatcattcgcagaggatgaagaatggaaacggatacgaactctgttaagtcctgcctttacctcagtgaagttcaaagagatggttcccatcatttcacagtgtggggacatgctcgtccgttctctgagacaagaggcggaaaattcaaagtcaatcaatctcaaagatttcttcggtgcatacaccatggatgtgataacaggcacactgttcggagtcaacctcgatagcttaaataacccacaggaccctttcctgaagaatatgaagaagcttttaaaactggattttttggacccctttttactgctgatatctttatttccattcctcacaccggtgtttgaggctttaaatattggcttatttccaaaagacgtgacccactttctaaagaacagcattgaaagaatgaaggaatcaagacttaaggacaaacagaaacatcgagtcgattttttccagcagatgatagattctcagaatagcaaggagaccaaatcacacaaagcactgtcagatttggagctggtggcacagtccattataatcattttcgctgcgtatgatactactagcactacactgcctttcataatgtacgaactggcaacccacccagatgtccagcagaagctccaggaagagattgatgccgttctcccaaacaaagctcctgtgacctacgatgctctcgtgcagatggagtacctggatatggtggtgaatgaaaccctgcggctcttcccggtagtgtcccgtgtgacccgcgtatgtaaaaaagatatcgagatcaacggcgtctttattcctaaagggttggctgtgatggttcccatttatgccctgcaccacgatccaaagtactggaccgaacccgagaaattttgcccggaatccaggttttccaaaaaaaacaaggattctatcgatctgtaccggtacattccatttggcgccggtcctcgtaactgtattggaatgagattcgctcttacaaatatcaaactggccgtaattcgggcactgcagaatttctcttttaagccttgcaaagaaacccagattccgctgaagctggataacttgccgatcctgcaaccagaaaaacccatcgtgctaaaagtgcatttgagggacggaataaccagcggtccctag

SEQ ID NO: 213307 - DNA, 1515 bp, Artificial Sequence
  derived and/or modified sequence
atggacctgatccccaactttgccatggagacctgggtgctggtggccaccagcctggtgctgctgtacatctacggcacccacagccacaagctgttcaagaagctgggcatccctggccccacccccctgcccttcctgggcaccatcctcttctacctgcggggcctgtggaactttgacagagaatgtaatgagaagtacggggagatgtggggcctgtatgagggccagcagcccatgctggtgatcatggaccctgacatgatcaagacagtgctggtgaaggagtgctacagcgtcttcaccaaccagatgcccctgggccccatgggcttcctgaagagcgccctgagctttgctgaagatgaggagtggaagaggatccgcaccctgctgagccctgccttcacctctgtgaagttcaaggagatggtgcccatcatcagccagtgtggggacatgctggtgcgcagcctgcggcaggaggccgagaacagcaagagcatcaacctgaaggacttcttcggggcctacaccatggatgtgatcaccggcaccctgtttggagtgaacctggacagcctgaacaacccccaggaccccttcctgaagaacatgaagaagctgctgaagctggacttcctggaccccttcctgctgctgatcagcctcttccccttcctgacccctgtgtttgaggccctgaacatcggcctcttccccaaggatgtgacccacttcctgaagaacagcattgaaagaatgaaggagagccggctgaaggacaagcagaagcaccgggtggacttcttccagcagatgattgacagccagaacagcaaggagaccaagagccacaaggccctgagtgacctggagctggtggcccagagcatcatcatcatctttgctgcctatgacaccaccagcaccaccctgcccttcatcatgtatgagctggccacccacccagatgtgcagcagaagctgcaggaggagattgatgctgtgctgcccaacaaggcccctgtgacctatgatgccctggtgcagatggagtacctggacatggtggtgaatgagaccctgcggctcttccctgtggtgtcccgggtgaccagggtgtgcaagaaggacatcgagatcaacggggtcttcatccccaagggcctggccgtgatggtgcccatctatgccctgcaccacgaccccaagtactggacagagcctgagaagttctgcccagagagccgcttcagcaagaagaacaaggacagcattgacctgtaccgctacatcccctttggagctggccccaggaactgcatcggcatgagatttgccctgaccaacatcaagctggccgtcatccgggccctgcagaacttctccttcaagccctgcaaggagacccagatccccctgaagctggacaacctgcccatcctgcagcctgagaagcccatcgtgctgaaggtgcacctgagagatggcatcaccagcggcccctag

SEQ ID NO: 213308 - DNA, 1515 bp, Artificial Sequence
  derived and/or modified sequence
atggacctgatccccaacttcgccatggagacctgggtgctggtggccaccagtttggtcctgctgtatatttatggcacccactcgcataagttgttcaagaagcttggaatccctggacctactcctctcccctttttgggcacaatacttttttacctgcggggcctgtggaactttgatcgagagtgcaatgagaagtacggggaaatgtggggcctgtacgaaggccagcagcctatgctggtaatcatggatcctgacatgatcaagaccgtgttggtgaaagaatgctattcagtatttactaatcagatgcccctcggccccatgggatttctcaaaagcgctttgtcgttcgccgaagacgaggagtggaagcgcataaggaccctgctgtctcctgccttcacctcggtgaagtttaaagaaatggttccaattataagccagtgtggggacatgctggtgcgttcactgcgccaggaggctgagaactctaaatctatcaacctcaaggacttcttcggcgcttacacaatggacgtaataacgggaacactgtttggggtgaatctcgactcactgaacaacccacaggatccctttttaaagaatatgaagaagctcctcaagctcgatttcttggatcccttcctactgctgattagcctgtttcccttcctgactcctgtcttcgaggcactgaacatcggcctgttcccaaaggatgtcactcattttttaaagaactctatagaacgaatgaaggaatctagactcaaggacaaacagaagcacagggtggatttttttcagcagatgattgattctcaaaactctaaggaaaccaaatcacacaaggccctgtccgacttagagctggtggctcagtcgatcatcatcatattcgccgcatacgacacgacttctacaacactccctttcattatgtacgagctcgcaactcacccggatgtccaacagaaactgcaggaggagatagacgcagtcctccctaataaggctccagtgacatacgatgcattggttcagatggagtaccttgacatggtggtaaatgagactctgaggttgttcccggtggttagtcgcgttacaagagtctgcaaaaaagacattgaaatcaacggcgtcttcatccctaaagggctggcagtcatggtaccaatctatgccttacatcatgacccaaagtactggacagagccagaaaagttttgtcccgaatctcgctttagcaagaaaaacaaggactccatcgacctgtatagatatattcccttcggtgccgggcctcgcaattgcattggaatgagatttgcactgaccaacatcaaacttgccgtgatcagagcattacaaaatttttcgtttaaaccttgcaaggagacccagatccccctcaagctagacaatctgcctattctccaaccagaaaaacccatagttctgaaggtgcatcttagggatgggattactagcggcccttag

SEQ ID NO: 213309 - DNA, 1515 bp, Artificial Sequence
  derived and/or modified sequence
atggacctgatcccgaattttgctatggagacatgggttctggtagcgacctccctcgtgctcctctacatctacggaacacactctcacaaactgttcaagaagcttggtataccgggtcctacacccctgccgtttctagggaccatcctgttttacctccgcggattatggaattttgatagagagtgtaatgaaaaatatggcgaaatgtggggactctatgaggggcagcagcccatgctcgtgattatggaccctgatatgataaagaccgtcctagtaaaagagtgctattccgtttttacaaatcaaatgcccctgggtcctatgggcttcttgaagtcagctttatccttcgccgaggatgaggagtggaagcggattaggacactgttgagtcctgcctttacatctgtgaaattcaaggagatggtaccaataatttctcagtgcggagacatgctagtgaggtcactcagacaggaagcagagaacagcaagagcattaatttgaaggactttttcggggcatacactatggacgtgatcacaggcaccctcttcggcgtaaatttagacagtctgaataatcctcaggacccttttctgaaaaacatgaagaagctgcttaagctcgactttttggatccgtttcttctgctcatctccctgtttccatttctcacgccggtgttcgaagctctgaatattggtctgtttccaaaggacgtgacacacttcttaaagaatagcatagaaagaatgaaagagagccgcttaaaggacaagcagaaacaccgggtcgacttttttcaacagatgattgacagtcagaacagcaaggaaaccaagagccataaggccctgagcgacctagagctggttgcgcagtctataatcattatcttcgccgcttacgacactacatccacaactttacctttcattatgtacgagttagcaactcatcccgatgtccagcagaagctgcaagaagaaattgacgccgtgctacctaacaaggcaccagtgacttacgacgctctggtgcagatggagtacctcgatatggtagtgaatgagacattacggctgttcccggtcgtgtctagagtcacacgtgtctgtaagaaggacatagaaataaatggcgtttttattcctaaggggctggccgtgatggttcccatctacgcgctccaccatgaccctaaatactggacagagccagaaaaattctgcccagaaagtcgtttctctaaaaagaataaagactctatagatctctacaggtacatccccttcggagccggtcctagaaattgtatcgggatgcgcttcgccctgaccaacatcaaacttgcggtcatcagggctctccaaaatttctcgtttaaaccctgtaaagagacacaaattcccctcaaattggacaatctccctatattgcagccggagaagcctattgtcctgaaggtccatctccgggatggaattacgagcgggccatag

SEQ ID NO: 213310 - DNA, 1515 bp, Artificial Sequence
  derived and/or modified sequence
atggacctgatccccaacttcgccatggagacctgggtgctggtggccaccagcctggtgctgctgtacatctacggcacccacagccacaagctgttcaagaagctgggcatccccggccccacccccctgcccttcctgggcaccatcctgttctacctgagaggcctgtggaacttcgacagagagtgcaacgagaagtacggcgagatgtggggcctgtacgagggccagcagcccatgctggtgatcatggaccccgacatgatcaagaccgtgctggtgaaggagtgctacagcgtgttcaccaaccagatgcccctgggccccatgggcttcctgaagagcgccctgagcttcgccgaggacgaggagtggaagagaatcagaaccctgctgagccccgccttcaccagcgtgaagttcaaggagatggtgcccatcatcagccagtgcggcgacatgctggtgagaagcctgagacaggaggccgagaacagcaagagcatcaacctgaaggacttcttcggcgcctacaccatggacgtgatcaccggcaccctgttcggcgtgaacctggacagcctgaacaacccccaggaccccttcctgaagaacatgaagaagctgctgaagctggacttcctggaccccttcctgctgctgatcagcctgttccccttcctgacccccgtgttcgaggccctgaacatcggcctgttccccaaggacgtgacccacttcctgaagaacagcatcgagagaatgaaggagagcagactgaaggacaagcagaagcacagagtggacttcttccagcagatgatcgacagccagaacagcaaggagaccaagagccacaaggccctgagcgacctggagctggtggcccagagcatcatcatcatcttcgccgcctacgacaccaccagcaccaccctgcccttcatcatgtacgagctggccacccaccccgacgtgcagcagaagctgcaggaggagatcgacgccgtgctgcccaacaaggcccccgtgacctacgacgccctggtgcagatggagtacctggacatggtggtgaacgagaccctgagactgttccccgtggtgagcagagtgaccagagtgtgcaagaaggacatcgagatcaacggcgtgttcatccccaagggcctggccgtgatggtgcccatctacgccctgcaccacgaccccaagtactggaccgagcccgagaagttctgccccgagagcagattcagcaagaagaacaaggacagcatcgacctgtacagatacatccccttcggcgccggccccagaaactgcatcggcatgagattcgccctgaccaacatcaagctggccgtgatcagagccctgcagaacttcagcttcaagccctgcaaggagacccagatccccctgaagctggacaacctgcccatcctgcagcccgagaagcccatcgtgctgaaggtgcacctgagagacggcatcaccagcggcccctag

SEQ ID NO: 213311 - DNA, 1515 bp, Artificial Sequence
  derived and/or modified sequence
atggatctcattccaaactttgccatggaaacatgggttcttgtggctaccagcctggtactcctctatatttatgggacccattcacataaactttttaagaagctgggaattcctgggccaacccctctgccttttctgggaactattttgttctaccttaggggtctttggaattttgacagagaatgtaatgaaaaatacggagaaatgtgggggctgtatgaggggcaacagcccatgctggtcatcatggatcccgacatgatcaaaacagtgttagtgaaagaatgttactctgtcttcacaaaccagatgcctttaggtccaatgggatttctgaaaagtgccttaagttttgctgaagatgaagaatggaagagaatacgaacattgctatctccagctttcaccagtgtaaaattcaaggaaatggtccccatcatttcccaatgtggagatatgttggtgagaagcctgaggcaggaagcagagaacagcaagtccatcaacttgaaagatttctttggggcctacaccatggatgtaatcactggcacattatttggagtgaacttggattctctcaacaatccacaagatccctttctgaaaaatatgaagaagcttttaaaattggattttttggatccctttttactcttaatatcactctttccatttcttaccccagtttttgaagccctaaatatcggtttgtttccaaaagatgttacccattttttaaaaaattccattgaaaggatgaaagaaagtcgcctcaaagataaacaaaagcatcgagtagatttctttcaacagatgatcgactcccagaattccaaagaaacaaagtcccataaagctctgtctgatctggagcttgtggcccagtcaattatcatcatttttgctgcctatgacacaactagcaccactctccccttcattatgtatgaactggccactcaccctgatgtccagcagaaactgcaggaggagattgacgcagttttacccaataaggcacctgtcacctacgatgccctggtacagatggagtaccttgacatggtggtgaatgaaacgctcagattattcccagttgttagtagagttacgagagtctgcaagaaagatattgaaatcaatggagtgttcattcccaaagggttagcagtgatggttccaatctatgctcttcaccatgacccaaagtactggacagagcctgagaagttctgccctgaaagtaggttcagtaagaagaacaaggacagcatagatctttacagatacataccttttggagctggaccccgaaactgcattggcatgaggtttgctctcacaaacataaaacttgctgtcattagagcactgcagaacttctccttcaaaccttgtaaagagactcagatcccactgaaattagacaatctaccaattcttcaaccagaaaaacctattgttctaaaagtgcacttaagagatgggattacaagtggaccctga

SEQ ID NO: 213312 - protein, 234 aa, Artificial Sequence
  derived and/or modified sequence
MPSGCHSSPPSGLRGDMASLVPLSPYLSPTVLLLVSCDLGFVRADRPPSPVNVTVTHLRANSATVSWDVPEGNIVIGYSISQQRQNGPGQRVIREVNTTTRACALWGLAEDSDYTVQVRSIGLRGESPPGPRVHFRTLKGSDRLPSNSSSPGDITVEGLDGERPLQTGEVVIIVVVLLMWAAVIGLFCRQYDIIKDNDSNNNPKEKGKGPEQSPQGRPVGTRQKKSPSINTIDV

SEQ ID NO: 213313 - DNA, 1657 bp, Artificial Sequence
  derived and/or modified sequence
cgcgcgtcccggccgggctgcggcggagcgagcggggccagcgctgcagaaggcggcggctggctctccgggacggtcacatcccgctgcaggggcgggcggaggccgccgcactgcctcccgcaccggggacccaggccagcgtccgggcaacgccccctgctcccggacagactccgtggcccgctcgagccctgggggctccgcagacccgcgcccgctccgcccgcagctcggccccgcgctgcccgcgtcgccgggcccgcgccgggatggggtaggggcagcgccaccgagtcgggcgatgggccgccctctgggcaccgagcagccccccgaggcctgaccaaccgcgaggaccggcggaggagccccgcctggatgtcaagcggatgccaagcggatgccacagttccccccccagcggactccgtggggacatggcttcgctggtgcccctttccccatatctaagccccacggtcctcctgctggtcagctgtgacctgggcttcgtgcgagcagaccggcctccctctcctgtgaatgtgacggtcactcacctcagagccaactcggccactgtgtcctgggacgtcccagaaggcaacatcgtcattggctactccatttcccagcaacggcagaatggccccgggcagcgtgtgattcgggaggtgaacaccaccacccgggcctgtgccctctggggcctggctgaagacagtgactacacagtgcaggtcaggagcatcggccttcggggagagagtcccccagggccccgggtgcacttccgaactctcaagggttctgaccggctaccttcaaacagttcaagcccaggtgacatcacagtggaaggtctggatggagagcggccactgcagactggggaagtggtcatcattgtggtggtgttgctcatgtgggctgctgtaattgggctgttctgccgtcagtatgacatcatcaaggacaatgactccaacaacaatcccaaggagaagggaaaggggccggaacagagtcctcagggaaggccagtggggacaagacagaaaaagtcaccatctatcaacaccatcgacgtttgagtgaagaaacacacccagaagagagatgcactaacaactggggatagggatggggtcagggggagcccaagatggtgatctgcccgagactcccagagggtaatgccactcccacaatctcaggcctggtacccatcctctttccactgtgagcagagccagaaggtaggtctgttcagagtctgtgcccctggacctggggagtggatatcagatgggatatctccttccattccccggtccaggggagagtcactagttgtaccctactccattaggtcccaaatgggggccccatttcacctgtatcaggactctgagcatccccagctgccccacatcttgcctctggccctcagagaggggtgtttctgtgggtactcctcttaccccagcaaataaaaggaattgtctgaccctagaggcagatgctgcactgcactactccaatgtcttccatggagcctcaggtgctccccctctcacctggcagccccttcagctgctagtgatatcacttgttggacatttttccaataaaggttcttggacaaactgga

SEQ ID NO: 213314 - DNA, 705 bp, Artificial Sequence
  derived and/or modified sequence
atgccctccggctgtcactcctctccacctagtggactgaggggggatatggccagtctggtgccacttagtccctatttatccccgactgtgcttctactcgttagctgcgatctgggattcgtgcgagccgatcgcccaccatctcctgtgaatgtgacagttactcacctacgggcaaattctgccaccgtaagttgggacgttcccgaaggcaatatagtcatcggttattccatatctcagcaacgccagaatggtccagggcagagggtcattcgggaggtgaacaccactaccagggcttgcgccctttgggggcttgccgaggactcggactataccgtgcaagtgcggagtattggcctgagaggagagtcacctcccggcccaagggtccatttcagaacactgaaaggctcagatagactccctagcaattcctcctcacccggagatattaccgttgaggggctggatggtgagcggcctttgcagaccggcgaggtcgtaattattgtggttgtcttactaatgtgggccgccgtgatcggtctgttttgccgacagtatgacataatcaaagataatgatagcaataataatcctaaagagaagggtaagggaccagagcaaagtccacagggacgtccagtaggcacacgccagaagaagagtccctcaattaatacaatagacgtctag

SEQ ID NO: 213315 - DNA, 705 bp, Artificial Sequence
  derived and/or modified sequence
atgcccagcggctgccacagcagccccccatctggcctgcggggggacatggccagcctggtgcccctgagcccctacctgagccccaccgtgctgctgctggtgtcctgtgacctgggctttgtgcgggctgacaggcctcccagccctgtgaatgtgacagtgacccacctgcgggccaacagcgccaccgtgtcctgggatgtgcctgagggcaacatcgtcatcggctacagcatcagccagcagaggcagaatggacctggccagagggtcatccgggaggtgaacaccaccacccgggcctgtgccctgtggggcctggccgaggacagcgactacacagtgcaggtgcgcagcatcggcctgcggggggagagccccccaggcccccgggtgcacttccgcaccctgaagggcagtgaccggctgcccagcaacagcagcagccctggggacatcaccgtggagggcctggatggagagcggcccctgcagacaggagaggtggtgatcatcgtggtggtgctgctgatgtgggccgccgtcatcggcctcttctgccggcagtatgacatcatcaaggacaatgacagcaacaacaaccccaaggagaagggcaagggccctgagcagagcccccagggccggcctgtgggcacccggcagaagaagagccccagcatcaacaccattgatgtgtag

SEQ ID NO: 213316 - DNA, 705 bp, Artificial Sequence
  derived and/or modified sequence
atgcccagcggctgccacagcagcccccccagcggcctgcggggcgacatggctagtctcgtgccccttagcccgtacctttccccaactgtgctacttttggtatcttgcgacctaggcttcgtgcgcgcagatcgccctccttctccagtcaacgtgacagtgacccatctcagagccaactcggctactgtaagctgggatgttcctgagggaaatatcgtcataggatactccattagtcagcagaggcagaacggaccagggcagagggtgattcgggaggttaacactacgacacgcgcctgtgctctgtgggggctggccgaagactctgactacaccgtgcaggtccggtcaataggcctacggggcgaatctcccccgggaccaagggtgcattttagaactcttaaaggatctgaccgcctcccgagcaatagcagcagccctggcgatattactgtagagggcctggacggagagcggcccctgcagactggcgaggtggtgattatagttgtggtcctgttgatgtgggcagcagttataggactgttttgcagacagtatgatatcatcaaggacaatgacagcaataacaatcctaaagagaagggaaaaggaccagagcagagcccacagggccggccagtaggcacgaggcagaagaaatcgccctctattaatacgatcgatgtgtag

SEQ ID NO: 213317 - DNA, 705 bp, Artificial Sequence
  derived and/or modified sequence
atgccgagcgggtgtcacagttctcccccttcagggctccgcggtgacatggcatcactggtgcctctgtcaccatacctttcgccaacagtgttgctgcttgttagttgtgatctgggtttcgtaagagccgatagacccccttccccagtaaatgtcaccgtgacacatttacgcgcaaactctgccactgtgtcctgggacgtgccagaggggaatatcgtaatcgggtattcaatatcccaacagcggcagaatggtccaggccagcgggtcatccgagaggtcaacacaacaacaagggcttgcgctctatgggggctagctgaggactcggattatacggtgcaggttaggtctatcggcctacgcggagaatctcccccaggtcctcgggtccactttcgcacgcttaagggtagcgatagactcccatccaattcttcatccccaggtgatatcacagtcgaagggctggatggtgagcgaccacttcagaccggagaggtcgtgatcatcgtggttgtgttgctgatgtgggcagctgtcattgggttattttgtagacagtatgacattatcaaagataacgatagtaataataaccctaaggaaaagggaaaaggcccagaacagagccctcaaggcaggcctgtcggaactaggcaaaagaagtccccgagcattaacaccattgatgtatag

SEQ ID NO: 213318 - DNA, 705 bp, Artificial Sequence
  derived and/or modified sequence
atgcccagcggctgccacagcagcccccccagcggcctgagaggcgacatggccagcctggtgcccctgagcccctacctgagccccaccgtgctgctgctggtgagctgcgacctgggcttcgtgagagccgacagaccccccagccccgtgaacgtgaccgtgacccacctgagagccaacagcgccaccgtgagctgggacgtgcccgagggcaacatcgtgatcggctacagcatcagccagcagagacagaacggccccggccagagagtgatcagagaggtgaacaccaccaccagagcctgcgccctgtggggcctggccgaggacagcgactacaccgtgcaggtgagaagcatcggcctgagaggcgagagcccccccggccccagagtgcacttcagaaccctgaagggcagcgacagactgcccagcaacagcagcagccccggcgacatcaccgtggagggcctggacggcgagagacccctgcagaccggcgaggtggtgatcatcgtggtggtgctgctgatgtgggccgccgtgatcggcctgttctgcagacagtacgacatcatcaaggacaacgacagcaacaacaaccccaaggagaagggcaagggccccgagcagagcccccagggcagacccgtgggcaccagacagaagaagagccccagcatcaacaccatcgacgtgtag

SEQ ID NO: 213319 - protein, 450 aa, Artificial Sequence
  derived and/or modified sequence
MATFSRQEFFQQLLQGCLLPTAQQGLDQIWLLLAICLACRLLWRLGLPSYLKHASTVAGGFFSLYHFFQLHMVWVVLLSLLCYLVLFLCRHSSHRGVFLSVTILIYLLMGEMHMVDTVTWHKMRGAQMIVAMKAVSLGFDLDRGEVGTVPSPVEFMGYLYFVGTIVFGPWISFHSYLQAVQGRPLSCRWLQKVARSLALALLCLVLSTCVGPYLFPYFIPLNGDRLLRKWLRAYESAVSFHFSNYFVGFLSEATATLAGAGFTEEKDHLEWDLTVSKPLNVELPRSMVEVVTSWNLPMSYWLNNYVFKNALRLGTFSAVLVTYAASALLHGFSFHLAAVLLSLAFITYVEHVLRKRLARILSACVLSKRCPPDCSHQHRLGLGVRALNLLFGALAIFHLAYLGSLFDVDVDDTTEEQGYGMAYTVHKWSELSWASHWVTFGCWIFYRLIG

SEQ ID NO: 213320 - protein, 379 aa, Artificial Sequence
  derived and/or modified sequence
MVWVVLLSLLCYLVLFLCRHSSHRGVFLSVTILIYLLMGEMHMVDTVTWHKMRGAQMIVAMKAVSLGFDLDRGEVGTVPSPVEFMGYLYFVGTIVFGPWISFHSYLQAVQGRPLSCRWLQKVARSLALALLCLVLSTCVGPYLFPYFIPLNGDRLLRKWLRAYESAVSFHFSNYFVGFLSEATATLAGAGFTEEKDHLEWDLTVSKPLNVELPRSMVEVVTSWNLPMSYWLNNYVFKNALRLGTFSAVLVTYAASALLHGFSFHLAAVLLSLAFITYVEHVLRKRLARILSACVLSKRCPPDCSHQHRLGLGVRALNLLFGALAIFHLAYLGSLFDVDVDDTTEEQGYGMAYTVHKWSELSWASHWVTFGCWIFYRLIG

SEQ ID NO: 213321 - DNA, 1353 bp, Artificial Sequence
  derived and/or modified sequence
atggcaaccttttctcggcaagagtttttccaacagttgttacagggttgcctcctgccaaccgcacagcagggactagaccagatctggttacttttggctatttgcctcgcctgccgcctcctttggcgactgggcctgccctcatatcttaaacacgctagcaccgtggccggcggcttcttttcactttatcacttttttcagctgcacatggtgtgggtggtgctgctgagtctgctatgctatctggtgctgtttctgtgcaggcattccagtcaccgcggggtgttcctgagcgttacaattctgatctacctcctcatgggggagatgcatatggttgatacagtaacctggcataaaatgcgcggagcgcaaatgatcgtcgccatgaaagcagtttctcttgggtttgatttggatcgcggcgaggtgggaacagtgccaagccccgtggagttcatgggctacctgtattttgtgggaacaattgtgttcggaccttggatctcctttcattcttatctgcaggccgtgcagggccgccccctctcatgtcggtggttacagaaagtggcccggagcctggctctggccctactctgcctggtgcttagtacctgcgtgggtccatacttattcccatattttattccgctgaacggagaccgcctactacgcaaatggttgagggcctacgaaagcgctgtcagttttcactttagcaattactttgtggggttcctctctgaagctacagccacactcgctggggctgggttcacagaggagaaggaccacttagaatgggacttgaccgtctccaagcctttaaatgttgagctgcctcgctctatggttgaggtcgtgacctcttggaatctgcccatgagctattggcttaacaactatgtgtttaaaaatgcccttcgcttaggcacttttagcgctgttctggtgacatatgcagcgagcgcactcctccatggcttcagttttcacttagctgctgttctgctctctctggcatttattacgtatgttgaacatgttttaagaaagcgactggctagaatcctctctgcgtgcgtgctgtctaaacggtgccctccggactgcagtcaccagcaccgactaggccttggggtgagggcgctgaatctcttatttggcgcccttgccatcttccacctcgcatacctgggctccctatttgacgtcgatgtggatgatacaaccgaagaacaggggtacggcatggcctatacagtccacaagtggtcggagctgtcctgggcctcccattgggtgacgttcggctgctggatcttttatcgactgattgggtag

SEQ ID NO: 213322 - DNA, 294 bp, Artificial Sequence
  derived and/or modified sequence
atggcaaccttttcccggcaggaattctttcagcaattgctccaagggtgccttctgccaaccgcacagcaagggctcgaccaaatttggctcttactcgccatctgcctagcctgccggctgctgtggagattaggtttgcctagttaccttaaacatgcctcaactgtcgccggaggatttttttcactatatcacttttttcagctgcacatggtgtgggtcgtcctgctgagcttactgtgctacctggtgctctttctgtgtaggcattcgagtcaccgaggggtgtag

SEQ ID NO: 213323 - DNA, 1353 bp, Artificial Sequence
  derived and/or modified sequence
atggccaccttcagccggcaggagttcttccagcagctgctgcagggctgcctgctgcccacagcccagcagggcctggaccagatctggctgctgctggccatctgcctggcctgccgcctgctgtggaggctgggcctgcccagctacctgaagcacgccagcacagtggccggcggcttcttcagcctgtaccacttcttccagctgcacatggtgtgggtggtgctgctgagcctgctgtgctacctggtgctcttcctgtgccgccacagcagccaccggggcgtcttcctgtctgtgaccatcctgatctacctgctgatgggagagatgcacatggtggacacagtgacctggcacaagatgagaggagcccagatgattgtggccatgaaggctgtgtccctgggctttgacctggacagaggagaggtgggcaccgtgcccagccctgtggagttcatgggctacctgtactttgtgggcaccatcgtgtttggcccctggatctccttccacagctacctgcaggccgtgcagggccggcccctgagctgccgctggctgcagaaggtggcccggagcctggccctggccctgctgtgcctggtgctgagcacctgtgtgggcccctacctgttcccctacttcatccccctgaatggagaccggctgctgaggaagtggctgcgggcctatgagagcgctgtgtccttccacttcagcaactactttgtgggcttcctgtctgaggccacagccaccctggccggggccggcttcacagaggagaaggaccacctggagtgggacctgactgtgtccaagcccctgaatgtggagctgcccaggtccatggtggaggtggtgacctcctggaacctgcccatgagctactggctgaacaactacgtgttcaagaatgccctgcggctgggcaccttctctgctgtgctggtgacctacgccgccagcgccctgctgcacggcttctccttccacctggccgctgtgctgctgagcctggccttcatcacctacgtggagcacgtgctgaggaagaggctggcccgcatcctgagcgcctgtgtgctgagcaagcgctgccccccagactgcagccaccagcaccggctgggcctgggcgtgcgggccctgaacctgctgtttggagccctggccatcttccacctggcctacctgggcagcctgtttgatgtggatgtggatgacaccacagaggagcagggctacggcatggcctacacagtgcacaagtggagcgagctgtcctgggccagccactgggtgaccttcggctgctggatcttctaccgcctgattggatag

SEQ ID NO: 213324 - DNA, 294 bp, Artificial Sequence
  derived and/or modified sequence
atggccaccttcagccggcaggagttcttccagcagctgctgcagggctgcctgctgcccacagcccagcagggcctggaccagatctggctgctgctggccatctgcctggcctgccgcctgctgtggaggctgggcctgcccagctacctgaagcacgccagcacagtggccggcggcttcttcagcctgtaccacttcttccagctgcacatggtgtgggtggtgctgctgagcctgctgtgctacctggtgctcttcctgtgccgccacagcagccaccggggcgtgtag

SEQ ID NO: 213325 - DNA, 1353 bp, Artificial Sequence
  derived and/or modified sequence
atggccaccttcagccggcaggagttcttccagcagctgctgcagggttgcctactccctacagcacagcaggggctagaccagatctggctattgctagctatatgtctagcctgtaggctcctttggcgcctaggacttccatcttacctgaagcacgcgtccacggtggctggtggctttttcagcctttaccatttcttccaactgcatatggtctgggtagtcttgctgtccttgctgtgttatctcgtcctctttctctgccgccatagctcgcacagaggagtcttcttgagtgttacaatacttatctacctcctcatgggtgagatgcacatggtggacaccgtgacctggcataaaatgcgcggagcacagatgatcgtcgctatgaaagccgtgtcactgggattcgatttagaccgcggcgaagtggggactgtaccgtcgccagtggaattcatgggctacttgtacttcgtgggcactattgtcttcggtccctggatctccttccacagctatctgcaggccgtgcaaggccgacctctgtcgtgcagatggcttcaaaaggtcgcacgcagcctcgccctggctctgctttgtcttgtgctgagcacgtgtgtaggaccctacctctttccctacttcattccccttaatggggaccgactgctacgcaaatggcttcgcgcgtatgaaagcgcagtaagctttcacttcagtaattatttcgtgggatttctgagtgaagctaccgctacactggccggcgctgggtttacggaggaaaaggaccatctggagtgggaccttacggtcagcaaacccctcaacgttgaacttccccgatccatggtcgaggtggtgacaagttggaacctcccaatgagctactggctgaacaactacgtctttaagaacgcgcttaggctcggaaccttctcagccgtccttgttacctacgctgcatctgcactactgcacggtttctcatttcacttagccgccgttctcttaagcctcgcttttatcacatatgtcgaacatgtgttgcggaaacggttggcacgcatcttgagcgcctgcgtcctgtctaaacggtgcccaccagattgcagccaccaacaccgcttgggcctgggggtgagagcattaaacttactcttcggggccctcgcaatcttccacttggcataccttggctctcttttcgacgtggacgttgacgataccaccgaagaacaagggtatggtatggcttacacggtgcacaagtggtccgagctgagctgggcgtcacattgggttacatttggctgctggattttttacaggttaatagggtag

SEQ ID NO: 213326 - DNA, 294 bp, Artificial Sequence
  derived and/or modified sequence
atggccaccttcagccggcaggagttcttccagcagctgctgcagggctgccttttacccacagcccagcagggactagaccaaatatggcttttattagcgatttgtttagcgtgtaggctcctctggaggctggggttgcctagttatctgaaacatgccagtacagtggccgggggttttttcagcctctatcacttctttcagttacacatggtctgggttgtgttgctgagcttgctgtgctatctggtcctcttcttgtgccggcacagtagtcaccgcggcgtgtag

SEQ ID NO: 213327 - DNA, 1353 bp, Artificial Sequence
  derived and/or modified sequence
atggcaacatttagtcgtcaggagtttttccaacaacttttgcaaggatgcctgctccccaccgcgcagcagggcctagatcagatttggctcctcctggcgatctgcctcgcttgtagattattatggaggcttggccttcccagctaccttaagcacgcttctacagtcgctggaggtttctttagcctgtatcactttttccagttacacatggtgtgggttgtgctactgtctcttctctgttaccttgtgttgttcttgtgcagacactcatcccatcgaggagtttttttaagcgtgacgatcctgatttatctgctaatgggagagatgcacatggttgatacagtgacatggcacaaaatgaggggggcacagatgatcgtggccatgaaggccgtttctttaggatttgacctggaccggggagaagtgggcaccgtcccatcccccgtggaatttatgggatatctctacttcgtgggaacgatcgtgttcggaccctggatcagctttcatagttatctgcaggcagtgcaaggcaggccccttagctgccgatggctccagaaagtagcaagaagcttggctctggcactgctctgcctagtcttgagtacctgcgtaggaccttatctgttcccctactttatccctctgaacggggaccgcctgctgagaaaatggcttcgagcctatgaaagtgccgtcagtttccatttctctaattacttcgtggggttcctgtcagaagccactgcaaccctggctggtgccggattcacggaggagaaggaccatctcgagtgggacctgacagtgagcaagcccctcaacgtggagctgccccgatccatggtagaggtggttacctcctggaacctgcctatgagctactggctgaacaattatgtcttcaagaatgcactgcgtctgggcacgttctctgcggtgctcgtgacttatgcagctagcgccctgctgcatgggttctctttccatctagccgcagtgcttctctcactcgcgttcatcacatatgtggaacatgtgctaagaaagaggttagctagaattctgtcagcatgtgtgctctctaaaagatgcccccctgactgctctcaccaacaccgcctcggcctgggggtcagggctctgaatctgttgttcggagcactcgcaatctttcacctcgcctatttggggtccctatttgacgttgatgtggacgacacgacagaagagcagggatatggcatggcgtacacagttcataaatggtctgagttgagctgggccagtcactgggtgacctttgggtgctggatcttttataggctgatcgggtag

SEQ ID NO: 213328 - DNA, 294 bp, Artificial Sequence
  derived and/or modified sequence
atggctacgttttccagacaagaattttttcagcagctgctgcagggttgtctgctcccaacagcccagcaaggactggatcagatctggctcttgttagctatttgtcttgcttgcaggctcctttggcgccttggactcccaagctacctaaagcacgcgagcacggtagccggtggtttcttttcactctaccatttcttccagctgcatatggtttgggtagtgttgctgagcctcttatgctatttggtactgttcctatgcagacacagctctcatcgcggagtgtag

SEQ ID NO: 213329 - DNA, 1353 bp, Artificial Sequence
  derived and/or modified sequence
atggccaccttcagcagacaggagttcttccagcagctgctgcagggctgcctgctgcccaccgcccagcagggcctggaccagatctggctgctgctggccatctgcctggcctgcagactgctgtggagactgggcctgcccagctacctgaagcacgccagcaccgtggccggcggcttcttcagcctgtaccacttcttccagctgcacatggtgtgggtggtgctgctgagcctgctgtgctacctggtgctgttcctgtgcagacacagcagccacagaggcgtgttcctgagcgtgaccatcctgatctacctgctgatgggcgagatgcacatggtggacaccgtgacctggcacaagatgagaggcgcccagatgatcgtggccatgaaggccgtgagcctgggcttcgacctggacagaggcgaggtgggcaccgtgcccagccccgtggagttcatgggctacctgtacttcgtgggcaccatcgtgttcggcccctggatcagcttccacagctacctgcaggccgtgcagggcagacccctgagctgcagatggctgcagaaggtggccagaagcctggccctggccctgctgtgcctggtgctgagcacctgcgtgggcccctacctgttcccctacttcatccccctgaacggcgacagactgctgagaaagtggctgagagcctacgagagcgccgtgagcttccacttcagcaactacttcgtgggcttcctgagcgaggccaccgccaccctggccggcgccggcttcaccgaggagaaggaccacctggagtgggacctgaccgtgagcaagcccctgaacgtggagctgcccagaagcatggtggaggtggtgaccagctggaacctgcccatgagctactggctgaacaactacgtgttcaagaacgccctgagactgggcaccttcagcgccgtgctggtgacctacgccgccagcgccctgctgcacggcttcagcttccacctggccgccgtgctgctgagcctggccttcatcacctacgtggagcacgtgctgagaaagagactggccagaatcctgagcgcctgcgtgctgagcaagagatgcccccccgactgcagccaccagcacagactgggcctgggcgtgagagccctgaacctgctgttcggcgccctggccatcttccacctggcctacctgggcagcctgttcgacgtggacgtggacgacaccaccgaggagcagggctacggcatggcctacaccgtgcacaagtggagcgagctgagctgggccagccactgggtgaccttcggctgctggatcttctacagactgatcggctag

SEQ ID NO: 213330 - DNA, 294 bp, Artificial Sequence
  derived and/or modified sequence
atggccaccttcagcagacaggagttcttccagcagctgctgcagggctgcctgctgcccaccgcccagcagggcctggaccagatctggctgctgctggccatctgcctggcctgcagactgctgtggagactgggcctgcccagctacctgaagcacgccagcaccgtggccggcggcttcttcagcctgtaccacttcttccagctgcacatggtgtgggtggtgctgctgagcctgctgtgctacctggtgctgttcctgtgcagacacagcagccacagaggcgtgtag

SEQ ID NO: 213331 - protein, 704 aa, Artificial Sequence
  derived and/or modified sequence
MESKPSRIPRRISVQPSSSLSARMMSGSRGSSLNDTYHSRDSSFRLDSEYQSTSASASASPFQSAWYSESEITQGARSRSQNQQRDHDSKRPKLSCTNCTTSAGRNVGNGLNTLSDSSWRHSQVPRSSSMVLGSFGTDLMRERRDLERRTDSSISNLMDYSHRSGDFTTSSYVQDRVPSYSQGARPKENSMSTLQLNTSSTNHQLPSEHQTILSSRDSRNSLRSNFSSRESESSRSNTQPGFSYSSSRDEAPIISNSERVVSSQRPFQESSDNEGRRTTRRLLSRIASSMSSTFFSRRSSQDSLNTRSLNSENSYVSPRILTASQSRSNVPSASEVPDNRASEASQGFRFLRRRWGLSSLSHNHSSESDSENFNQESEGRNTGPWLSSSLRNRCTPLFSRRRREGRDESSRIPTSDTSSRSHIFRRESNEVVHLEAQNDPLGAAANRPQASAASSSATTGGSTSDSAQGGRNTGISGILPGSLFRFAVPPALGSNLTDNVMITVDIIPSGWNSADGKSDKTKSAPSRDPERLQKIKESLLLEDSEEEEGDLCRICQMAAASSSNLLIEPCKCTGSLQYVHQDCMKKWLQAKINSGSSLEAVTTCELCKEKLELNLEDFDIHELHRAHANEQAEYEFISSGLYLVVLLHLCEQSFSDMMGNTNEPSTRVRFINLARTLQAHMEDLETSEDDSEEDGDHNRTFDIA

SEQ ID NO: 213332 - protein, 101 aa, Artificial Sequence
  derived and/or modified sequence
MESKPSRIPRRISVQPSSSLSARMMSGSRGSSLNDTYHSRDSSFRLDSEYQSTSASASASPFQSAWYSESEITQGARSRSQNQQRDHDSKRPKLSCTNCTT

SEQ ID NO: 213333 - DNA, 2115 bp, Artificial Sequence
  derived and/or modified sequence
atggagagtaaaccaagtaggatcccacggcgtattagtgttcagccctcctcatcactatccgcgcgaatgatgtccggctcgaggggttcttcactcaacgacacctatcacagtagggattcctccttcaggctcgacagcgaataccagtccaccagcgctagcgcttcagcatccccatttcagtctgcgtggtatagcgaaagcgagataactcagggcgccaggtccagaagtcagaatcaacagcgagatcacgattcaaagcgaccaaagttgtcatgcactaactgtactacaagtgcaggtcgcaatgtcggcaacggcctcaatacgctgagcgactcgtcttggcgccattcccaggtaccacggtcttcttctatggtcctgggaagcttcggaaccgatctgatgcgcgagcgaagggatctggaaagaagaacagattcctctatcagtaacctgatggattattcacaccggtctggggatttcaccacctccagctatgtacaggacagagttcccagttactctcaaggagctcgcccaaaggaaaattccatgtctaccttgcagctgaatacttcgagcaccaaccatcagctgccctctgagcaccagactattctctcctcaagggacagtcgaaactcactgcggtcgaatttctcgtccagggaatctgaatcctctaggagcaatacacaaccaggctttagctattcatcctcaagagatgaagcacctatcatttctaactcagaacgggttgtatcttcacaacgcccattccaggagtcctccgacaacgagggaagaagaaccacgcgtcgactgttaagcaggattgccagcagtatgagctccaccttttttagtcgccgcagtagccaggactctttaaatactcgcagcctgaattccgagaacagctacgtgtctcctcggatcctgacagcatcacaatctagatccaacgtgcctagcgcctctgaagtaccagataaccgagctagcgaggcaagccagggcttccgattcttgagacgtaggtggggcctcagctctctgtctcacaatcatagttccgaatctgactccgagaactttaaccaggaatctgaaggcagaaacaccgggccttggctctcctcatccctgcgaaataggtgcaccccactattttctaggaggagacgggagggccgggacgagagttcccgcattcctacctccgatacaagtagccgctcccacattttccggcgggaaagcaacgaagtagtgcatcttgaagcacagaacgatcccttgggggctgctgctaatagaccccaagcatccgcagcttcaagttctgcaaccaccggtggtagcaccagcgattcggcacaaggcggccgcaataccggcatttccgggatcctgcccggctcgctgttccgattcgcagttcctcccgctcttggaagcaatctcacagataacgtgatgattacagtggacatcattccgtctggatggaactcagccgatggcaaaagtgacaaaaccaagtctgcgccaagccgggatcctgaacgcctgcagaagatcaaagagagcttgctcctcgaagattctgaagaggaggagggagacctctgtagaatctgccaaatggctgcagcctctagttccaatctgctgatagagccatgcaagtgcactggatctcttcagtacgtacatcaggattgtatgaagaagtggcttcaggctaagataaatagcggaagctctctggaggccgtgacaacatgcgagttatgcaaagaaaagttagagctgaacttagaagactttgatatccatgagctccatcgggcacatgcgaatgaacaagccgagtatgagtttatttcgagcgggctgtatctggttgttcttcttcatctctgcgaacaatctttctctgacatgatgggaaatactaatgaaccgtccactagggtgcggttcattaatctggcaaggacacttcaggcgcatatggaggaccttgaaacaagtgaggacgattctgaggaggacggcgatcataatagaaccttcgacattgcatag

SEQ ID NO: 213334 - DNA, 2115 bp, Artificial Sequence
  derived and/or modified sequence
atggaaagcaagccgtctcgtatccctagaagaatatctgtacagccttcttcgtccttaagtgcaaggatgatgtctgggtctcgggggtctagcctcaacgatacttatcattcacgagacagcagctttcgcctggattcagaataccagagcacttccgcgtcggcatcagccagtccttttcagagcgcctggtattccgagtccgagattacacaaggagccaggagtcggtcacagaaccagcagcgcgaccatgattctaagcgaccaaagctttcctgtacaaattgcacgaccagcgccggccgcaacgtcgggaacggccttaataccctgtctgactcctcttggagacattcccaggtgccaagatcaagttcaatggttctgggttccttcggcacagacttaatgagagagcgccgcgatctggagaggcgcactgacagttctatttctaacctcatggattattcacataggtcaggtgattttacaacatcaagctacgtgcaggacagggttcctagctattctcagggagcgaggcctaaagagaattctatgtccaccctacagcttaatacctccagcacgaaccaccaactgccctccgagcatcaaaccattttgagctctcgcgactctcggaacagtctgcggtctaattttagttcacgggagtcagaatcttcaagatccaacacacagccaggattctcttattcaagcagtcgagatgaagctcctatcataagtaactccgagcgcgtcgtaagtagtcaaaggcccttccaggaaagctctgacaatgaggggcgccggacgacaagacgcttgctgtccaggatcgcttcttccatgagctccacatttttttctagaaggtcctcccaagactctttgaatacccggtcccttaattctgaaaacagctacgtcagcccccgtattttgaccgctagccagtcaaggtccaatgtcccctctgctagcgaagtgccagataatcgtgcttccgaagccagtcaaggcttccggttcctacgacgccggtggggactgtcctccttgtcacataatcactcatcagaaagcgactccgaaaacttcaatcaagagagcgaagggaggaatactggcccgtggctaagttcctcactacggaacaggtgcacccctctgttcagccgcagaaggcgggaaggacgggatgagtcgagtcgcatacccacgtccgataccagttctaggagccacatctttcgtcgggaatccaatgaggtggtacatcttgaggcccaaaatgacccactcggagctgcagccaacaggccccaggcttctgccgccagtagcagcgccactacaggtggatccacaagcgactctgcacaggggggcaggaacactggaattagcggtattctgccagggtcactgttccggttcgcagtacccccagccctgggcagcaatttgactgacaacgtgatgatcacggttgacattattccatctgggtggaatagcgccgatgggaaaagcgacaagactaagtccgccccttcacgcgaccccgagaggttacagaagattaaagaatccctattgctcgaggattctgaggaggaggagggggacctgtgccgaatctgtcagatggcagccgccagttctagtaatctattgattgaaccctgcaagtgtactggcagcctccaatacgtccaccaagattgcatgaagaaatggctgcaggcaaagattaattccggctcaagcctggaagcagtgaccacatgcgagctgtgtaaggaaaagctggaactgaatctggaggattttgacattcacgaactgcatcgagcgcacgctaacgaacaggccgagtatgaattcatatcttctggtctatatctggtcgttctgctgcatttatgtgaacagtcatttagcgacatgatgggcaataccaatgagccttcaactcgtgtaaggtttattaatctggcccggactctccaggcacacatggaggacctcgaaaccagcgaggatgactctgaagaggatggagatcacaatcgtacttttgacattgcctag

SEQ ID NO: 213335 - DNA, 2115 bp, Artificial Sequence
  derived and/or modified sequence
atggagagcaagcccagccgcatcccccggcgcatctctgtgcagcccagcagcagcctgagcgccaggatgatgagcggcagccggggcagcagcctgaatgacacctaccacagccgggacagcagcttccggctggacagcgagtaccagagcaccagcgccagcgccagcgccagccccttccagagcgcctggtacagcgagagcgagatcacccagggcgcccggagccgcagccagaaccagcagagggaccatgacagcaagaggcccaagctgagctgcaccaactgcaccaccagcgctggaagaaatgtgggcaatggcctgaacaccctgagtgacagctcctggaggcacagccaggtgcccaggagcagctccatggtgctgggcagctttggaacagacctgatgagggagcggcgggacctggagaggagaacagacagcagcatcagcaacctgatggactacagccacaggtctggggacttcaccaccagcagctatgtgcaggacagagtgcccagctacagccagggcgcccggcccaaggagaacagcatgagcaccctgcagctgaacaccagcagcaccaaccaccagctgcccagcgagcaccagaccatcctgagcagccgggacagcaggaacagcctgcggagcaacttcagcagccgggagagcgagagcagccgcagcaacacccagcccggcttctcctacagcagcagcagagatgaggcccccatcatcagcaacagcgagcgggtggtgagcagccagaggcccttccaggagagcagtgacaatgaaggccgccgcaccacccggcggctgctgagccgcatcgccagctccatgagcagcaccttcttcagcagaagaagcagccaggacagcctgaacaccaggagcctgaacagcgagaacagctatgtgagcccccgcatcctgacagccagccagagccgcagcaatgtgcccagcgccagcgaggtgcctgacaacagagccagcgaggccagccagggcttccgcttcctgcggcggcgctggggcctgagcagcctgagccacaaccacagcagcgagagtgacagcgagaacttcaaccaggagagcgagggcaggaacacaggcccctggctgagcagcagcctgaggaaccgctgcacccccctcttcagcagaagaagaagagagggcagagatgagagcagccgcatccccaccagtgacaccagcagccgcagccacatcttcagaagagagagcaatgaggtggtgcacctggaggcccagaatgaccccctgggcgccgccgccaaccggccccaggccagcgctgccagcagcagcgccaccactggaggcagcaccagtgacagcgcccagggcggcaggaacacaggcatcagcggcatcctgcccggcagcctcttccgctttgctgtgcccccagccctgggcagcaacctgacagacaacgtgatgatcaccgtggacatcatccccagcggctggaacagcgcagatggcaagagtgacaagaccaagagcgcccccagccgggaccctgagcggctgcagaagatcaaggagagcctgctgctggaggacagcgaggaggaggagggggacctgtgccgcatctgccagatggctgctgccagcagcagcaacctgctgattgagccctgcaagtgcaccggcagcctgcagtatgtgcaccaggactgcatgaagaagtggctgcaggccaagatcaacagcggcagcagcctggaggccgtgaccacctgtgagctgtgcaaggagaagctggagctgaacctggaggactttgacatccacgagctgcaccgggcccacgccaatgagcaggccgagtatgagttcatcagcagcggcctgtacctggtggtgctgctgcacctgtgtgagcagagcttcagtgacatgatgggcaacaccaatgagcccagcaccagggtgcgcttcatcaacctggcccggaccctgcaggcccacatggaggacctggagaccagtgaagatgattctgaagaagatggagaccacaacagaacatttgatattgcctag

SEQ ID NO: 213336 - DNA, 3743 bp, Artificial Sequence
  derived and/or modified sequence
ggtggctggttctgcgccggatccgggagaggggcgggcgccattgtgcttcgctgccgactgcatttcctcagtcacgggcctagaactccaaggagaaaggcggcgaaaaatctttaagaatggagtctaaaccttcaaggattccaagaagaatttctgttcaaccttccagctccttaagtgctaggatgatgtctggaagcagaggaagtagtttaaatgatacctatcactcaagagactcttcatttagattggattctgaatatcagtctacatcagcatcagcatctgcgtcaccatttcaatctgcatggtatagtgaatctgagataactcagggagcacgctcaagatcgcagaaccagcaacgggatcatgattcaaaaagacctaaactttcctgtacaaactgtactacctcagctgggagaaatgttggaaatggtttaaacacattatcagattcatcttggaggcatagtcaagttcctagatcttcatcaatggtacttggatcatttggaacagacttaatgagagagaggagagatttggagagaagaacagattcctctattagtaatcttatggattatagtcaccgaagtggtgatttcacaacttcatcatatgttcaagacagagttccttcatattcacaaggagcaagaccaaaagaaaactcaatgagcactttacagttgaatacatcatccacaaaccaccaattgccttctgaacatcagaccatactaagttctagggactccagaaattctttaagatcaaatttttcttcaagagaatcagaatcttcccgaagcaatacgcagcctggattttcttacagttcaagtagagatgaagccccaatcataagcaattcagaaagggttgtttcatctcaaagaccatttcaagaatcttctgacaatgaaggtaggcggacaacgaggagattgctgtcacgcatagcttctagcatgtcatctacttttttttcacgaagatctagtcaggattccttgaatacaagatcattgaattctgaaaattcttacgtttctccaagaatcttgacagcttcacagtcccgtagtaatgtaccatcagcttctgaagttcccgataatagggcatctgaagcttctcagggatttcgatttcttaggcgaagatggggtttgtcatctcttagccacaatcatagctctgagtcagattcagaaaattttaaccaagaatctgaaggtagaaatacaggaccatggttatcttcctcacttagaaatagatgcacacctttgttctctagaaggaggcgagagggaagagatgaatcttcaaggatacctacctctgatacatcatctagatctcatatttttagaagagaatcaaatgaagtggttcaccttgaagcacagaatgatcctcttggagctgctgccaacagaccacaagcatctgcagcatcaagcagtgccacaacaggtggctctacatcagattcggctcaaggtggaagaaatacaggaatatcagggattcttcctggttccttattccggtttgcagtccctccagcacttgggagtaatttgaccgacaatgtcatgatcacagtagatattattccttcaggttggaattcagctgatggtaaaagtgataaaactaaaagtgcgccttcaagagatccagaaagattgcagaaaataaaagagagcctccttttagaggactcagaagaagaagaaggtgacttatgtagaatttgtcaaatggcagctgcatcatcatctaatttgctgatagagccatgcaagtgcacaggaagtttgcagtatgtccaccaagactgtatgaaaaagtggttacaggccaaaattaactctggttcttcattagaagctgtaaccacctgtgaactatgtaaagagaagttggagcttaacctggaggattttgatattcatgaactacatagagctcatgcaaatgaacaagctgagtatgagtttatcagctctggtctctacctagtggtgttattgcacttgtgcgaacaaagcttttctgatatgatgggaaatacaaatgaaccaagcacacgtgtccgatttattaaccttgcaagaactcttcaggcacatatggaagatctcgaaacttcagaggatgattccgaagaagacggagaccataacaggacatttgatattgcctaacttcatataagacagatggatgatctgtgaacataagtgtttattaaaaatggcaattaaatataaattacttttgtgggggaatgcctaataaatacattgactatatataaaatgaatatatacatacacatgtatgcctgtatatatatattcattctccagtgttgctgaattaaaattctgctggactttttaacatagcaaatccgatgtttataaactggtaatcaaaaaggttttttcttttaggtgagtgggaaagtattacccttgttttaaatatctaagcaatgcctatcaacccttttttgtgttatgattactgtagtcatatttatgaaaaaaggtttgtgttttactcttgctagtgagaaaagtgggacaaaatatacttttgaaataaaatgctatatggcacctaattattttttcttttaaaatgccttaagttgcagtctcattttgataatcatttgcttccagtgtttaaaaattaaaaaaagaatggggagaaggttatgagaagagcattattaagtttccaaatttaatttgaattccaaattcacctagcaataaaatctaatttttaaaaagtatataaatataaaatgtataaatgatggatagatttttgtattgatttgcaaaatgcagattatatttgataggctatagtatgtagatattccttttaggaatattacagctgtaaattatatgagacttgccagtcaaatgctatttggtttaaaaaaattattgcaatctcaagttaatggaatatttttaaatcccacattcagagtttaaaacactggttttcaatgtgttttttagtgttgtcacttgtttatagataaatatataaataacctgtttggatcctggtcctttttaactgttccttggtaattctgagcatttatttgatgacttaatatttttcactacctttggagaacagatgaacattattcaccatgaatggatctatactgtgtggtcatgagttgtgtatacttccataacactgtatttttcttctgtcagtacccttaggatacactttaaaacaccttaaggtctgatgttatggcaacaaactactttttcaaacctaaataggaaccatgtaatttctcaaaagtgattgaacagtttgcccacacttagtttgttggtcttatgtaaaacattggctcaaaataaagtacacactgatttattttactgtttgaaatgtttccttttaaactggtgctcaaagaagacatcagacttcataaccaagaattttattacaatttcaaatctcattttaagcaataatataaatgttctaaaacatttgctcacctcttgccagttacctttgcattgtctgtcttaaagcaaaaatataaaatttaagggtggtagttttaatatattctgtgggtcctaagggatgctttgaatttgaagtatatatacttttaataaaattcagtatgacagttg

SEQ ID NO: 213337 - DNA, 2402 bp, Artificial Sequence
  derived and/or modified sequence
acttaacggtggtggctggttctgcgccggatccgggagaggggcgggcgccattgtgcttcgctgccgactgcatttcctcagtcacgggcctagaactccaaggagaaaggcggcggaattcatgatttgttcctgtagctgaaacatacattgaatgctttctgccctggcatgaacttacatggtcagagctggtttttcctgccctcaaatatatttctctgactctaccggttagactagaaaaatctttaagaatggagtctaaaccttcaaggattccaagaagaatttctgttcaaccttccagctccttaagtgctaggatgatgtctggaagcagaggaagtagtttaaatgatacctatcactcaagagactcttcatttagattggattctgaatatcagtctacatcagcatcagcatctgcgtcaccatttcaatctgcatggtatagtgaatctgagataactcagggagcacgctcaagatcgcagaaccagcaacgggatcatgattcaaaaagacctaaactttcctgtacaaactgtactacctcagctgggagaaatgttggaaatggtttaaacacattatcagattcatcttggaggcatagtcaagttcctagatcttcatcaatggtacttggatcatttggaacagacttaatgagagagaggagagatttggagagaagaacagattcctctattagtaatcttatggattatagtcaccgaagtggtgatttcacaacttcatcatatgttcaagacagagttccttcatattcacaaggagcaagaccaaaagaaaactcaatgagcactttacagttgaatacatcatccacaaaccaccaattgccttctgaacatcagaccatactaagttctagggactccagaaattctttaagatcaaatttttcttcaagagaatcagaatcttcccgaagcaatacgcagcctggattttcttacagttcaagtagagatgaagccccaatcataagcaattcagaaagggttgtttcatctcaaagaccatttcaagaatcttctgacaatgaaggtaggcggacaacgaggagattgctgtcacgcatagcttctagcatgtcatctacttttttttcacgaagatctagtcaggattccttgaatacaagatcattgaattctgaaaattcttacgtttctccaagaatcttgacagcttcacagtcccgtagtaatgtaccatcagcttctgaagttcccgataatagggcatctgaagcttctcagggatttcgatttcttaggcgaagatggggtttgtcatctcttagccacaatcatagctctgagtcagattcagaaaattttaaccaagaatctgaaggtagaaatacaggaccatggttatcttcctcacttagaaatagatgcacacctttgttctctagaaggaggcgagagggaagagatgaatcttcaaggatacctacctctgatacatcatctagatctcatatttttagaagagaatcaaatgaagtggttcaccttgaagcacagaatgatcctcttggagctgctgccaacagaccacaagcatctgcagcatcaagcagtgccacaacaggtggctctacatcagattcggctcaaggtggaagaaatacaggaatatcagggattcttcctggttccttattccggtttgcagtccctccagcacttgggagtaatttgaccgacaatgtcatgatcacagtagatattattccttcaggttggaattcagctgatggtaaaagtgataaaactaaaagtgcgccttcaagagatccagaaagattgcagaaaataaaagagagcctccttttagaggactcagaagaagaagaaggtgacttatgtagaatttgtcaaatggcagctgcatcatcatctaatttgctgatagagccatgcaagtgcacaggaagtttgcagtatgtccaccaagactgtatgaaaaagtggttacaggccaaaattaactctggttcttcattagaagctgtaaccacctgtgaactatgtaaagagaagttggagcttaacctggaggattttgatattcatgaactacatagagctcatgcaaatgaacaagctgagtatgagtttatcagctctggtctctacctagtggtgttattgcacttgtgcgaacaaagcttttctgatatgatgggaaatacaaatgaaccaagcacacgtgtccgatttattaaccttgcaagaactcttcaggcacatatggaagatctcgaaacttcagaggatgattccgaagaagacggagaccataacaggacatttgatattgcctaacttcatataagacagatggatgatctg

SEQ ID NO: 213338 - DNA, 2115 bp, Artificial Sequence
  derived and/or modified sequence
atggagagcaagcccagccggatcccccggcggatcagcgtgcagcccagttctagccttagtgccaggatgatgagtggttctcgcgggagctctctgaacgacacgtaccactctagagattcatcttttcggttagactcagagtaccagagcacaagtgccagtgccagcgcctccccatttcagagcgcctggtactctgagagcgagatcacacagggtgctaggtcacgatcacagaatcaacagagggatcacgatagcaagcgtcccaaattaagctgcaccaattgtacaactagcgcagggcgcaatgtgggcaatgggctcaacacactgagtgatagctcttggagacactcccaggtcccaagatcttcctcaatggtactggggagctttggtacagacctgatgagagaacgaagggatctggaaaggaggacggattcaagtattagcaatctgatggattattctcacaggtcaggggacttcaccactagttcttatgtgcaagatagagtgccatcttattcgcaaggggcacgccccaaggaaaacagtatgtcaaccctgcagttgaatacctcttcaaccaaccatcagttgccttcagaacatcagactatcctctcctctcgagactctagaaattcgctcaggagcaacttcagcagccgcgaatctgaatcaagtagaagcaacacacagcctggtttcagctactcgtccagcagagatgaggcccccatcatctcaaactcagaaagggtggttagctcccagaggccctttcaggagtccagcgacaatgaaggacggaggacaacaagacgtcttcttagtcgaattgcgagttccatgtcttccactttttttagccgccgttcctcgcaggacagtctgaacacaaggagcctaaacagtgaaaactcgtatgtgtctccacgtatcctaacagcttcccagagcaggtctaacgttccctccgcctctgaggtgccagacaacagggcctctgaggcaagccagggatttaggttcctgcgacgcagatggggactttcatccctctcccacaaccactcctctgaatctgacagtgaaaatttcaaccaggagagcgaggggcggaacactggaccgtggctgtcttcaagcctcaggaataggtgcacaccactgttctctcgcagacggcgcgaaggaagggacgagtccagtcggattccaactagcgacacctcgtcacgatctcatatcttccgtcgcgagagcaatgaggttgttcatttggaggcccaaaatgaccctttgggggccgctgccaatcgtccacaggcctccgccgccagctctagcgctaccactggaggctcaacgagcgatagcgctcaggggggccggaacactggcatatctggcattttaccgggttcactgtttaggttcgctgtgccacccgccttaggctcaaacctcactgacaatgtcatgatcaccgtagacatcattccctctggttggaactcagctgatgggaagagcgacaaaaccaagagcgccccgtcccgggaccccgaaaggctgcagaagataaaggaaagcctgctcctggaggattctgaggaggaagaaggcgacttatgtagaatttgccagatggccgcagcttctagctccaatctgctgattgaaccttgtaagtgcacgggaagtctacagtatgtgcaccaagactgcatgaaaaagtggctccaagctaagatcaactctggttcatctctcgaggcagtcacgacatgtgagttgtgtaaggagaagctggagctaaatctggaagacttcgacattcatgagcttcacagggcccacgcaaacgaacaggctgaatatgaatttatctcctcaggtctatacctagttgtacttctccacctctgcgagcagtcattctcagatatgatgggaaacactaatgagccaagcacccgagttaggttcattaatctcgccaggacactgcaagcgcatatggaagatctggagacgtcagaagacgattccgaggaagatggggaccacaaccggaccttcgatatcgcctag

SEQ ID NO: 213339 - DNA, 2115 bp, Artificial Sequence
  derived and/or modified sequence
atggagagcaagcccagccggatcccccggcggatcagcgtgcagccaagttccagcttaagcgcccgcatgatgtcagggtcacgggggagttccctcaacgacacttaccacagccgggatagctcgtttcggctggactccgaatatcagagcacatctgcctcagcatcggcttctcctttccagagtgcatggtacagcgagtccgaaattacacagggcgctagatctagatctcagaaccagcagagagatcacgactccaaacgacccaagttgagttgtactaactgcactacgtctgccggccggaatgtcggaaatggactgaataccctgtcagattcttcatggcgacactcacaagttcctagatcatcttcgatggtccttgggagctttggcactgatctcatgcgagagcggagagatctcgagcggcgaaccgatagctcaatcagtaatctgatggattattcccatagaagcggagattttaccaccagcagctatgtgcaggaccgagtgccctcatattctcaaggagcccggcctaaggaaaatagcatgtctacgctgcagctgaacacctcatctactaaccaccagcttccatcagagcaccaaacaattctgagctctcgcgattctagaaacagcctccgtagcaactttagctcccgggagagcgaatcatctaggagcaacactcagccaggatttagctacagtagcagtcgcgacgaagctccaattatcagtaattccgaaagagtcgtgagcagtcagcggccatttcaggagtcctccgacaacgagggaagacgtactacccgcaggctcctgtccaggattgcatcatctatgagttcaaccttttttagtcgccgaagtagccaggatagcttgaatacccggagcttgaactccgagaattcttatgtgtcaccacgcatactgactgcatcccagtccagatctaatgtgccatccgctagtgaggtgcccgacaacagagcgagtgaagccagccagggattcagatttttgagaagacgatgggggctttctagtctgtcacataatcacagtagcgagagtgactccgaaaacttcaaccaggaatcagaaggtcgaaacactggaccatggcttagcagctctctgcgcaacagatgtactccactgttttctagacggcgcagggagggtcgagacgagagcagcagaatacctactagcgatacttcgagccgtagccacatttttagacgcgaatctaatgaggtagtacatctggaggcccaaaatgaccccctgggtgccgccgcaaacaggccccaggcgagcgcagcttcttcatctgccactactggcgggtccacctctgatagtgctcaaggggggaggaacaccggaatctccggaatcctcccaggttcgctgtttagatttgctgtgcctccagctctgggctctaacctgacagataacgtgatgatcactgttgacattattcccagtgggtggaactccgcagatggcaaaagcgacaagacaaagagtgcaccctcccgggatcctgagaggctgcagaagatcaaggagtcactgctgctggaggattccgaggaggaggagggcgacttatgcaggatttgccagatggcagccgccagttcaagcaatctgctaattgagccatgtaagtgcacaggatcattacaatatgtccaccaagactgtatgaagaagtggcttcaggctaaaataaactctggtagctccctcgaagccgtaactacttgcgagttgtgcaaggaaaaactggaactgaatttggaggattttgacatacacgagctccaccgagcccacgccaacgagcaggcggaatacgaatttatatcgtcaggactgtatctggtcgttctgctccacctgtgcgagcagtctttttcagatatgatgggaaatacgaatgagccatcaactcgggtccggttcatcaatctggcacgcactcttcaggcgcatatggaggacctggaaacatctgaagatgactccgaagaggatggtgatcataacaggacgttcgacattgcttag

SEQ ID NO: 213340 - DNA, 2115 bp, Artificial Sequence
  derived and/or modified sequence
atggaaagcaagccatcccggattccaagaaggatctccgtgcagccctcctctagcctgtctgccaggatgatgtccgggtcccgaggctcatctcttaatgatacataccactcaagagattctagcttccggctcgacagcgaataccaaagtacgagtgctagtgcatcagcctcaccgtttcagtctgcctggtacagtgagagtgagataacccagggcgcacgttcgcggagtcagaaccagcagcgagaccacgattcgaaacgccctaagctctcctgcacaaattgtaccacctcggctggacgcaacgtaggtaatggcctcaataccctgtccgatagctcatggagacattctcaagtgcctcggtccagctctatggtcctgggctcttttgggactgacctgatgagagagcgtagggacctggaaagacgcacggactcctccatctctaatcttatggactactcacatcgcagtggcgactttaccacctctagttatgtgcaagatcgggtgcctagctattcccagggtgcacgcccaaaagagaacagtatgagtacacttcagcttaatacatcctctaccaaccaccagctgccttctgaacaccagacaatcctatccagtagggacagccgaaatagcctccggtccaatttctcaagcagagagagtgaaagtagtaggtccaacacccagcctggcttttcctactcaagctcccgagacgaggctcccattatttctaattctgaaagggtggtgtcttctcagagacctttccaggagagctccgacaacgaaggcagacgcaccactcggcgattactgtctagaattgcctccagcatgagttccacattcttttcccgccgtagcagccaagactccctcaacactcggtcactgaacagcgagaactcctatgtaagtccgaggatcctgaccgcctcccaaagcaggagcaacgttcccagtgcatctgaagtgccagataaccgggcatctgaagccagccaagggtttcggttcttaaggcggaggtggggactgtcatcactgagtcataaccactcctccgagtcagactcagagaattttaatcaagaaagcgaagggcgtaacacgggtccctggctgtcctcttcactccgcaaccggtgtacaccacttttttctagacgtaggcgggaaggcagagacgaatcatctcgtattcccacatctgatacttctagtagatctcatatctttaggcgagagtctaacgaggtggtgcatctggaggctcagaacgaccccctgggagccgcagcaaaccgaccacaagcctcagcggcttccagtagtgccacaacggggggtagtactagcgactcagcacagggcggacgaaacaccgggatttctggtatcctgcctggtagcctgttccggttcgctgttcctccagcattgggctctaacctcacggataatgtgatgattacagtggatattattccttccggctggaactctgccgacggtaagtccgacaagactaagagcgctccctcacgtgatcccgaacgattacagaaaattaaggaatctctgctcctggaggattctgaggaggaagagggtgatctctgtcgcatctgccagatggcagcggcaagttcaagtaatctgctgatcgagccctgcaaatgcactggttccctgcagtacgttcaccaggactgtatgaagaaatggctgcaagccaagatcaactcaggaagctccctggaggcagtaaccacgtgtgagttgtgcaaggagaagcttgagcttaacctggaagacttcgacatccatgagcttcatcgcgcacacgcaaacgagcaggccgagtatgaattcatcagcagcggactatatctcgtggtgttgctgcacctttgcgagcagagcttttccgacatgatgggtaataccaatgagccctccacccgagttaggttcattaacctggccagaaccctgcaagcacacatggaggatcttgaaacctccgaggacgactctgaggaagacggagaccacaatagaaccttcgatatcgcatag

SEQ ID NO: 213341 - DNA, 2115 bp, Artificial Sequence
  derived and/or modified sequence
atggagagcaaacccagtcggatccccagacgcatctccgtgcaaccctcttcaagtctgagcgcaaggatgatgtccgggagtcgcggttcgagcctgaatgacacctaccattcgagggatagttcttttagactggactccgaataccagagtacctcagccagcgcatccgcctcaccttttcagagtgcctggtattccgagtcagagataactcagggggcacgcagtcgctcccagaatcagcaacgcgatcatgactcaaagcggccaaaactgagttgtaccaactgcactacatccgccggtaggaacgtgggcaatgggttgaatacactatccgacagcagctggcgacactcccaggtgcctagatcttctagcatggtcctaggcagctttggcacagacttgatgagagaacgcagggatttggagcgccgtaccgattcaagcatcagtaatcttatggattattcccaccggtctggggattttacaactagttcgtacgtccaagaccgggtcccctcctactcgcagggtgctaggccaaaggagaattccatgtcaacattacagctgaacaccagcagtacaaaccatcagctgccttcagagcaccagactatcctgagctcgcgcgactctcggaattctcttaggtccaatttcagttcccgggaatcagagagctctagaagtaatactcaaccaggcttttcgtactcaagctctcgggacgaggccccaattatctctaatagcgagagggttgtatcctctcagcggccattccaggagtccagcgataatgaggggagacgaacgacaagacggttgctcagtcggattgccagtagcatgagcagcaccttcttcagtcgcaggagtagtcaggactcactgaacacccgctccttaaatagcgagaatagctatgtgtcccctcgcattctcacggcctctcaatctcgctccaatgtcccaagtgctagtgaggtgcccgataatagagcttcagaggcctcgcagggttttcgattccttagacgcaggtggggcctctcaagcctgagccacaatcactcatcagagtccgactccgaaaacttcaaccaggaaagtgagggccgaaacacaggcccatggctgagctcaagcttgcggaaccgctgtacgcctctattctccaggagacgaagagaggggagggatgagtcttcccgaatacccacttccgatacgagctctagatcccacatttttcggcgagaaagtaatgaagtagtccacctggaggctcagaatgatccactaggcgctgcagctaaccgacctcaggcctcagctgccagctcctcagccaccactggaggatcaactagtgattccgcccagggtggcaggaataccggtatctccggcatattgccaggctccctttttagatttgcagtaccccctgccctgggtagcaatctcacagacaacgtgatgatcaccgtggacatcatcccctcgggatggaattcagctgacggcaagagcgacaaaactaagtccgccccttcaagagaccctgaaagactccagaagatcaaagagagccttctacttgaagatagcgaggaagaggaaggcgacctgtgtagaatttgccaaatggctgctgccagcagcagtaacctccttattgaaccatgcaaatgtactgggagcttacagtatgtgcaccaggactgcatgaaaaagtggcttcaggctaaaatcaactctggctcatccctcgaggccgtgacaacctgtgagctgtgtaaagaaaagctagaattgaatctcgaggacttcgatattcacgagttgcaccgggctcacgcaaacgaacaggctgaatatgaattcatctctagcgggctgtacctagtggttctgctgcacttgtgcgagcagagcttttctgacatgatgggcaacactaacgagccgagtacccgggtccgatttattaatctggccaggacccttcaggctcacatggaggacctggagacttcggaagacgactccgaagaggacggggaccataaccgtacctttgatatcgcctag

SEQ ID NO: 213342 - DNA, 2115 bp, Artificial Sequence
  derived and/or modified sequence
atggagagcaagcccagcagaatccccagaagaatcagcgtgcagcccagcagcagcctgagcgccagaatgatgagcggcagcagaggcagcagcctgaacgacacctaccacagcagagacagcagcttcagactggacagcgagtaccagagcaccagcgccagcgccagcgccagccccttccagagcgcctggtacagcgagagcgagatcacccagggcgccagaagcagaagccagaaccagcagagagaccacgacagcaagagacccaagctgagctgcaccaactgcaccaccagcgccggcagaaacgtgggcaacggcctgaacaccctgagcgacagcagctggagacacagccaggtgcccagaagcagcagcatggtgctgggcagcttcggcaccgacctgatgagagagagaagagacctggagagaagaaccgacagcagcatcagcaacctgatggactacagccacagaagcggcgacttcaccaccagcagctacgtgcaggacagagtgcccagctacagccagggcgccagacccaaggagaacagcatgagcaccctgcagctgaacaccagcagcaccaaccaccagctgcccagcgagcaccagaccatcctgagcagcagagacagcagaaacagcctgagaagcaacttcagcagcagagagagcgagagcagcagaagcaacacccagcccggcttcagctacagcagcagcagagacgaggcccccatcatcagcaacagcgagagagtggtgagcagccagagacccttccaggagagcagcgacaacgagggcagaagaaccaccagaagactgctgagcagaatcgccagcagcatgagcagcaccttcttcagcagaagaagcagccaggacagcctgaacaccagaagcctgaacagcgagaacagctacgtgagccccagaatcctgaccgccagccagagcagaagcaacgtgcccagcgccagcgaggtgcccgacaacagagccagcgaggccagccagggcttcagattcctgagaagaagatggggcctgagcagcctgagccacaaccacagcagcgagagcgacagcgagaacttcaaccaggagagcgagggcagaaacaccggcccctggctgagcagcagcctgagaaacagatgcacccccctgttcagcagaagaagaagagagggcagagacgagagcagcagaatccccaccagcgacaccagcagcagaagccacatcttcagaagagagagcaacgaggtggtgcacctggaggcccagaacgaccccctgggcgccgccgccaacagaccccaggccagcgccgccagcagcagcgccaccaccggcggcagcaccagcgacagcgcccagggcggcagaaacaccggcatcagcggcatcctgcccggcagcctgttcagattcgccgtgccccccgccctgggcagcaacctgaccgacaacgtgatgatcaccgtggacatcatccccagcggctggaacagcgccgacggcaagagcgacaagaccaagagcgcccccagcagagaccccgagagactgcagaagatcaaggagagcctgctgctggaggacagcgaggaggaggagggcgacctgtgcagaatctgccagatggccgccgccagcagcagcaacctgctgatcgagccctgcaagtgcaccggcagcctgcagtacgtgcaccaggactgcatgaagaagtggctgcaggccaagatcaacagcggcagcagcctggaggccgtgaccacctgcgagctgtgcaaggagaagctggagctgaacctggaggacttcgacatccacgagctgcacagagcccacgccaacgagcaggccgagtacgagttcatcagcagcggcctgtacctggtggtgctgctgcacctgtgcgagcagagcttcagcgacatgatgggcaacaccaacgagcccagcaccagagtgagattcatcaacctggccagaaccctgcaggcccacatggaggacctggagaccagcgaggacgacagcgaggaggacggcgaccacaacagaaccttcgacatcgcctag

SEQ ID NO: 213343 - protein, 802 aa, Artificial Sequence
  derived and/or modified sequence
MLGARAWLGRVLLLPRAGAGLAASRRCPGVWPRTWPHRSPSRGSSSRDKDRSATVSSSVPMPAGGKGSHPSSTPQRVPNRLIHEKSPYLLQHAYNPVDWYPWGQEAFDKARKENKPIFLSVGYSTCHWCHMMEEESFQNEEIGRLLSEDFVSVKVDREERPDVDKVYMTFVQATSSGGGWPMNVWLTPNLQPFVGGTYFPPEDGLTRVGFRTVLLRIREQWKQNKNTLLENSQRVTTALLARSEISVGDRQLPPSAATVNNRCFQQLDEGYDEEYGGFAEAPKFPTPVILSFLFSYWLSHRLTQDGSRAQQMALHTLKMMANGGIRDHVGQGFHRYSTDRQWHVPHFEKMLYDQAQLAVAYSQAFQLSGDEFYSDVAKGILQYVARSLSHRSGGFYSAEDADSPPERGQRPKEGAYYVWTVKEVQQLLPEPVLGATEPLTSGQLLMKHYGLTEAGNISPSQDPKGELQGQNVLTVRYSLELTAARFGLDVEAVRTLLNSGLEKLFQARKHRPKPHLDSKMLAAWNGLMVSGYAVTGAVLGQDRLINYATNGAKFLKRHMFDVASGRLMRTCYTGPGGTVEHSNPPCWGFLEDYAFVVRGLLDLYEASQESAWLEWALRLQDTQDKLFWDSQGGGYFCSEAELGAGLPLRLKDDQDGAEPSANSVSAHNLLRLHGFTGHKDWMDKCVCLLTAFSERMRRVPVALPEMVRALSAQQQTLKQIVICGDRQAKDTKALVQCVHSVYIPNKVLILADGDPSSFLSRQLPFLSTLRRLEDQATAYVCENQACSVPITDPCELRKLLHP

SEQ ID NO: 213344 - DNA, 2409 bp, Artificial Sequence
  derived and/or modified sequence
atgctgggcgccagagcctggctgggcagagtgctgctgctgcccagagccggcgccggcctggccgccagcagaagatgccccggcgtgtggcccagaacctggccccacagaagccccagcagaggcagcagcagcagagacaaggacagaagcgccaccgtgagcagcagcgtgcccatgcccgccggcggcaagggcagccaccccagcagcaccccccagagagtgcccaacagactgatccacgagaagagcccctacctgctgcagcacgcctacaaccccgtggactggtacccctggggccaggaggccttcgacaaggccagaaaggagaacaagcccatcttcctgagcgtgggctacagcacctgccactggtgccacatgatggaggaggagagcttccagaacgaggagatcggcagactgctgagcgaggacttcgtgagcgtgaaggtggacagagaggagagacccgacgtggacaaggtgtacatgaccttcgtgcaggccaccagcagcggcggcggctggcccatgaacgtgtggctgacccccaacctgcagcccttcgtgggcggcacctacttcccccccgaggacggcctgaccagagtgggcttcagaaccgtgctgctgagaatcagagagcagtggaagcagaacaagaacaccctgctggagaacagccagagagtgaccaccgccctgctggccagaagcgagatcagcgtgggcgacagacagctgccccccagcgccgccaccgtgaacaacagatgcttccagcagctggacgagggctacgacgaggagtacggcggcttcgccgaggcccccaagttccccacccccgtgatcctgagcttcctgttcagctactggctgagccacagactgacccaggacggcagcagagcccagcagatggccctgcacaccctgaagatgatggccaacggcggcatcagagaccacgtgggccagggcttccacagatacagcaccgacagacagtggcacgtgccccacttcgagaagatgctgtacgaccaggcccagctggccgtggcctacagccaggccttccagctgagcggcgacgagttctacagcgacgtggccaagggcatcctgcagtacgtggccagaagcctgagccacagaagcggcggcttctacagcgccgaggacgccgacagcccccccgagagaggccagagacccaaggagggcgcctactacgtgtggaccgtgaaggaggtgcagcagctgctgcccgagcccgtgctgggcgccaccgagcccctgaccagcggccagctgctgatgaagcactacggcctgaccgaggccggcaacatcagccccagccaggaccccaagggcgagctgcagggccagaacgtgctgaccgtgagatacagcctggagctgaccgccgccagattcggcctggacgtggaggccgtgagaaccctgctgaacagcggcctggagaagctgttccaggccagaaagcacagacccaagccccacctggacagcaagatgctggccgcctggaacggcctgatggtgagcggctacgccgtgaccggcgccgtgctgggccaggacagactgatcaactacgccaccaacggcgccaagttcctgaagagacacatgttcgacgtggccagcggcagactgatgagaacctgctacaccggccccggcggcaccgtggagcacagcaaccccccctgctggggcttcctggaggactacgccttcgtggtgagaggcctgctggacctgtacgaggccagccaggagagcgcctggctggagtgggccctgagactgcaggacacccaggacaagctgttctgggacagccagggcggcggctacttctgcagcgaggccgagctgggcgccggcctgcccctgagactgaaggacgaccaggacggcgccgagcccagcgccaacagcgtgagcgcccacaacctgctgagactgcacggcttcaccggccacaaggactggatggacaagtgcgtgtgcctgctgaccgccttcagcgagagaatgagaagagtgcccgtggccctgcccgagatggtgagagccctgagcgcccagcagcagaccctgaagcagatcgtgatctgcggcgacagacaggccaaggacaccaaggccctggtgcagtgcgtgcacagcgtgtacatccccaacaaggtgctgatcctggccgacggcgaccccagcagcttcctgagcagacagctgcccttcctgagcaccctgagaagactggaggaccaggccaccgcctacgtgtgcgagaaccaggcctgcagcgtgcccatcaccgacccctgcgagctgagaaagctgctgcacccctag

SEQ ID NO: 213345 - DNA, 2229 bp, Artificial Sequence
  derived and/or modified sequence
atgcccgccggcggcaagggcagccaccccagcagcaccccccagagagtgcccaacagactgatccacgagaagagcccctacctgctgcagcacgcctacaaccccgtggactggtacccctggggccaggaggccttcgacaaggccagaaaggagaacaagcccatcttcctgagcgtgggctacagcacctgccactggtgccacatgatggaggaggagagcttccagaacgaggagatcggcagactgctgagcgaggacttcgtgagcgtgaaggtggacagagaggagagacccgacgtggacaaggtgtacatgaccttcgtgcaggccaccagcagcggcggcggctggcccatgaacgtgtggctgacccccaacctgcagcccttcgtgggcggcacctacttcccccccgaggacggcctgaccagagtgggcttcagaaccgtgctgctgagaatcagagagcagtggaagcagaacaagaacaccctgctggagaacagccagagagtgaccaccgccctgctggccagaagcgagatcagcgtgggcgacagacagctgccccccagcgccgccaccgtgaacaacagatgcttccagcagctggacgagggctacgacgaggagtacggcggcttcgccgaggcccccaagttccccacccccgtgatcctgagcttcctgttcagctactggctgagccacagactgacccaggacggcagcagagcccagcagatggccctgcacaccctgaagatgatggccaacggcggcatcagagaccacgtgggccagggcttccacagatacagcaccgacagacagtggcacgtgccccacttcgagaagatgctgtacgaccaggcccagctggccgtggcctacagccaggccttccagctgagcggcgacgagttctacagcgacgtggccaagggcatcctgcagtacgtggccagaagcctgagccacagaagcggcggcttctacagcgccgaggacgccgacagcccccccgagagaggccagagacccaaggagggcgcctactacgtgtggaccgtgaaggaggtgcagcagctgctgcccgagcccgtgctgggcgccaccgagcccctgaccagcggccagctgctgatgaagcactacggcctgaccgaggccggcaacatcagccccagccaggaccccaagggcgagctgcagggccagaacgtgctgaccgtgagatacagcctggagctgaccgccgccagattcggcctggacgtggaggccgtgagaaccctgctgaacagcggcctggagaagctgttccaggccagaaagcacagacccaagccccacctggacagcaagatgctggccgcctggaacggcctgatggtgagcggctacgccgtgaccggcgccgtgctgggccaggacagactgatcaactacgccaccaacggcgccaagttcctgaagagacacatgttcgacgtggccagcggcagactgatgagaacctgctacaccggccccggcggcaccgtggagcacagcaaccccccctgctggggcttcctggaggactacgccttcgtggtgagaggcctgctggacctgtacgaggccagccaggagagcgcctggctggagtgggccctgagactgcaggacacccaggacaagctgttctgggacagccagggcggcggctacttctgcagcgaggccgagctgggcgccggcctgcccctgagactgaaggacgaccaggacggcgccgagcccagcgccaacagcgtgagcgcccacaacctgctgagactgcacggcttcaccggccacaaggactggatggacaagtgcgtgtgcctgctgaccgccttcagcgagagaatgagaagagtgcccgtggccctgcccgagatggtgagagccctgagcgcccagcagcagaccctgaagcagatcgtgatctgcggcgacagacaggccaaggacaccaaggccctggtgcagtgcgtgcacagcgtgtacatccccaacaaggtgctgatcctggccgacggcgaccccagcagcttcctgagcagacagctgcccttcctgagcaccctgagaagactggaggaccaggccaccgcctacgtgtgcgagaaccaggcctgcagcgtgcccatcaccgacccctgcgagctgagaaagctgctgcacccctag

SEQ ID NO: 213346 - DNA, 2409 bp, Artificial Sequence
  derived and/or modified sequence
atgttaggagctcgtgcatggctggggagagtactattgctgccacgagctggagctggtctagccgccagcaggagatgtccgggagtgtggccacggacctggcctcatcgtagcccgagtagagggagcagtagtagggacaaggatcgctccgccacagtgtccagtagtgtgccgatgccagccgggggaaagggttcccacccttcttctaccccccaaagggtgccaaaccggttgatccatgagaagtccccatatcttctccagcatgcttacaaccctgtggactggtacccatggggtcaggaggcttttgataaagcacggaaggaaaataagcctatattcctgtccgttggctattcaacgtgtcattggtgccacatgatggaggaggaaagcttccagaatgaagagattgggcggctgctgtctgaggacttcgtgagtgtcaaggttgaccgggaggagcgccccgatgtggacaaggtttatatgacattcgtccaggcaacaagtagcgggggcggctggcctatgaatgtttggctaacccctaacctccagccttttgttggggggacctatttcccgcctgaagacggactgactagggtcggctttcgcactgtgcttttgcggatacgagagcaatggaaacagaataagaatacacttttggaaaatagccagcgtgtcaccacagcactgctggcccgttccgagatctcagtgggagaccgtcagcttcctcctagcgcggccaccgtcaacaaccgatgtttccaacagttagacgagggatacgatgaagaatatgggggcttcgcagaagcacccaagttcccgacgcccgtcatcctctctttcttattttcttactggctgagccataggttgactcaagacggcagcagagcccagcagatggccctgcatacactgaagatgatggctaatggaggaatcagggaccatgtcgggcagggttttcacagatacagcaccgatcgtcagtggcacgtgcctcacttcgagaaaatgctgtacgaccaagctcagttggccgtggcctatagtcaggcctttcagctgagtggggatgaattctacagcgacgtagctaaagggatcctccagtatgtggccaggagcctgtcgcatcgctccggcggtttctattctgctgaggatgcagacagcccacccgaacgggggcaaagacctaaggagggtgcatactatgtgtggacggtgaaggaggtgcagcagcttttgccagagccagtccttggcgctacagagccactgacatcaggacagctgcttatgaaacactatggcctcacagaagcagggaatatctctccttcacaggatccgaagggagagttacaaggccagaatgtcctgaccgtgcgatactctctggagcttaccgccgcgcgttttggactcgacgtcgaagcggtacggaccctcctcaacagcggactcgaaaagctattccaggctaggaagcatagaccgaagccccacctcgatagtaagatgcttgccgcctggaatgggctgatggtcagcggttatgctgtcacaggcgccgtcctggggcaggaccgcctaattaattacgccacaaatggggctaagttcctaaaacgtcacatgttcgatgttgctagtggtaggttaatgcggacctgttacactgggcctggcgggaccgtggaacacagcaaccctccatgttggggcttcctcgaagattatgcattcgtagtacgtggactgttagacctctacgaagcctcgcaggagtcggcctggctagaatgggcgctccgcctgcaggacactcaggataagcttttctgggacagccagggaggcggttacttctgctctgaggctgagttgggggctgggctgccgttacgtctcaaggatgatcaggatggtgctgaaccttctgcaaacagcgtgtcagcgcataatttgttgcgtttacacggattcactggccacaaggactggatggacaagtgtgtgtgtctgttaacagccttctcagagaggatgcgccgagtgcctgtggctctcccagaaatggtcagggccctcagcgcccagcagcagaccctcaagcagatagtgatatgtggcgacagacaggcaaaggacaccaaggcgctagtgcagtgtgtccactctgtgtacattcctaacaaagtgttgatactggccgacggggaccctagcagctttctgagcaggcaattgccttttttgagcacactccggcggttagaggaccaagcgacagcctacgtgtgtgagaatcaggcctgctccgttcccatcactgacccgtgtgaactcagaaagcttctgcacccatag

SEQ ID NO: 213347 - DNA, 2229 bp, Artificial Sequence
  derived and/or modified sequence
atgccggccggcgggaagggcagtcacccctccagtaccccgcagagagttcctaatcgtctaatccacgagaaatccccttacctgttgcagcatgcttataatcctgtcgactggtacccctggggacaggaggccttcgataaggctcgcaaggaaaacaagcctatcttcctctctgtgggctattcaacatgccattggtgccacatgatggaggaggagtcttttcaaaacgaagaaatcggcagactattgtcagaagacttcgttagtgtgaaggtggatcgagaggagaggcccgacgtggataaggtctacatgacgtttgtacaggctactagttctggcggcgggtggccgatgaacgtgtggctgacaccgaacctccagccctttgtgggcggaacttatttcccacccgaagatgggttgaccagagtgggcttcagaacagttctattgcggatcagagagcagtggaagcagaacaagaatacactgcttgaaaattcgcagcgagtgacaactgctcttcttgccaggagcgagataagtgtgggagatcgacagttacccccctcagctgccacagtgaacaatcggtgcttccagcagctggacgaaggctacgatgaagagtacggtggctttgctgaggccccaaagtttccaacgccggtgattctgagctttctcttctcgtactggttgtcacatcgcttaactcaggacggctctagggcccagcagatggccctacacacccttaagatgatggccaacgggggaattcgggatcatgtcggacaggggtttcataggtactcaactgacagacaatggcatgtaccccatttcgagaaaatgttatacgatcaggcacaacttgctgtcgcttactcccaagcctttcagctgtctggcgatgaattttactccgatgttgccaaaggaattctgcagtatgtggcccgttccctgtcacacagatcaggggggttctatagcgccgaggatgcggactcacccccggaacggggtcagcgaccaaaagagggagcctattacgtttggaccgttaaggaggttcagcaattgctcccagaaccagtgctgggcgccactgaaccgttgacatccggccagctactgatgaaacactatgggctgacggaagcggggaatatttccccatcacaggatccaaagggggagcttcagggacagaacgttctaacagtacggtactcgttagaattgaccgctgcacggttcgggctcgatgtggaggcagtccgcaccctattgaattctggcctggaaaagctcttccaggctcgaaagcaccgacccaaacctcatctggacagtaagatgctggcagcatggaacggactcatggtgtcgggttacgccgtgaccggggcagtgttgggtcaggatcgactcatcaactatgccaccaatggcgctaaattcctcaagcgacatatgttcgacgtagcttccgggagactgatgagaacatgctatacgggacctggagggacagttgagcactcaaacccaccctgctggggcttcctggaagattatgcctttgtagtccgagggctgctagacctgtatgaggcctcacaggaaagcgcgtggctggagtgggctctccgcctgcaggatacacaggataagttgttctgggatagccagggtgggggctatttctgcagtgaagcggagctgggtgcgggcctgcccttgaggcttaaagacgaccaggacggagcagagccctctgcaaactctgtcagtgcccacaaccttctcagactccacggctttaccggccacaaggattggatggacaaatgcgtttgcctattgacagctttcagtgagcggatgaggagagtacccgttgccctgccagagatggttagagcgctgtctgcacaacagcagaccctaaagcaaatcgtgatctgcggcgacaggcaggcaaaggacaccaaggccctggttcagtgtgtccactctgtgtacatccccaataaggtgctgatcctagccgatggggacccaagtagttttctgtctcgtcagctgcccttcctgtctacactgcggagactcgaagaccaggccactgcttatgtgtgcgaaaaccaggcttgctctgtcccgataacagacccttgcgagcttcgaaaattgcttcatccctag

SEQ ID NO: 213348 - DNA, 2409 bp, Artificial Sequence
  derived and/or modified sequence
atgctgggcgcccgggcctggctgggccgggtgctgctgctgcccagggctggagctggcctggccgccagccgccgctgccctggggtgtggcccaggacctggccccacaggagccccagccggggcagcagcagccgggacaaggacagaagtgccaccgtgagcagctctgtgcccatgcctgctgggggcaagggcagccaccccagcagcaccccccagagggtgcccaacagactcatccacgagaagagcccctacctgctgcagcacgcctacaaccctgtggactggtacccctggggccaggaggcctttgacaaggccaggaaagaaaacaagcccatcttcctgtctgtgggctacagcacctgccactggtgccacatgatggaggaggagagcttccagaatgaggagatcggccgcctgctgtctgaggactttgtgtctgtgaaggtggaccgggaggagaggccagatgtggacaaggtgtacatgacctttgtgcaggccaccagcagcggcggcggctggcccatgaatgtgtggctgacccccaacctgcagccctttgtgggcggcacctacttccccccagaagatggcctgaccagggtgggcttcagaacagtgctgctgcgcatccgggagcagtggaagcagaacaagaacaccctgctggagaacagccagagggtgaccacagccctgctggcccggtctgagatctctgtgggggaccggcagctgcccccatctgctgccaccgtgaacaaccgctgcttccagcagctggatgagggctatgatgaggagtatggaggctttgctgaggcccccaagttccccacccctgtgatcctgtccttcctgttctcctactggctgagccaccggctgacccaggacggcagccgggcccagcagatggccctgcacaccctgaagatgatggccaacggcggcatccgggaccacgtgggccagggcttccaccgctacagcacagaccggcagtggcacgtgccccactttgagaagatgctgtatgaccaggcccagctggccgtggcctacagccaggccttccagctgtctggagatgagttctacagtgatgtggccaagggcatcctgcagtatgtggcccggagcctgagccacaggtctgggggcttctacagcgcagaagatgctgacagccccccagagcggggccagaggcccaaggagggcgcctactacgtgtggacagtgaaggaggtgcagcagctgctgcctgagcctgtgctgggcgccacagagcccctgaccagcggccagctgctgatgaagcactacggcctgacagaggccggcaacatcagccccagccaggaccccaagggggagctgcagggccagaatgtgctgactgtgcgctacagcctggagctgacagctgcccgcttcggcctggatgtggaggccgtgaggaccctgctgaacagcggcctggagaagctgttccaggccaggaagcaccggcccaagccccacctggacagcaagatgctggccgcctggaatggcctgatggtgtctggctatgctgtgactggagctgtgctgggccaggacaggctcatcaactatgccaccaacggggccaagttcctgaagaggcacatgtttgatgtggccagcggccgcctgatgaggacctgctacacaggccctgggggcaccgtggagcacagcaaccccccctgctggggcttcctggaggactatgcctttgtggtgcggggcctgctggacctgtatgaggccagccaggagagcgcctggctggagtgggccctgcggctgcaggacacccaggacaagctgttctgggacagccagggcggcggctacttctgcagcgaggccgagctgggcgccggcctgcccctgcggctgaaggatgaccaggatggagctgagcccagcgccaacagcgtgtctgcccacaacctgctgcggctgcacggcttcaccggccacaaggactggatggacaagtgtgtgtgcctgctgacagccttcagcgagaggatgagaagagtgcctgtggccctgcctgagatggtgcgggccctgagcgcccagcagcagaccctgaagcagatcgtcatctgtggggaccggcaggccaaggacaccaaggccctggtgcagtgtgtgcacagcgtgtacatccccaacaaggtgctgatcctggctgatggagaccccagcagcttcctgagccggcagctgcccttcctgagcaccctgcggcggctggaggaccaggccacagcctacgtgtgtgagaaccaggcctgcagcgtgcccatcacagacccctgtgagctgaggaagctgctgcacccctag

SEQ ID NO: 213349 - DNA, 2229 bp, Artificial Sequence
  derived and/or modified sequence
atgcctgctgggggcaagggcagccaccccagcagcaccccccagagggtgcccaacagactcatccacgagaagagcccctacctgctgcagcacgcctacaaccctgtggactggtacccctggggccaggaggcctttgacaaggccaggaaagaaaacaagcccatcttcctgtctgtgggctacagcacctgccactggtgccacatgatggaggaggagagcttccagaatgaggagatcggccgcctgctgtctgaggactttgtgtctgtgaaggtggaccgggaggagaggccagatgtggacaaggtgtacatgacctttgtgcaggccaccagcagcggcggcggctggcccatgaatgtgtggctgacccccaacctgcagccctttgtgggcggcacctacttccccccagaagatggcctgaccagggtgggcttcagaacagtgctgctgcgcatccgggagcagtggaagcagaacaagaacaccctgctggagaacagccagagggtgaccacagccctgctggcccggtctgagatctctgtgggggaccggcagctgcccccatctgctgccaccgtgaacaaccgctgcttccagcagctggatgagggctatgatgaggagtatggaggctttgctgaggcccccaagttccccacccctgtgatcctgtccttcctgttctcctactggctgagccaccggctgacccaggacggcagccgggcccagcagatggccctgcacaccctgaagatgatggccaacggcggcatccgggaccacgtgggccagggcttccaccgctacagcacagaccggcagtggcacgtgccccactttgagaagatgctgtatgaccaggcccagctggccgtggcctacagccaggccttccagctgtctggagatgagttctacagtgatgtggccaagggcatcctgcagtatgtggcccggagcctgagccacaggtctgggggcttctacagcgcagaagatgctgacagccccccagagcggggccagaggcccaaggagggcgcctactacgtgtggacagtgaaggaggtgcagcagctgctgcctgagcctgtgctgggcgccacagagcccctgaccagcggccagctgctgatgaagcactacggcctgacagaggccggcaacatcagccccagccaggaccccaagggggagctgcagggccagaatgtgctgactgtgcgctacagcctggagctgacagctgcccgcttcggcctggatgtggaggccgtgaggaccctgctgaacagcggcctggagaagctgttccaggccaggaagcaccggcccaagccccacctggacagcaagatgctggccgcctggaatggcctgatggtgtctggctatgctgtgactggagctgtgctgggccaggacaggctcatcaactatgccaccaacggggccaagttcctgaagaggcacatgtttgatgtggccagcggccgcctgatgaggacctgctacacaggccctgggggcaccgtggagcacagcaaccccccctgctggggcttcctggaggactatgcctttgtggtgcggggcctgctggacctgtatgaggccagccaggagagcgcctggctggagtgggccctgcggctgcaggacacccaggacaagctgttctgggacagccagggcggcggctacttctgcagcgaggccgagctgggcgccggcctgcccctgcggctgaaggatgaccaggatggagctgagcccagcgccaacagcgtgtctgcccacaacctgctgcggctgcacggcttcaccggccacaaggactggatggacaagtgtgtgtgcctgctgacagccttcagcgagaggatgagaagagtgcctgtggccctgcctgagatggtgcgggccctgagcgcccagcagcagaccctgaagcagatcgtcatctgtggggaccggcaggccaaggacaccaaggccctggtgcagtgtgtgcacagcgtgtacatccccaacaaggtgctgatcctggctgatggagaccccagcagcttcctgagccggcagctgcccttcctgagcaccctgcggcggctggaggaccaggccacagcctacgtgtgtgagaaccaggcctgcagcgtgcccatcacagacccctgtgagctgaggaagctgctgcacccctag

SEQ ID NO: 213350 - DNA, 2409 bp, Artificial Sequence
  derived and/or modified sequence
atgctgggcgcccgggcctggctgggccgggtgctgctgctgccccgtgctggtgccggacttgctgcttccagaagatgccccggagtgtggcctagaacatggccacacaggagcccaagtcggggctcgtcatcaagggataaggacaggtcggccacagttagttcttcggtccctatgcccgcaggtgggaagggctctcacccctcttccacccctcagcgcgtgcccaatagactgatccatgagaagtccccctatctgctgcagcatgcttataaccctgtcgactggtacccatggggccaggaggcctttgataaggctaggaaagagaacaagcctatcttcctgtccgtggggtacagtacctgtcattggtgccacatgatggaagaagaaagtttccagaacgaggaaatcgggaggcttctttcagaagatttcgtttccgttaaggttgatcgcgaggaaaggcccgatgtggacaaggtgtacatgactttcgtacaagcaacgagtagtggaggcggctggccaatgaatgtctggcttacacccaatctacagccctttgtcggagggacttacttccctccggaggatggtctaacgcgggtaggtttccgaacagtgctgttgcggatccgtgaacaatggaagcaaaacaagaataccctgctcgagaactcgcagagggtcaccactgccctgctggctcggtcagaaatatctgtaggtgaccgccagctgccaccatcagcagctacagttaacaatcggtgcttccagcaacttgatgagggctacgatgaggaatacggagggttcgctgaggcccctaagtttcccacgcccgtaatcctgtctttcctcttttcctattggttatctcacaggctgacccaagacggaagccgcgcacaacaaatggctcttcacacgttgaaaatgatggcaaacggaggaataagagatcatgtcggacagggattccatagatactcaactgatagacaatggcatgttccgcattttgaaaagatgctgtacgatcaggcgcaactagctgttgcctattcgcaggcattccagctcagtggggacgagttttattccgacgttgctaagggcatcctccaatacgttgccagatcgctgtcccacaggtccggaggcttttacagcgcagaggatgccgatagcccgcccgagcgtggccagaggcctaaagagggggcatattacgtgtggacagtgaaagaagttcagcagctgctgcccgagcctgtgctcggagctactgaacccctgacaagcgggcagctgctgatgaaacactacggtctgaccgaggcgggaaacatctcccccagtcaggatcccaagggcgaattacagggtcagaatgttctgactgtgagatacagcctggaactgaccgctgcccgattcggcctcgacgtggaggcagtgcgcacactgctgaacagcgggctggagaaactgtttcaggccagaaaacaccggcctaaacctcatctggattccaagatgctggcagcctggaatggcctgatggtgtctggttatgcggtgacaggagccgtgctggggcaggatcggctgattaactatgccaccaatggcgcgaaattcctgaaaaggcacatgtttgacgtcgcgtccgggcgcttgatgcgaacctgttataccggcccaggtggcacggtggaacactccaacccaccctgctggggttttcttgaagactacgcctttgttgtacgcgggctactggatctctatgaggcgagccaggaaagcgcatggctagaatgggccctgcggctccaagacactcaggataaacttttctgggactcgcaagggggaggatacttctgtagtgaagccgaactgggggccggccttcctcttaggcttaaagacgatcaggacggagcagaaccttctgcgaactcggtgtcagcacacaaccttctccgcctgcacggattcaccggccacaaggattggatggataaatgcgtgtgtttgctgactgctttcagcgaaagaatgcgaagggtaccagttgccctgcccgaaatggtgcgagccctcagcgctcagcagcaaaccttgaagcagatcgtcatctgtggggaccgacaagccaaggacacaaaggccctggtgcagtgtgtccattccgtttacatccccaacaaggtgcttattttggctgacggcgatccttcgtcattcctgagccggcagctgccgttcttatccacactgcgccgcctggaggatcaggcaaccgcctacgtatgtgaaaatcaggcgtgtagtgtgcccatcacagatccgtgtgaattgcggaagctgctgcacccatag

SEQ ID NO: 213351 - DNA, 2229 bp, Artificial Sequence
  derived and/or modified sequence
atgcccgccggcggcaagggcagccaccccagcagcaccccccagagggtgccgaataggctgatccacgaaaagagcccctacctcctgcaacatgcctacaatccagtggactggtatccgtggggacaagaagcattcgataaggcgcggaaagagaacaagccgattttcttgtctgtgggttattcgacgtgtcactggtgtcacatgatggaggaggaaagctttcaaaacgaagagattggccgcctgttgtctgaagacttcgtcagcgtaaaggtggatagggaggagaggcccgacgtcgataaagtatacatgacatttgtccaggccacatcaagcggaggaggatggcccatgaacgtctggttaacccccaacttgcagccatttgtgggtggtacctacttcccgccagaggacgggctgactcgcgtgggctttcggacggtattactgcgcatccgggagcagtggaagcagaataagaacacactgctcgaaaactcccagcgagtcacaacagccctcctggcccggtcggaaatctcagtgggggataggcagctaccacccagtgcggctacagtaaacaaccgctgctttcagcagctcgacgagggttacgatgaggaatatgggggcttcgccgaagcccccaaatttccaacgccagtcatactgagtttcctgttctcttattggctgtcccaccgcctgacacaggacggtagtcgcgcccagcaaatggccctgcatactttaaagatgatggcaaacggcggtattcgagaccatgttggccagggctttcaccggtattctacagataggcagtggcacgtgccccactttgagaaaatgctctatgaccaggcccagctggccgtggcctatagtcaggctttccaactctctggagatgagttctattctgacgtggccaagggaattttgcagtacgttgctagatcccttagccatcgctccggtggcttttactcagctgaggacgccgattctccccccgagcgtggtcagaggccgaaggaaggagcttattacgtgtggaccgtcaaagaggtgcagcagctattgccagaaccagtgctgggggctactgagcctctgacatcaggacagctactgatgaagcactatggtctgactgaggcggggaacatctccccaagccaggatcccaagggtgaactgcagggacagaatgtgttgactgttaggtacagtctcgagctgacagcagcaagatttggtctcgatgtggaggccgtacgaaccctactcaatagcggacttgagaaactgtttcaagcacgaaagcaccgccccaaacctcatctggatagtaagatgctggctgcctggaatggtttgatggtgtccggatatgccgttacaggcgccgtgctgggacaagatcgtctgataaactacgctacaaacggcgccaagttcctgaagcgccatatgttcgatgttgcttctggccgactcatgcgcacctgctacactggaccagggggcaccgttgagcactctaacccaccatgctgggggttcctggaggactacgcatttgtcgtgaggggtctcctggacttgtatgaggcttcacaggagtctgcctggctcgagtgggccctacgactgcaggatactcaggacaagctattctgggacagccagggaggagggtatttttgcagtgaagcggagctaggagctggcctgcccctgcggctgaaagacgaccaagacggggcagagccaagtgctaacagcgtgtcagcccacaacctactcaggctccacggcttcactggacacaaagactggatggacaaatgcgtgtgccttctaaccgcattctcagagcggatgaggagagttccggttgcattgcctgagatggtgcgagccctgtccgcgcagcagcagactttaaagcagattgtgatctgcggggaccgtcaagcaaaggataccaaagcccttgtgcaatgtgtccatagcgtttatatccccaataaggtactgattctggccgatggcgaccctagcagtttcttatccagacagctaccctttttaagcactctgcgtaggttggaggatcaagctaccgcctacgtgtgcgagaatcaggcttgtagtgtgccaattaccgatccatgcgaactcaggaagttgctgcatccttag

SEQ ID NO: 213352 - DNA, 2409 bp, Artificial Sequence
  derived and/or modified sequence
atgctaggagcgagagcttggctgggacgcgtgctgttacttcctcgcgcaggtgcaggcctggcagcaagccggcgttgtcctggtgtctggcctcgcacttggccacatcgttcaccatcccgcggatcatcttctagagataaggaccgaagtgcgaccgtgtcctcttcagtgccgatgccagctgggggaaaggggagccacccctcatccacaccccagagggtgcccaatcgcctgatccacgaaaaatcaccgtatctgctccagcacgcgtacaacccggttgattggtacccctggggacaggaagccttcgacaaagctcgtaaggagaacaaacccatattccttagcgtgggctatagcacttgtcattggtgtcatatgatggaagaagagtcctttcagaacgaggagataggaagactcctctctgaggatttcgtctccgtcaaggtggatcgagaggaacgccctgacgtcgacaaagtgtatatgacattcgtgcaagccacgagcagtggcggaggttggcccatgaatgtttggctgactcctaatctgcagccatttgttggcggaacatacttccctccagaggacggtctgacccgcgtcggatttagaactgttctgttgcgaatccgcgagcagtggaaacagaataaaaacacgctgctggagaacagccaacgggttacaaccgctcttctggcaagatccgaaatatccgtgggagaccggcaactcccaccatccgccgcaacagttaacaatagatgtttccagcagctcgatgaaggatacgatgaagagtacggcggattcgctgaggcacccaagttccccacccctgtgatcctatcttttctcttttcttactggctgagtcaccggcttactcaggatgggtcccgcgcacagcagatggctctgcacacactgaagatgatggcgaacgggggaataagagatcatgtgggacagggattccaccgttactcaaccgaccggcaatggcacgtccctcactttgagaagatgctctatgatcaggcccaactcgccgttgcttattcccaggcattccagctgagcggggatgaattttactctgacgtcgcaaagggcatccttcagtacgtcgctaggtcgctctcccaccgctccgggggtttctactctgccgaggatgcagattcacctccagaaaggggccagagacccaaagagggggcttattacgtttggactgtcaaagaagtccagcagctgctcccagagcctgtgctgggggcaactgaaccattgacttccggccaactcctcatgaagcactatggactaacagaagcaggtaacatttcgccttcgcaagaccctaaaggagagctccaggggcagaacgtgctgacagttcgatattcgcttgagttaactgctgccaggttcggtcttgacgtggaggcagtccggactcttctgaatagcggactggagaagctttttcaggccagaaagcacaggccaaaaccccatctagacagcaagatgttagccgcttggaacggactgatggtgagcggttatgcagtgaccggtgcagttcttgggcaggatcgcctcatcaactatgctacaaacggcgctaagttcctgaagcgtcatatgttcgatgtcgcctcgggacgactcatgagaacttgttataccggcccaggcggaactgtggaacacagcaaccctccatgttggggatttctggaagattatgcgttcgtggtgcgtgggctgctcgacctctacgaggccagccaggagagcgcttggctcgagtgggcgctgcgactgcaggatacccaagataagctattctgggattcccaaggcggtggctacttctgttcagaggcagagctgggcgctgggcttccccttcggctgaaagatgatcaggacggggctgaaccatccgctaactccgtctcggctcataatctgttgcgcctccatgggtttacaggccacaaggactggatggacaaatgcgtgtgcctgttaaccgcgttctccgagcgtatgagaagagtgcctgtagctctgcccgaaatggtgagagccctgagtgcacagcagcaaaccttaaagcaaatagtgatatgtggcgacaggcaagccaaagacactaaggcactggttcagtgcgttcactctgtgtacatcccgaataaggtgctaatccttgcagatggagatccttcctcatttctctctcgacagctgccttttctctctactttaaggcgattagaggatcaggccacagcctacgtctgcgagaatcaggcatgttcagtacctatcaccgacccgtgtgaactcagaaagctcctgcacccctag

SEQ ID NO: 213353 - DNA, 2229 bp, Artificial Sequence
  derived and/or modified sequence
atgcccgcagggggaaagggttcccacccaagttccaccccgcaacgagtgcccaatcgactcattcatgaaaaaagtccctatttactgcagcacgcatataaccctgttgattggtacccctgggggcaggaagctttcgataaagcaagaaaagagaataagcccatcttcctgtctgtgggttattccacctgccattggtgtcatatgatggaggaagaatcctttcaaaatgaagaaatcggccgtctgctcagtgaggatttcgtgagcgtcaaggttgatcgggaggagcgcccagacgtggacaaggtgtacatgacctttgtacaggctacctcatccggcggaggttggcccatgaatgtgtggttgacccccaacctccagccctttgtcgggggaacctattttccacccgaagacgggttgacccgagtcggatttaggacagtcctcctgaggatccgcgaacagtggaaacaaaacaaaaacacactgttggaaaactcccagagggtaaccactgctctcctggccagaagtgagatatcagtaggagacaggcagttacccccttccgctgccaccgttaataataggtgctttcaacagctggacgagggttacgatgaggagtacggcggatttgcagaggctccaaaatttcccacccctgtgatcttatccttcctgttctcctactggctgagtcaccgtctgactcaggatggcagcagggctcagcaaatggccctccataccttgaaaatgatggcaaatgggggtatcagggaccacgtcggccaaggctttcaccgatactcaacggacagacagtggcatgtaccgcatttcgagaaaatgctgtatgatcaggcccagttagctgtcgcatacagccaagcttttcaactctctggcgacgagttttacagtgatgtagcaaaagggatcctgcagtatgtggcgaggagtctgtcgcaccgcagcggtggtttctattctgccgaggatgccgattctccaccagaacgcggtcaacggccaaaagagggcgcttattacgtctggaccgttaaggaagttcagcagttgttacctgagcccgtgctgggcgctaccgaacccctgacttcaggtcagctactcatgaagcactacggactaactgaggccggtaatattagcccaagtcaggatcctaagggtgagctgcaagggcagaacgttctgacagtgagatattctctcgagctgacagcagctcggttcggcctggatgtggaagccgttcgaacacttctaaatagcggactcgagaagctttttcaagctcgcaagcaccggcctaaaccccacctggacagtaagatgctcgctgcctggaacggcctaatggtgagtggttatgcggttacaggcgctgtcctcggccaagacaggctcataaactacgcgaccaacggagcaaagttcctcaaacgccatatgttcgatgtagcctcaggcagacttatgaggacctgttataccggcccaggtggaacagtggaacactcgaacccgccatgttggggctttctggaagattatgcgtttgtcgtcagaggcttgctcgatttatatgaggcttcccaggagagcgcctggttggaatgggcccttaggctgcaggatacgcaggataagcttttttgggacagtcagggaggcggatatttctgctctgaggctgaactcggagccggactgcccttaaggctaaaagatgaccaggacggcgctgagccaagcgctaattccgtgagcgcccataatcttctgaggttgcacggatttacaggacataaggattggatggataaatgtgtgtgtcttctcactgcattcagcgaacgaatgcgtagggtgcctgtcgctcttcctgagatggtgcgcgctttgtcagctcagcagcagacccttaagcagatcgtcatttgtggcgaccgccaggcaaaagataccaaggccctggtccagtgtgttcactcggtgtatatcccaaacaaggtgctcatcctggccgatggcgacccttcttcattcctatcacgccaactgccttttctgtccactctaagacggcttgaagatcaggcaactgcttatgtgtgcgagaaccaagcctgcagtgtgcccatcaccgacccatgcgaactgcgcaaactgctgcatccctag

SEQ ID NO: 213354 - DNA, 2409 bp, Artificial Sequence
  derived and/or modified sequence
atgctcggagctcgcgcctggctggggcgcgtcttgttgctgcctcgggcaggtgctggcctcgcggcatctcggagatgtccgggcgtctggccccgaacctggcctcaccgcagtccaagccgcggcagctcttctagggacaaagaccgctccgccaccgtcagctcttctgtccctatgcccgcaggaggcaagggcagtcacccttcaagcacaccacagcgcgttcccaatcgtttaattcatgagaagtctccatacctgctacagcatgcttacaaccctgtagattggtacccctggggacaagaagctttcgacaaggcaaggaaagagaacaaacccatcttcctgtctgttggctactcaacatgtcactggtgtcatatgatggaggaggaaagtttccaaaatgaggagatcgggaggctgctgtcagaggacttcgtctcagtgaaagtggacagggaggaacgccctgatgtggacaaggtttacatgaccttcgtccaagcaacctcatctggcggcggctggcccatgaacgtatggcttacgccaaatctgcagccctttgttggaggcacctactttcccccagaagacggactgactcgggtcggattcaggacagtgctgcttcgtatacgcgagcaatggaaacagaacaagaacactctactggagaatagtcagagagtgacaacagcacttctcgcgcggagcgagatcagtgtaggtgacagacagttgcccccttctgccgcgacagtcaacaaccggtgcttccaacagctggacgagggctacgatgaagaatacggaggatttgccgaagctccaaaattcccaactccagtgatactgtccttccttttctcctactggctctcacatagactcactcaggacggatcccgagctcaacagatggctctgcacactctgaagatgatggccaacggtgggattagggaccacgttgggcagggcttccatcgatacagcactgaccgccagtggcacgtcccacattttgaaaagatgctgtatgaccaggcccagctagctgtcgcttactcgcaggcctttcaacttagcggggacgagttttactccgacgtggccaagggtattcttcagtacgttgcgcgctctctatctcatcgaagcggcggtttttactccgccgaggacgcagactctccacccgagagaggccagcgacccaaggaaggggcctattacgtgtggactgtcaaagaagtgcagcagcttctgcctgagccggtccttggggccaccgagcctctgacatctggtcaactcctcatgaaacactacggcctgacagaagctgggaatatttcgccaagccaggaccccaaaggcgaactccagggccagaacgtgcttacggtacgctacagcctcgagctcaccgcagcgcgcttcgggctcgatgtagaggctgtccgtacactgttgaacagcggtctagaaaagttgtttcaggcgagaaagcataggcctaagcctcatttggactctaaaatgctcgccgcctggaacggactgatggtgagcggatatgctgtcacaggcgcagtcctgggacaggacaggttgatcaactacgcaaccaatggggccaaattccttaaaaggcacatgtttgatgtagcatccgggcggttgatgcggacttgttataccggtccaggcggtacagttgaacactccaatcccccatgttggggatttttagaagattatgccttcgtggttagggggttgctcgacctttatgaagcctcacaggaatctgcctggctcgaatgggcactcagactgcaggacacacaagataaactgttttgggactcccagggcggagggtatttctgctcagaagccgaattaggtgcggggctgcctttacggctcaaggatgaccaggatggcgctgagccatcggccaactccgtcagcgcccataatctgctccggttgcacggcttcacaggacacaaagactggatggacaagtgcgtatgcttactcacggccttttcggagcggatgagaagagtgcctgtcgccctgcctgaaatggttcgcgctctcagcgctcagcaacaaactttgaagcagattgtgatttgtggcgatcgccaggccaaagatactaaagctctggtccagtgcgtccactccgtctatatccccaataaagtacttatcctcgcggacggtgacccctcctcattcttgtcacgccagctgcctttcctgtccacactgagaagactcgaggatcaggcaacagcctatgtttgcgaaaaccaagcctgctccgttcctattaccgatccttgcgagctgcggaagctgctccacccttag

SEQ ID NO: 213355 - DNA, 2409 bp, Artificial Sequence
  derived and/or modified sequence
atgctcggagcccgtgcgtggcttggtcgggtcctcttgcttcctagagccggagcagggctagccgctagcagacggtgccccggtgtttggcctaggacatggccgcacagatctccctcgagaggcagctcaagtagggacaaagaccgcagcgccaccgtttcaagcagtgtcccaatgccagctggcggaaaaggctcacaccccagctccacccctcagcgagtgcctaaccgtcttatacacgaaaagtcaccatatttactgcagcacgcttacaaccctgtggactggtatccctggggtcaagaggcgttcgataaagcccgtaaagagaacaagccaattttcctctcagtagggtattccacttgccactggtgtcacatgatggaagaagaaagctttcagaacgaagagattgggcgcctgctgtcagaagacttcgtcagtgtgaaagtggaccgcgaggagcggccagatgttgataaagtatatatgaccttcgtacaggctacatcatcggggggaggttggcccatgaatgtttggctcacacctaatctgcagcccttcgtgggaggtacgtattttcccccagaggacggattgaccagggttggcttccgcaccgtgctccttaggatccgagagcagtggaaacagaacaagaatacattgctggaaaactcccaacgggtgacaaccgctctgctagccagatccgagatatctgttggagacaggcaattaccaccaagcgccgcaaccgttaataatagatgctttcagcagcttgatgaaggctatgacgaagaatacggagggtttgctgaggcgcctaagtttcctacaccagtgatcttatcatttctgttcagttattggctgtcgcacagactgacccaggatggaagccgagctcagcaaatggcactgcacacccttaagatgatggccaatggagggatccgagatcacgtggggcaaggctttcaccgctactccacagataggcagtggcacgtccctcatttcgagaaaatgttgtatgaccaggcacagctagccgtcgcatattcccaggcattccagttatccggcgatgaattttatagtgacgtggccaaagggatcctccaatacgttgcccgtagtctctcccataggtccggcggattctattccgctgaagacgccgacagtcccccagaacgtggacagcggccaaaagaaggcgcatactacgtttggacagtgaaggaagtacaacagctactgccggagcctgtactgggggctaccgaaccactgaccagcggtcaattgctgatgaagcactatggcctaactgaagccgggaacatatctccatcccaggacccaaaaggcgagttacagggacagaacgttttgaccgtgcgctattcattagaactcaccgccgctagattcggtctggacgtagaagccgtgagaaccctgctcaattctggcttagagaagttgttccaggcccggaagcatagacctaaaccccatctggattcaaaaatgctagccgcttggaacgggctgatggtgtctgggtacgcggtaactggagcagtccttggtcaggacagacttatcaactacgctacaaatggagcaaagtttttaaagaggcacatgtttgatgtagcaagcgggcgcctaatgagaacatgctacacaggacctggcggtaccgtggagcatagcaaccctccatgttggggctttttggaggactacgcattcgtcgttagaggacttctggacctttacgaggcatcccaggagtctgcttggttagaatgggcccttaggcttcaagacactcaggacaaactcttttgggactctcaaggggggggctatttttgctccgaagcagaacttggcgccggccttcctcttcgcttgaaggatgaccaagacggggctgaaccgtccgctaattcagtgagcgcccacaaccttcttcgccttcacggcttcactgggcataaagattggatggacaagtgcgtatgcctcctgacagcattctctgagcgtatgagacgagtgcccgtcgccctgcctgaaatggttcgcgctctcagcgctcagcaacaaactttgaagcagattgtgatttgtggcgatcgccaggccaaagatactaaagctctggtccagtgcgtccactccgtctatatccccaataaagtacttatcctcgcggacggtgacccctcctcattcttgtcacgccagctgcctttcctgtccacactgagaagactcgaggatcaggcaacagcctatgtttgcgaaaaccaagcctgctccgttcctattaccgatccttgcgagctgcggaagctgctccatccctag

SEQ ID NO: 213356 - DNA, 2719 bp, Artificial Sequence
  derived and/or modified sequence
acactgtcccaagtcccggcgaagacccgcccgcggctccgtaggtgcccggcccgcccctcgcagcctcctgacttcccttcctgtcctcagcggccgggcccacggccccgagcagccatgctgggcgcgcgggcctggttgggccgcgtccttctgctgccccgcgccggtgcaggcctcgccgcgagccgcaggtgtcctggagtctggcccaggacctggccccacaggagtcccagcaggggtagctcctcccgggacaaggaccgaagtgcgacggtcagtagttcagtgcccatgcctgctggagggaaaggaagccatccttcatctacaccccagagggtccccaaccgcctgatccacgagaagtcaccatacctcctacaacatgcctacaatcctgtggactggtacccctggggacaggaagccttcgacaaggccaggaaggaaaacaagccgattttcctctcagtcgggtactccacctgccactggtgccacatgatggaagaggagtccttccagaatgaggagattggccgcctgctcagtgaggactttgtgagtgtgaaggtagaccgtgaggagcggcctgacgtggacaaggtgtacatgacgttcgtgcaggccaccagcagcggcgggggctggcccatgaatgtgtggctgactcccaacctccagccctttgtcgggggcacctatttccctcctgaggatggcttgacccgagtcggcttccgcacagtgttgctgagaatacgagaacagtggaaacagaacaagaacaccctgctagaaaatagccagcgtgtcaccactgccctgctggcccgatcagagatcagcgtgggtgaccgccagctgccgccctctgccgccaccgtgaacaatcgctgcttccagcagctggatgagggctatgatgaggaatacggtggcttcgctgaggcccccaagtttcccacgccggtgatcctgagcttcctgttctcctactggctcagccatcgactgactcaggatggctctcgggcccagcagatggccttgcataccctgaaaatgatggctaacgggggcatccgggaccatgtggggcagggctttcaccgctactccacagaccgccagtggcacgtccctcactttgagaagatgctctatgaccaggcacagctcgctgtggcctattcgcaggccttccagctctctggtgatgaattctactctgacgtggccaaaggcatcctgcagtacgtggctcggagcctgagccaccggtccggaggcttctatagcgcagaagatgcagactcgcccccagagcggggccagcggcccaaagagggcgcctactatgtgtggacggtcaaagaggttcagcagctcctcccggagcctgtgttgggtgccaccgagccgctgacctcaggccagctcctcatgaagcactacggcctcacagaggctggtaacatcagccccagtcaggaccccaagggggagctgcagggccagaatgtgctgaccgtccggtactcgctggagctgactgctgcccgctttggcttggatgtggaggccgtgcggaccttgctcaattcagggctggagaagctcttccaggcccggaagcatcggcccaagccgcacctggacagcaagatgctggctgcctggaatggcttgatggtgtcaggctatgctgtgactggggctgtcctgggccaagacaggctgatcaactatgccaccaatggtgccaagttcctgaagcggcacatgtttgatgtggccagtggccgcctgatgcggacctgctacaccggccctggggggactgtggagcacagcaacccaccctgctggggcttcctggaggactacgccttcgtggtgcggggcctgctggacctgtatgaggcctcacaggagagtgcgtggctcgagtgggctctgcggctgcaggacacacaggacaagctcttttgggactcccagggtggcggctacttctgcagtgaggctgagctgggggctggcctgcccctgcgtctgaaggacgaccaggatggagcagagcccagcgccaattccgtgtcagcccacaacctgctccggctgcatggcttcacgggccacaaggactggatggacaagtgtgtgtgcctattgaccgccttttccgagcgcatgcgtcgtgtcccggtggcgttgcccgagatggtccgcgccctctcagcccagcagcagaccctcaagcagatcgtgatctgtggagaccgtcaggccaaggacaccaaggccctggtgcagtgcgtccactctgtctacattcctaacaaggtgctgattctggctgatggggacccctcgagcttcctgtcccgccagctgcctttcctgagtaccctccgacggttggaagaccaggccactgcatatgtgtgtgagaatcaagcctgctcagtgcccatcactgatccctgcgaattacgaaaactactacatccatgactgccccaacccccttggggtggggcagaaggtgaagcatcccaactgactagagactcaggccctgcagggccctatagaacctgtggccatccctgagcaccctgccaccaggtgacctcggccatactcactgccccccttgggcacccactcaccctagaataaacttaacagtgtcccgtggtaa

SEQ ID NO: 213357 - DNA, 2702 bp, Artificial Sequence
  derived and/or modified sequence
ctgacttcccttcctgtcctcagcggccgggcccacggccccgagcagccatgctgggcgcgcgggcctggttgggccgcgtccttctgctgccccgcgccggtgcaggcctcgccgcgagccgcaggtctgcctgcagtcccacttccaggctgaactccctgaggtctctgattccctaggtgtcctggagtctggcccaggacctggccccacaggagtcccagcaggggtagctcctcccgggacaaggaccgaagtgcgacggtcagtagttcagtgcccatgcctgctggagggaaaggaagccatccttcatctacaccccagagggtccccaaccgcctgatccacgagaagtcaccatacctcctacaacatgcctacaatcctgtggactggtacccctggggacaggaagccttcgacaaggccaggaaggaaaacaagccgattttcctctcagtcgggtactccacctgccactggtgccacatgatggaagaggagtccttccagaatgaggagattggccgcctgctcagtgaggactttgtgagtgtgaaggtagaccgtgaggagcggcctgacgtggacaaggtgtacatgacgttcgtgcaggccaccagcagcggcgggggctggcccatgaatgtgtggctgactcccaacctccagccctttgtcgggggcacctatttccctcctgaggatggcttgacccgagtcggcttccgcacagtgttgctgagaatacgagaacagtggaaacagaacaagaacaccctgctagaaaatagccagcgtgtcaccactgccctgctggcccgatcagagatcagcgtgggtgaccgccagctgccgccctctgccgccaccgtgaacaatcgctgcttccagcagctggatgagggctatgatgaggaatacggtggcttcgctgaggcccccaagtttcccacgccggtgatcctgagcttcctgttctcctactggctcagccatcgactgactcaggatggctctcgggcccagcagatggccttgcataccctgaaaatgatggctaacgggggcatccgggaccatgtggggcagggctttcaccgctactccacagaccgccagtggcacgtccctcactttgagaagatgctctatgaccaggcacagctcgctgtggcctattcgcaggccttccagctctctggtgatgaattctactctgacgtggccaaaggcatcctgcagtacgtggctcggagcctgagccaccggtccggaggcttctatagcgcagaagatgcagactcgcccccagagcggggccagcggcccaaagagggcgcctactatgtgtggacggtcaaagaggttcagcagctcctcccggagcctgtgttgggtgccaccgagccgctgacctcaggccagctcctcatgaagcactacggcctcacagaggctggtaacatcagccccagtcaggaccccaagggggagctgcagggccagaatgtgctgaccgtccggtactcgctggagctgactgctgcccgctttggcttggatgtggaggccgtgcggaccttgctcaattcagggctggagaagctcttccaggcccggaagcatcggcccaagccgcacctggacagcaagatgctggctgcctggaatggcttgatggtgtcaggctatgctgtgactggggctgtcctgggccaagacaggctgatcaactatgccaccaatggtgccaagttcctgaagcggcacatgtttgatgtggccagtggccgcctgatgcggacctgctacaccggccctggggggactgtggagcacagcaacccaccctgctggggcttcctggaggactacgccttcgtggtgcggggcctgctggacctgtatgaggcctcacaggagagtgcgtggctcgagtgggctctgcggctgcaggacacacaggacaagctcttttgggactcccagggtggcggctacttctgcagtgaggctgagctgggggctggcctgcccctgcgtctgaaggacgaccaggatggagcagagcccagcgccaattccgtgtcagcccacaacctgctccggctgcatggcttcacgggccacaaggactggatggacaagtgtgtgtgcctattgaccgccttttccgagcgcatgcgtcgtgtcccggtggcgttgcccgagatggtccgcgccctctcagcccagcagcagaccctcaagcagatcgtgatctgtggagaccgtcaggccaaggacaccaaggccctggtgcagtgcgtccactctgtctacattcctaacaaggtgctgattctggctgatggggacccctcgagcttcctgtcccgccagctgcctttcctgagtaccctccgacggttggaagaccaggccactgcatatgtgtgtgagaatcaagcctgctcagtgcccatcactgatccctgcgaattacgaaaactactacatccatgactgccccaacccccttggggtggggcagaaggtgaagcatcccaactgactagagactcaggccctgcagggccctatagaacctgtggccatccctgagcaccctgccaccaggtgacctcggccatactcactgccccccttgggcacccactcaccctagaataaacttaacagtgtcccgtggt

SEQ ID NO: 213358 - DNA, 1957 bp, Artificial Sequence
  derived and/or modified sequence
ttgctgagaatacgagaacagtggaaacagaacaagaacaccctgctagaaaatagccagcgtgtcaccactgccctgctggcccgatcagagatcagcgtgggtgaccgccagctgccgccctctgccgccaccgtgaacaatcgctgcttccagcagctggatgagggctatgatgaggaatacggtggcttcgctgaggcccccaagtttcccacgccggtgatcctgagcttcctgttctcctactggctcagccatcgactgactcaggatggctctcgggcccagcagatggccttgcataccctgaaaatgatggctaacgggggcatccgggaccatgtggggcagggctttcaccgctactccacagaccgccagtggcacgtccctcactttgagaagatgctctatgaccaggcacagctcgctgtggcctattcgcaggccttccagctctctggtgatgaattctactctgacgtggccaaaggcatcctgcagtacgtggctcggagcctgagccaccggtccggaggcttctatagcgcagaagatgcagactcgcccccagagcggggccagcggcccaaagagggcgcctactatgtgtggacggtcaaagaggttcagcagctcctcccggagcctgtgttgggtgccaccgagccgctgacctcaggccagctcctcatgaagcactacggcctcacagaggctggtaacatcagccccagtcaggaccccaagggggagctgcagggccagaatgtgctgaccgtccggtactcgctggagctgactgctgcccgctttggcttggatgtggaggccgtgcggaccttgctcaattcagggctggagaagctcttccaggcccggaagcatcggcccaagccgcacctggacagcaagatgctggctgcctggaatggcttgatggtgtcaggctatgctgtgactggggctgtcctgggccaagacaggctgatcaactatgccaccaatggtgccaagttcctgaagcggcacatgtttgatgtggccagtggccgcctgatgcggacctgctacaccggccctggggggactgtggagcacagcaacccaccctgctggggcttcctggaggactacgccttcgtggtgcggggcctgctggacctgtatgaggcctcacaggagagtgcgtggctcgagtgggctctgcggctgcaggacacacaggacaagctcttttgggactcccagggtggcggctacttctgcagtgaggctgagctgggggctggcctgcccctgcgtctgaaggacgaccaggatggagcagagcccagcgccaattccgtgtcagcccacaacctgctccggctgcatggcttcacgggccacaaggactggatggacaagtgtgtgtgcctattgaccgccttttccgagcgcatgcgtcgtgtcccggtggcgttgcccgagatggtccgcgccctctcagcccagcagcagaccctcaagcagatcgtgatctgtggagaccgtcaggccaaggacaccaaggccctggtcagtgcgtccactctgtctacattcctaacaaggtgctgattctggctgatggggacccctcgagcttcctgtcccgccagctgcctttcctgagtaccctccgacggttggaagaccaggccactgcatatgtgtgtgagaatcaagcctgctcagtgcccatcactgatccctgcgaattacgaaaactactacatccatgactgccccaacccccttggggtggggcagaaggtgaagcatcccaactgactagagactcaggccctgcagggccctatagaacctgtggccatccctgagcaccctgccaccaggtgacctcggccatactcactgccccccttgggcacccactcaccctagaataaacttaacagtgtcccgtggt

SEQ ID NO: 213359 - DNA, 2734 bp, Artificial Sequence
  derived and/or modified sequence
ccgtaggtgcccggcccgcccctcgcagcctcctgacttcccttcctgtcctcagcggccgggcccacggccccgagcagccatgctgggcgcgcgggcctggttgggccgcgtccttctgctgccccgcgccggtgcaggcctcgccgcgagccgcaggtctgcctgcagtcccacttccaggctgaactccctgaggtctctgattccctaggtgtcctggagtctggcccaggacctggccccacaggagtcccagcaggggtagctcctcccgggacaaggaccgaagtgcgacggtcagtagttcagtgcccatgcctgctggagggaaaggaagccatccttcatctacaccccagagggtccccaaccgcctgatccacgagaagtcaccatacctcctacaacatgcctacaatcctgtggactggtacccctggggacaggaagccttcgacaaggccaggaaggaaaacaagccgattttcctctcagtcgggtactccacctgccactggtgccacatgatggaagaggagtccttccagaatgaggagattggccgcctgctcagtgaggactttgtgagtgtgaaggtagaccgtgaggagcggcctgacgtggacaaggtgtacatgacgttcgtgcaggccaccagcagcggcgggggctggcccatgaatgtgtggctgactcccaacctccagccctttgtcgggggcacctatttccctcctgaggatggcttgacccgagtcggcttccgcacagtgttgctgagaatacgagaacagtggaaacagaacaagaacaccctgctagaaaatagccagcgtgtcaccactgccctgctggcccgatcagagatcagcgtgggtgaccgccagctgccgccctctgccgccaccgtgaacaatcgctgcttccagcagctggatgagggctatgatgaggaatacggtggcttcgctgaggcccccaagtttcccacgccggtgatcctgagcttcctgttctcctactggctcagccatcgactgactcaggatggctctcgggcccagcagatggccttgcataccctgaaaatgatggctaacgggggcatccgggaccatgtggggcagggctttcaccgctactccacagaccgccagtggcacgtccctcactttgagaagatgctctatgaccaggcacagctcgctgtggcctattcgcaggccttccagctctctggtgatgaattctactctgacgtggccaaaggcatcctgcagtacgtggctcggagcctgagccaccggtccggaggcttctatagcgcagaagatgcagactcgcccccagagcggggccagcggcccaaagagggcgcctactatgtgtggacggtcaaagaggttcagcagctcctcccggagcctgtgttgggtgccaccgagccgctgacctcaggccagctcctcatgaagcactacggcctcacagaggctggtaacatcagccccagtcaggaccccaagggggagctgcagggccagaatgtgctgaccgtccggtactcgctggagctgactgctgcccgctttggcttggatgtggaggccgtgcggaccttgctcaattcagggctggagaagctcttccaggcccggaagcatcggcccaagccgcacctggacagcaagatgctggctgcctggaatggcttgatggtgtcaggctatgctgtgactggggctgtcctgggccaagacaggctgatcaactatgccaccaatggtgccaagttcctgaagcggcacatgtttgatgtggccagtggccgcctgatgcggacctgctacaccggccctggggggactgtggagcacagcaacccaccctgctggggcttcctggaggactacgccttcgtggtgcggggcctgctggacctgtatgaggcctcacaggagagtgcgtggctcgagtgggctctgcggctgcaggacacacaggacaagctcttttgggactcccagggtggcggctacttctgcagtgaggctgagctgggggctggcctgcccctgcgtctgaaggacgaccaggatggagcagagcccagcgccaattccgtgtcagcccacaacctgctccggctgcatggcttcacgggccacaaggactggatggacaagtgtgtgtgcctattgaccgccttttccgagcgcatgcgtcgtgtcccggtggcgttgcccgagatggtccgcgccctctcagcccagcagcagaccctcaagcagatcgtgatctgtggagaccgtcaggccaaggacaccaaggccctggtgcagtgcgtccactctgtctacattcctaacaaggtgctgattctggctgatggggacccctcgagcttcctgtcccgccagctgcctttcctgagtaccctccgacggttggaagaccaggccactgcatatgtgtgtgagaatcaagcctgctcagtgcccatcactgatccctgcgaattacgaaaactactacatccatgactgccccaacccccttggggtggggcagaaggtgaagcatcccaactgactagagactcaggccctgcagggccctatagaacctgtggccatccctgagcaccctgccaccaggtgacctcggccatactcactgccccccttgggcacccactcaccctagaataaacttaacagtgtcccgtggt

SEQ ID NO: 213360 - protein, 1430 aa, Artificial Sequence
  derived and/or modified sequence
MSRPSSVSPRQPAPGGGGGGGPSPCGPGGGGRAKGLKDIRIDEEVKIAVNIALERFRYGDQREMEFPSSLTSTERAFIHRLSQSLGLVSKSKGKGANRYLTVKKKDGSETAHAMMTCNLTHNTKHAVRSLIQRFPVTNKERTELLPKTERGNVFAVEAENREMSKTSGRLNNGIPQIPVKRGESEFDSFRQSLPVFEKQEEIVKIIKENKVVLIVGETGSGKTTQIPQFLLDDCFKNGIPCRIFCTQPRRLAAIAVAERVAAERRERIGQTIGYQIRLESRVSPKTLLTFCTNGVLLRTLMAGDSTLSTVTHVIVDEVHERDRFSDFLLTKLRDLLQKHPTLKLILSSAALDVNLFIRYFGSCPVIYIQGRPFEVKEMFLEDILRTTGYTNKEMLKYKKEKQQEEKQQTTLTEWYSAQENSFKPESQRQRTVLNVTDEYDLLDDGGDAVFSQLTEKDVNCLEPWLIKEMDACLSDIWLHKDIDAFAQVFHLILTENVSVDYRHSETSATALMVAAGRGFASQVEQLISMGANVHSKASNGWMALDWAKHFGQTEIVDLLESYSATLEFGNLDESSLVQTNGSDLSAEDRELLKAYHHSFDDEKVDLDLIMHLLYNICHSCDAGAVLIFLPGYDEIVGLRDRILFDDKRFADSTHRYQVFMLHSNMQTSDQKKVLKNPPAGVRKIILSTNIAETSITVNDVVFVIDSGKVKEKSFDALNFVTMLKMVWISKASAIQRKGRAGRCRPGICFRLFSRLRFQNMLEFQTPELLRMPLQELCLHTKLLAPVNCPIADFLMKAPEPPPALIVRNAVQMLKTIDAMDTWEDLTELGYHLADLPVEPHLGKMVLCAVVLKCLDPILTIACTLAYRDPFVLPTQASQKRAAMLCRKRFTAGAFSDHMALLRAFQAWQKARSDGWERAFCEKNFLSQATMEIIIGMRTQLLGQLRASGFVRARGGGDIRDVNTNSENWAVVKAALVAGMYPNLVHVDRENLVLTGPKEKKVRFHPASVLSQPQYKKIPPANGQAAAIKALPTDWLIYDEMTRAHRIANIRCCSAVTPVTILVFCGPARLASNALQEPSSFRVDGIPNDSSDSEMEDKTTANLAALKLDEWLHFTLEPEAASLLLQLRQKWHSLFLRRMRAPSKPWSQVDEATIRAIIAVLSTEEQSAGLQQPSGIGQRPRPMSSEELPLASSWRSNNSRKSSADTEFSDECTTAERVLMKSPSPALHPPQKYKDRGILHPKRGTEDRSDQSSLKSTDSSSYPSPCASPSPPSSGKGSKSPSPRPNMPVRYFIMKSSNLRNLEISQQKGIWSTTPSNERKLNRAFWESSIVYLVFSVQGSGHFQGFSRMSSEIGREKSQDWGSAGLGGVFKVEWIRKESLPFQFAHHLLNPWNDNKKVQISRDGQELEPLVGEQLLQLWERLPLGEKNTTD

SEQ ID NO: 213361 - DNA, 4293 bp, Artificial Sequence
  derived and/or modified sequence
atgagcagacccagcagcgtgagccccagacagcccgcccccggcggcggcggcggcggcggccccagcccctgcggccccggcggcggcggcagagccaagggcctgaaggacatcagaatcgacgaggaggtgaagatcgccgtgaacatcgccctggagagattcagatacggcgaccagagagagatggagttccccagcagcctgaccagcaccgagagagccttcatccacagactgagccagagcctgggcctggtgagcaagagcaagggcaagggcgccaacagatacctgaccgtgaagaagaaggacggcagcgagaccgcccacgccatgatgacctgcaacctgacccacaacaccaagcacgccgtgagaagcctgatccagagattccccgtgaccaacaaggagagaaccgagctgctgcccaagaccgagagaggcaacgtgttcgccgtggaggccgagaacagagagatgagcaagaccagcggcagactgaacaacggcatcccccagatccccgtgaagagaggcgagagcgagttcgacagcttcagacagagcctgcccgtgttcgagaagcaggaggagatcgtgaagatcatcaaggagaacaaggtggtgctgatcgtgggcgagaccggcagcggcaagaccacccagatcccccagttcctgctggacgactgcttcaagaacggcatcccctgcagaatcttctgcacccagcccagaagactggccgccatcgccgtggccgagagagtggccgccgagagaagagagagaatcggccagaccatcggctaccagatcagactggagagcagagtgagccccaagaccctgctgaccttctgcaccaacggcgtgctgctgagaaccctgatggccggcgacagcaccctgagcaccgtgacccacgtgatcgtggacgaggtgcacgagagagacagattcagcgacttcctgctgaccaagctgagagacctgctgcagaagcaccccaccctgaagctgatcctgagcagcgccgccctggacgtgaacctgttcatcagatacttcggcagctgccccgtgatctacatccagggcagacccttcgaggtgaaggagatgttcctggaggacatcctgagaaccaccggctacaccaacaaggagatgctgaagtacaagaaggagaagcagcaggaggagaagcagcagaccaccctgaccgagtggtacagcgcccaggagaacagcttcaagcccgagagccagagacagagaaccgtgctgaacgtgaccgacgagtacgacctgctggacgacggcggcgacgccgtgttcagccagctgaccgagaaggacgtgaactgcctggagccctggctgatcaaggagatggacgcctgcctgagcgacatctggctgcacaaggacatcgacgccttcgcccaggtgttccacctgatcctgaccgagaacgtgagcgtggactacagacacagcgagaccagcgccaccgccctgatggtggccgccggcagaggcttcgccagccaggtggagcagctgatcagcatgggcgccaacgtgcacagcaaggccagcaacggctggatggccctggactgggccaagcacttcggccagaccgagatcgtggacctgctggagagctacagcgccaccctggagttcggcaacctggacgagagcagcctggtgcagaccaacggcagcgacctgagcgccgaggacagagagctgctgaaggcctaccaccacagcttcgacgacgagaaggtggacctggacctgatcatgcacctgctgtacaacatctgccacagctgcgacgccggcgccgtgctgatcttcctgcccggctacgacgagatcgtgggcctgagagacagaatcctgttcgacgacaagagattcgccgacagcacccacagataccaggtgttcatgctgcacagcaacatgcagaccagcgaccagaagaaggtgctgaagaacccccccgccggcgtgagaaagatcatcctgagcaccaacatcgccgagaccagcatcaccgtgaacgacgtggtgttcgtgatcgacagcggcaaggtgaaggagaagagcttcgacgccctgaacttcgtgaccatgctgaagatggtgtggatcagcaaggccagcgccatccagagaaagggcagagccggcagatgcagacccggcatctgcttcagactgttcagcagactgagattccagaacatgctggagttccagacccccgagctgctgagaatgcccctgcaggagctgtgcctgcacaccaagctgctggcccccgtgaactgccccatcgccgacttcctgatgaaggcccccgagcccccccccgccctgatcgtgagaaacgccgtgcagatgctgaagaccatcgacgccatggacacctgggaggacctgaccgagctgggctaccacctggccgacctgcccgtggagccccacctgggcaagatggtgctgtgcgccgtggtgctgaagtgcctggaccccatcctgaccatcgcctgcaccctggcctacagagaccccttcgtgctgcccacccaggccagccagaagagagccgccatgctgtgcagaaagagattcaccgccggcgccttcagcgaccacatggccctgctgagagccttccaggcctggcagaaggccagaagcgacggctgggagagagccttctgcgagaagaacttcctgagccaggccaccatggagatcatcatcggcatgagaacccagctgctgggccagctgagagccagcggcttcgtgagagccagaggcggcggcgacatcagagacgtgaacaccaacagcgagaactgggccgtggtgaaggccgccctggtggccggcatgtaccccaacctggtgcacgtggacagagagaacctggtgctgaccggccccaaggagaagaaggtgagattccaccccgccagcgtgctgagccagccccagtacaagaagatcccccccgccaacggccaggccgccgccatcaaggccctgcccaccgactggctgatctacgacgagatgaccagagcccacagaatcgccaacatcagatgctgcagcgccgtgacccccgtgaccatcctggtgttctgcggccccgccagactggccagcaacgccctgcaggagcccagcagcttcagagtggacggcatccccaacgacagcagcgacagcgagatggaggacaagaccaccgccaacctggccgccctgaagctggacgagtggctgcacttcaccctggagcccgaggccgccagcctgctgctgcagctgagacagaagtggcacagcctgttcctgagaagaatgagagcccccagcaagccctggagccaggtggacgaggccaccatcagagccatcatcgccgtgctgagcaccgaggagcagagcgccggcctgcagcagcccagcggcatcggccagagacccagacccatgagcagcgaggagctgcccctggccagcagctggagaagcaacaacagcagaaagagcagcgccgacaccgagttcagcgacgagtgcaccaccgccgagagagtgctgatgaagagccccagccccgccctgcaccccccccagaagtacaaggacagaggcatcctgcaccccaagagaggcaccgaggacagaagcgaccagagcagcctgaagagcaccgacagcagcagctaccccagcccctgcgccagccccagcccccccagcagcggcaagggcagcaagagccccagccccagacccaacatgcccgtgagatacttcatcatgaagagcagcaacctgagaaacctggagatcagccagcagaagggcatctggagcaccacccccagcaacgagagaaagctgaacagagccttctgggagagcagcatcgtgtacctggtgttcagcgtgcagggcagcggccacttccagggcttcagcagaatgagcagcgagatcggcagagagaagagccaggactggggcagcgccggcctgggcggcgtgttcaaggtggagtggatcagaaaggagagcctgcccttccagttcgcccaccacctgctgaacccctggaacgacaacaagaaggtgcagatcagcagagacggccaggagctggagcccctggtgggcgagcagctgctgcagctgtgggagagactgcccctgggcgagaagaacaccaccgactag

SEQ ID NO: 213362 - DNA, 4293 bp, Artificial Sequence
  derived and/or modified sequence
atgtccagaccatctagtgtgtcgcccaggcagccagccccaggtgggggggggggcggtggtccatccccttgtggccctggcggcggcggacgtgcaaaaggcctgaaggacatcaggattgacgaggaagtgaagattgctgttaacatcgctctggaacgattccggtatggtgatcaacgggagatggagtttccttcaagtctcacttctacagagagggccttcatccaccggctaagccaatcgttgggactggtttccaagtctaaagggaaaggtgctaaccgatacctcacagtcaagaagaaagacggatctgaaactgcccatgcaatgatgacatgtaacttgacacataatacaaaacatgccgtgcgaagtctgattcagagatttccagtcacgaacaaggagcggactgaactgctccctaaaacagaacggggcaacgtgttcgccgttgaggcggagaatcgcgagatgtccaagacctcagggaggcttaataacggtataccccagatcccagtgaaaaggggggaaagcgagttcgactcatttcggcagtcccttcccgtctttgaaaagcaagaggaaattgttaagatcattaaggagaataaggtggtgcttattgtcggggagaccggcagcggaaaaacaactcaaattccacagtttttgctcgacgactgtttcaagaatggtataccatgtcggattttctgcactcagcctcgcagactcgcagccattgccgtcgccgaaagggtggccgccgagcggcgagaacgtattggacaaacaattggctaccaaatacggttagaatccagagtcagccctaagaccctccttacgttctgtaccaatggggttctcttacgaaccctgatggctggtgattcaactctgtcaacggtgacacacgtcattgtggacgaagtccacgagcgggataggttctctgacttcctcttgaccaagctcagggaccttctacagaaacatcccacactgaagttgatcctctcctccgccgccctggacgtgaatctgtttatccgatactttggatcttgtccagtgatttacattcagggccgaccttttgaagtgaaggagatgtttttggaggatattctgagaacaacaggctacacaaataaagagatgctgaagtataagaaagagaagcaacaggaagagaagcaacagactacacttaccgaatggtactcagctcaggaaaactccttcaagccagaatcacagcggcaaaggactgtcctgaacgtcactgacgaatacgatctgttggacgacggtggagacgctgtcttttcccaactgacagaaaaggacgtgaattgcctggaaccttggctgatcaaagagatggacgcgtgtctgtcagatatttggttgcataaagacattgacgcgttcgctcaggtgttccatctaatcctgaccgagaatgtgtcagtagattatagacactccgagacaagcgcaacagccttgatggtcgctgccggaagaggctttgcgtcccaagtggaacagttgatttcaatgggtgctaacgtgcattccaaggcttctaatggatggatggccctggattgggccaaacacttcggacaaaccgaaatcgtagacctgctggagtcctacagcgctaccctggaatttggaaatctcgatgagagttcccttgtccagaccaacggatccgacctgagtgccgaagatcgcgaactgctgaaagcttaccaccatagcttcgacgacgagaaggtggacttggatctcatcatgcatctgctctacaatatctgtcatagctgtgatgcgggcgctgttctcatcttcttgccaggatacgacgaaattgttggtttgagagatcgtatcctgttcgatgataagagatttgccgactccacacaccggtaccaggtttttatgttgcacagcaatatgcagacaagcgatcaaaagaaggtattgaagaacccacccgccggtgtgagaaagataattctgagcacaaatattgccgaaaccagcatcactgtgaacgacgttgtgtttgttatcgattctggcaaagtcaaggagaagtccttcgacgcactcaacttcgtaacaatgctgaagatggtgtggattagcaaggcaagtgcaatccagcgtaagggccgggctggcaggtgcagacctggaatctgttttcgactattttctcgcctgagattccagaatatgctcgaattccaaacacccgagctgttacgcatgcctttgcaggagttatgcctgcacaccaaattactggctcctgtgaattgcccgattgccgactttcttatgaaagcccccgagccacctcccgcactgattgtcaggaacgcagttcagatgcttaaaaccattgatgcaatggatacatgggaagacctaacggaacttggctaccacctggcagatctcccggtggagccacacctgggcaaaatggtactgtgtgcagtggtgctcaagtgcttggacccaatcctgactattgcttgcacacttgcctaccgtgacccattcgtcctgccgacgcaggccagtcaaaagcgtgccgcaatgctctgcaggaaacgattcaccgctggcgccttttccgatcacatggcacttttaagagcttttcaagcttggcagaaggcccgcagcgacggctgggaacgcgcgttctgcgagaaaaattttctgagccaagctactatggagattattatcggcatgagaacgcagctgttggggcagctgcgtgcatccggattcgtccgtgcgcgtggaggaggcgacatcagggatgtgaataccaacagtgaaaattgggccgtagtgaaggccgcactggtggccgggatgtaccccaatttggtccatgtcgacagggaaaacctggtgttgaccggcccaaaggagaaaaaagtacggtttcatcctgccagcgtgctttcccaaccacagtacaaaaagatccctccagcgaacggccaggccgcagcaattaaagccctgccgacggactggctaatttacgacgagatgacacgggcgcacagaattgctaacattcggtgctgctcggctgttacacctgtcacgatccttgttttctgtggacccgccagacttgcgtcgaacgcattgcaagaaccatcatcttttcgcgtggacggcatccctaacgacagttctgattccgaaatggaggataaaacgacggccaatcttgctgcgcttaagttagacgagtggctgcacttcaccttggaaccagaggctgcgtccttgctcctgcagctacgccagaagtggcactctctatttctccggaggatgcgagcgccctcaaagccatggtcccaggtcgacgaggctacgatacgcgcaattattgcagtgctgtccactgaggaacagagtgctggtctacagcagccctcagggatcggacagaggccaaggccgatgtccagcgaagaattgccactggctagctcttggcgttctaataatagtagaaagagttcggctgatacagagttttcagacgagtgtacaactgccgaaagggtcctgatgaaaagccccagtccggctctacaccctcctcagaaatataaagacaggggtattctgcaccccaaacgcggcacagaggataggtctgaccagagttctctgaaatctacagattcatcttcttatccttctccttgcgcaagtccctcgccaccttctagtggcaaaggcagcaaatcaccctctcccaggcctaatatgccagtgagatatttcatcatgaagtcatcaaaccttagaaatcttgaaatatcacagcagaaagggatttggagtacaacacctagcaatgaacgtaagctgaaccgggcgttttgggaaagctccatcgtgtatttggtgttcagtgtgcagggcagtgggcatttccaggggttctctcgcatgtcgtccgaaataggccgtgagaagtctcaggactggggctccgccggcttgggaggcgtgttcaaagtggagtggatcagaaaagagtctctccctttccaattcgctcatcacctgctgaacccgtggaatgacaacaaaaaggtgcagatatcaagagacggccaagaacttgagcccctggtcggagagcaactcttgcagctctgggagcggcttccgctgggggagaagaacaccacagactag

SEQ ID NO: 213363 - DNA, 4293 bp, Artificial Sequence
  derived and/or modified sequence
atgagccggcccagctctgtgagcccccggcagcctgcccctgggggcggcggcggcggcggccccagcccctgtggccctgggggcggcggccgggccaagggcctgaaggacatcagaattgatgaggaggtgaagattgctgtgaacatcgccctggagcgcttccgctacggggaccagcgggagatggagttccccagcagcctgaccagcacagagcgggccttcatccaccggctgagccagagcctgggcctggtgtccaagagcaagggcaagggggccaaccgctacctgactgtgaagaagaaggatggcagcgagacagcccacgccatgatgacctgcaacctgacccacaacaccaagcatgctgtgcgcagcctcatccagcgcttccctgtgaccaacaaggagaggacagagctgctgcccaagacagaaagaggaaatgtgtttgctgtggaggctgaaaatcgggagatgagcaagaccagcggccgcctgaacaacggcatcccccagatccctgtgaagagaggagagagcgagtttgacagcttccggcagagcctgcctgtgtttgagaagcaggaggagatcgtgaagatcatcaaggagaacaaggtggtgctgattgtgggggagaccggcagcggcaagaccacccagatcccccagttcctgctggatgactgcttcaagaatggcatcccctgccgcatcttctgcacccagccccggcggctggccgccatcgctgtggccgagcgggtggccgctgagcggcgggagcgcatcggccagaccatcggctaccagatccggctggagagccgggtgagccccaagaccctgctgaccttctgcaccaatggagtgctgctgcggaccctgatggccggggacagcaccctgagcacagtgacccacgtgattgtggatgaggtgcatgagcgggaccgcttcagtgacttcctgctgaccaagctgcgggacctgctgcagaagcaccccaccctgaagctgatcctgagcagcgctgccctggatgtgaacctcttcatccgctacttcggcagctgccctgtgatctacatccagggccggccctttgaggtgaaggagatgttcctggaggacatcctgcggaccaccggctacaccaacaaggagatgctgaagtacaagaaggagaagcagcaggaggagaagcagcagaccaccctgacagagtggtacagcgcccaggagaacagcttcaagccagagagccagaggcagaggacagtgctgaatgtgacagatgaatatgacctgctggatgatggaggagatgctgtgttcagccagctgacagagaaggatgtgaactgcctggagccctggctgatcaaggagatggatgcctgcctgagtgacatctggctgcacaaggacattgatgcctttgcccaggtgttccacctgatcctgacagaaaatgtgtctgtggactaccgccacagcgagaccagcgccacagccctgatggtggccgccggccggggctttgccagccaggtggagcagctgatctccatgggcgccaacgtgcacagcaaggccagcaatggctggatggccctggactgggccaagcacttcggccagacagaaattgtggacctgctggagagctacagcgccaccctggagtttggaaacctggatgagagcagcctggtgcagaccaacggcagtgacctgtctgcagaagatcgggagctgctgaaggcctaccaccacagctttgatgatgagaaggtggacctggacctgatcatgcacctgctgtacaacatctgccacagctgtgatgctggagctgtgctgatcttcctgcccggctatgatgaaattgtgggcctgcgggaccgcatcctgtttgatgacaagagatttgctgacagcacccaccgctaccaggtgttcatgctgcacagcaacatgcagaccagtgaccagaagaaggtgctgaagaaccccccagctggggtgaggaagatcatcctgagcaccaacattgctgagaccagcatcaccgtgaatgatgtggtgtttgtgattgacagcggcaaggtgaaggagaagagctttgatgccctgaactttgtgaccatgctgaagatggtgtggatcagcaaggccagcgccatccagaggaagggccgggccggccgctgcaggcctggcatctgcttccgcctcttcagccggctgcgcttccagaacatgctggagttccagaccccagagctgctgaggatgcccctgcaggagctgtgcctgcacaccaagctgctggcccctgtgaactgccccatcgctgacttcctgatgaaggcccctgagcccccaccagccctgattgtgagaaatgctgtgcagatgctgaagaccattgatgccatggacacctgggaggacctgacagagctgggctaccacctggccgacctgcctgtggagccccacctgggcaagatggtgctgtgtgctgtggtgctgaagtgcctggaccccatcctgaccatcgcctgcaccctggcctacagagacccctttgtgctgcccacccaggccagccagaagagagctgccatgctgtgcaggaagcgcttcaccgctggggccttcagtgaccacatggccctgctgcgggccttccaggcctggcagaaggcccggagtgatggctgggagcgggccttctgtgagaagaacttcctgagccaggccaccatggagatcatcatcggcatgaggacccagctgctgggccagctgcgggccagcggctttgtgcgggcccggggcggcggggacatcagagatgtgaacaccaacagcgagaactgggccgtggtgaaggccgccctggtggccggcatgtaccccaacctggtgcacgtggaccgggagaacctggtgctgaccggccccaaggagaagaaggtgcgcttccacccagcctctgtgctgagccagccccagtacaagaagatccccccagccaacggccaggccgccgccatcaaggccctgcccacagactggctgatctatgatgagatgacccgggcccaccgcatcgccaacatccgctgctgcagcgctgtgacccctgtgaccatcctggtgttctgtggccctgcccggctggccagcaatgccctgcaggagcccagcagcttccgggtggatggcatccccaatgacagcagtgacagcgagatggaggacaagaccacagccaacctggccgccctgaagctggatgagtggctgcacttcaccctggagcctgaggccgccagcctgctgctgcagctgcggcagaagtggcacagcctcttcctgcggaggatgagggcccccagcaagccctggagccaggtggatgaggccaccatccgggccatcatcgctgtgctgagcacagaggagcagagcgctggcctgcagcagcccagcggcatcggccagaggccccggcccatgagcagcgaggagctgcccctggccagctcctggaggagcaacaacagcaggaagagcagcgctgacacagagttcagtgatgagtgcaccacagctgagcgggtgctgatgaagagccccagccctgccctgcaccccccccagaagtacaaggaccggggcatcctgcaccccaagaggggcacagaagatagaagtgaccagagcagcctgaagagcacagacagcagcagctaccccagcccctgtgccagccccagcccccccagcagcggcaagggcagcaagagccccagcccccggcccaacatgcctgtgcgctacttcatcatgaagagcagcaacctgaggaacctggagatcagccagcagaagggcatctggagcaccacccccagcaatgaaaggaagctgaacagagccttctgggagagcagcatcgtgtacctggtgttttctgtgcagggcagcggccacttccagggcttcagcaggatgagcagcgagatcggccgggagaagagccaggactggggcagcgctggcctgggcggcgtcttcaaggtggagtggatcaggaaggagagcctgcccttccagtttgcccaccacctgctgaacccctggaatgacaacaagaaggtgcagatcagcagagatggccaggagctggagcccctggtgggggagcagctgctgcagctgtgggagcggctgcccctgggggagaagaacaccacagactag

SEQ ID NO: 213364 - DNA, 4293 bp, Artificial Sequence
  derived and/or modified sequence
atgagccggcccagcagcgtgagcccccggcagcccgcccccggcggggggggtgggggaggcccaagcccctgcggtcccggaggaggtggtcgggccaaggggttgaaagatattagaattgacgaagaagtcaagatcgccgtcaatattgctcttgaaaggttccgctatggggatcagcgggagatggaatttccatcaagcctaacatcaaccgaacgggcttttatccatagacttagtcagtccctgggcctggtatcaaagagcaaaggcaagggcgctaataggtaccttactgtgaagaaaaaggatggatccgaaaccgcccatgcaatgatgacatgtaatctcacacacaacaccaaacacgcagtgaggtctctgattcaacgctttccagtcactaacaaggaaaggactgagctgctccctaaaaccgagcgcggtaacgttttcgcagtggaggccgagaaccgggagatgagcaaaacaagtggccgcttgaacaacggcattccacagattccagtcaagcgcggcgaatctgagtttgactcatttcgtcagagcttacccgtttttgagaagcaggaggagattgtgaagatcatcaaggagaataaagtggtcctgatagtgggggaaaccgggagcggaaagacaactcaaattccacagtttctgctggatgattgtttcaagaatgggatcccctgtcgtattttctgcacccagccaaggagactcgccgccatcgcagtcgctgaacgagtagctgctgagcgccgggagaggatcggtcagacaattgggtatcagatcagactggagagccgggtctccccaaagaccttactgactttctgtaccaatggtgtccttctcaggaccttgatggctggtgactctaccttgtccacagtaacacacgtcattgtggacgaagtgcacgaacgggatcgatttagcgactttttgcttacaaaacttcgcgatctgcttcagaagcacccaacactgaagcttattctctcctccgctgccctcgatgtgaatctctttattaggtacttcgggtcatgtcctgtaatatacatccaggggagaccttttgaggttaaggaaatgttccttgaagatattctgcgaacaaccggatatactaataaggaaatgcttaaatacaagaaagaaaagcagcaagaggaaaagcagcagaccactctcactgagtggtacagtgcacaggaaaattcctttaagcctgagagtcagagacagagaacagtgctcaacgtaacggatgaatacgaccttttagatgacggaggcgacgccgtcttttcccagctcacggagaaggacgtgaactgtctggagccttggttgatcaaggagatggacgcctgtctaagtgacatatggctgcataaagacattgacgctttcgctcaagtgtttcatctgatcctgacggaaaacgtgtctgtggactaccggcatagcgaaaccagtgctacggccctaatggtcgcagccgggcggggattcgcttcgcaagttgaacagctaatttccatgggggctaatgtacacagcaaggccagcaatgggtggatggcactggattgggcaaagcactttggtcagaccgaaatcgtggacttactcgaatcttatagcgctaccctagagtttgggaacctagacgagtcctcactggttcagacaaatgggagcgacctctctgcagaggacagagaactgctcaaagcctaccatcactccttcgacgacgaaaaggtggatctagatctaatcatgcaccttctgtataatatttgccattcctgtgatgccggagctgtgttgatttttctccctggctacgatgaaattgtcggtctacgggaccgcatactgtttgacgacaaacgatttgccgattctacacatcgctaccaggtttttatgttgcattctaatatgcagacgtccgatcagaagaaggtgctcaaaaatcccccagctggcgttcgaaagatcattctctctaccaatatcgccgaaacctccattactgtgaatgacgtggtgtttgttatcgatagtggaaaagtgaaggagaagtccttcgacgcactgaattttgtcactatgctgaaaatggtctggatcagtaaggcctccgcaattcagcgtaaggggcgggcagggcgctgtcgcccaggaatttgttttcggctcttctccagattacgcttccagaatatgttggagttccaaacacctgaactattgcgcatgcccctgcaagaattgtgtctgcatacaaagctgctggctcctgtcaattgccctattgccgacttcttaatgaaagcccctgaaccgccccctgcactgatcgtcaggaacgccgttcagatgctgaagacaattgatgccatggacacctgggaagatctgacagaactcgggtaccacctcgcagatctgccagtggaaccacacttaggaaagatggtcctgtgtgcggtagttttgaagtgtttggacccgatcctgactatcgcttgtaccctagcatatcgagatcccttcgtgttgccaacgcaggcctcacaaaagagagctgctatgttgtgccgcaagaggttcactgcgggagctttctccgatcacatggccctgttacgggcatttcaagcctggcaaaaagcccggagcgatggatgggagagagccttctgtgagaaaaactttctgagtcaggcaacaatggaaataataattggcatgaggacacaactactcggccagctgcgagcatccggattcgtccgcgcccgcgggggtggagacatccgggacgtcaatacaaatagtgagaattgggccgtcgtcaaagctgccttggtcgccggcatgtaccctaacctggttcatgtggaccgagaaaatctagtccttactggccctaaggaaaagaaggtaaggttccatccagcatctgtgctgagccagccccagtataaaaaaatcccccccgcgaatggccaggccgctgccatcaaagctcttccaaccgactggctgatatacgacgaaatgacccgggcacataggattgctaatatcaggtgttgtagcgcggtcacccccgtcacaatcctggttttctgtggacccgctaggctcgcaagcaatgcgctccaagagcccagcagttttagggttgatggaatacccaatgacagttcggacagcgagatggaggacaagacaactgctaaccttgctgcgctcaaactggacgagtggctccactttactctggaacctgaggcagctagcctgctcctccagcttcgtcaaaagtggcattcattgttcctgcgccgaatgagagccccctctaagccctggtcccaggtggatgaggccacaatccgagcaataatcgctgtattatctactgaagagcagagcgcaggactgcaacagccctccggcattgggcagcgcccaagaccaatgtctagcgaagagctgccgctagcaagttcttggaggagcaacaacagcagaaagagcagcgccgacacagaattctcagatgagtgcactaccgccgagagagtcttgatgaagtctcctagtcccgccctgcatcccccgcagaaatacaaagatagaggcatactacaccctaaaaggggaacagaggataggagcgaccagagctccctaaaatctacagacagtagtagctacccatctccctgcgcaagccccagccccccgtcatccggtaagggatcgaaaagcccgagcccccggccaaacatgcctgtgagatacttcattatgaagtcctccaatcttcgcaacctggagatatcccaacagaaaggtatctggtccaccacaccgagcaatgaaaggaagctgaaccgcgccttctgggagtccagtatagtgtatcttgtctttagtgtgcagggttccgggcactttcagggcttctcacgtatgtctagtgagatcggccgcgaaaaaagccaggattggggctccgcaggattaggcggcgtgtttaaagtcgagtggatccgtaaagagtctctgccttttcagtttgctcaccacctcctaaatccgtggaacgacaacaagaaagtgcagatctctcgtgacgggcaggaactggagcccttggtcggagagcaactacttcagttatgggagcgcctgccactgggagagaagaacactaccgattag

SEQ ID NO: 213365 - DNA, 4293 bp, Artificial Sequence
  derived and/or modified sequence
atgtctcgtccttcttccgtaagccctagacagcccgcacccggtgggggtggtggcggtgggccttcaccctgcggcccagggggaggaggcagagctaaagggctaaaggacattcgcatcgacgaagaagtgaaaattgccgtgaacatcgcactggaaagatttcgctatggggatcaaagagaaatggagttccccagtagcctgacaagcactgagcgagccttcatccaccgtctctctcagtccctgggactggtgtccaaatccaaaggtaaaggagcaaacaggtacctgaccgtcaaaaaaaaggacggaagtgagaccgctcacgctatgatgacttgtaacctgacgcataataccaagcacgccgtgcggtccttgatccaacggttccctgtaacgaacaaggagcgaaccgagctcctgccaaagactgaacggggaaatgtgtttgccgtcgaagctgaaaatagggaaatgagtaagacctccggccgacttaataacgggattccacagattcccgtgaagagaggcgagtcagaattcgattcctttagacagagcctacctgtttttgaaaaacaagaagagattgtgaaaatcattaaggagaataaggttgtactgatagtaggtgagacgggtagcggtaaaactacgcagattcctcaatttctgctcgatgactgctttaaaaatggcattccttgtaggattttttgcactcaacccagacggttagccgctattgctgtggccgaacgcgtggccgctgagagaagagagcgcatcggccaaaccatcggataccaaatccgacttgagagtagggtaagccctaagaccctcctgacattttgcaccaatggggtgttgctcagaaccctgatggccggtgactctactctgagtacagtgactcacgtgattgtagatgaagtccacgagcgtgatagattcagcgactttcttctgacgaagcttcgggacctgttacaaaaacatcccactctgaaacttattctttctagcgctgcactggacgtcaacctatttattcgatactttggcagctgccccgtgatttatatacaggggcgaccatttgaagtcaaggaaatgttcctggaagacatactgaggaccaccgggtacactaataaagaaatgttgaaatacaagaaggagaagcagcaggaagagaaacaacaaacaactcttaccgaatggtattcagctcaggagaacagctttaagccagaaagccagcgacagcgaacagtgctgaatgtgaccgatgagtatgatctgctcgacgacgggggagatgccgtattctcccaattgaccgaaaaagacgttaactgcctcgaaccctggctcatcaaagagatggatgcttgtctgagtgacatctggctgcacaaggacattgacgcattcgcccaggtgttccatttgatccttactgagaacgtgtccgtggattataggcacagcgaaacctcagccacagctttgatggtggccgctggtcgcggatttgcctctcaggtggaacaactcatctcaatgggagctaatgtgcattccaaggcaagtaatggatggatggccctggattgggccaaacattttggacaaacagagattgtggatctgttggaatcctacagtgcaaccctcgagttcggtaatctggacgaaagcagtttggtgcagactaatggatcagacctgtccgctgaagacagagaactactgaaagcataccatcactcctttgacgatgaaaaagttgacttagacttaattatgcacttgctgtacaacatatgccacagttgcgatgccggagctgtcctcatattccttcctggttatgacgaaatagtcggactgcgagaccgaattcttttcgatgataagcggttcgctgattctacccaccgatatcaggtctttatgctccacagtaacatgcagacgtcagatcagaaaaaggtgctgaagaatcctcccgctggagtgcgaaagataatcctgtctactaatatcgctgaaaccagtatcacagttaatgacgtggttttcgtcattgacagtggcaaggtaaaggagaagtcctttgacgccctgaactttgtgaccatgctgaaaatggtctggatatctaaagctagcgctatccaaaggaaggggcgtgccggacgatgcaggcctggaatctgctttcgcctgttttcgaggctcagatttcaaaacatgctagagttccaaacacccgaactgctgcgcatgcctctgcaggaactgtgcttgcacacaaagttgctggcccctgtcaactgtccgatcgcagacttcctaatgaaggcacctgagcctcctcccgctctcatcgtcagaaatgccgtgcagatgctcaagactattgatgcaatggatacgtgggaggaccttactgaacttggctaccatctggctgaccttcccgtggaacctcacttgggtaaaatggtactgtgtgccgttgtgctgaagtgcctagatccaattctgactatagcatgtaccttggcctatcgtgacccctttgtgctcccgacacaggcctcccaaaagcgggctgccatgttatgccgcaagaggttcacagccggtgcctttagtgaccatatggcgctcctgcgagcgtttcaggcatggcagaaagctagatcagatggttgggaacgtgcattctgcgagaagaacttcctgagtcaggcaacaatggagattatcattggcatgcgcacgcaactgctaggccagctgcgagcttccgggttcgttagagcacggggaggtggtgatataagagatgtgaatacaaactctgagaactgggccgtggtgaaagcagccttggtagctggcatgtatcccaacctggtgcacgttgaccgcgagaacttggtcctaactgggccaaaggaaaaaaaggttagatttcatccagcctctgtgctttctcagccacagtacaaaaagatcccgccagccaacggtcaagcggcagctataaaggcccttccaaccgattggttaatttacgatgagatgacacgagcacatagaattgcgaacattaggtgttgctcagctgtcacacccgtcaccatcctcgtgttttgcggtcccgcacgacttgcatccaatgcccttcaggaacctagcagcttcagagtagatggaatcccaaatgactcctctgacagcgagatggaggacaagactaccgctaatttagcggctttgaaactggacgagtggttacatttcaccttagaacccgaggctgcctcacttctcctccagctgcgccagaagtggcactccctgttcctgcgccgtatgcgtgccccatccaagccatggtcacaggtggatgaggctacaataagagcaatcatcgccgtcttgagcacagaggaacagtccgccggattgcaacagccctctggtattggacagcgacctcgtccgatgagcagcgaggagctcccgctcgctagtagttggcgtagcaacaatagccgtaaaagtagcgctgacaccgaattctccgatgaatgtacaactgccgaacgcgtgttgatgaagagccccagccccgctctgcatcctccacagaagtacaaagaccgtggaatacttcaccccaaaagggggacagaggaccgctcagaccagtcctcccttaagtccactgacagcagctcttatccgagcccctgcgcttctccttcgcctccttcttcaggtaaagggtccaaaagtccatcgccacgcccaaacatgccagtccgctatttcatcatgaaatccagtaacctgcggaatctcgaaatcagccagcagaaggggatctggtccacaacaccaagtaacgaacgcaagttgaatcgcgcattttgggagtcatctatcgtttacctcgtgttttccgtacagggcagcggacatttccagggatttagtagaatgtctagcgaaattggaagggagaagtcccaggactggggtagtgctggactgggcggtgtgttcaaggtggagtggatcagaaaagagtctcttcccttccagttcgcccatcatcttttgaatccatggaatgacaataagaaagtccagattagccgggatggacaggagttggaacccctggttggcgagcagctcctgcagttatgggaaaggctgccattgggagaaaaaaatactactgattag

SEQ ID NO: 213366 - DNA, 4293 bp, Artificial Sequence
  derived and/or modified sequence
atgtcccggcctagttcagtatcccctagacaacccgcgccaggagggggcggcgggggcggcccttctccctgtggtccaggggggggagggagagcgaaggggctaaaggacatccgcatcgacgaagaagtgaaaatcgcagttaatatcgctctagagaggttcagatacggggaccaacgtgaaatggaatttccatcaagcctcacctcaactgaacgtgcatttattcaccggctgagccaatctctgggattagtttcgaagagtaaaggaaagggggcaaatcggtacctaacggtcaagaaaaaagatggatccgagaccgctcacgcaatgatgacctgtaacctcactcacaacactaaacatgcagtgaggtccctaatacagcggtttcctgtgactaataaggaacgtaccgagctgctacccaaaactgagaggggcaatgtgttcgccgttgaagcagagaaccgggagatgtctaagacctcaggcagactgaataatggaattcctcaaattcccgtcaaaaggggggaatcagagtttgactcattcagacagtcgcttccagtcttcgaaaaacaagaagagattgtgaagataatcaaggagaacaaagtggtgttgattgtgggcgaaactgggtctggaaaaactacacaaatacctcagtttctgctcgacgattgctttaaaaacggaatcccctgcaggatcttctgcacccagcctcgacgcctggccgctattgcagttgccgaacgggtcgccgctgaacgccgggaacgtatcggccagaccatcggttatcagataagactggagagtagggtctccccaaaaacattattgacgttttgtaccaacggcgtcctcctcagaacactaatggcaggcgactccacattgagcactgttactcacgtgattgtagatgaagtgcacgaacgcgaccgatttagcgactttctccttacaaaactgcgcgacttgctgcagaagcatccaactttgaaactcatcctgtcatccgctgcactggatgtgaatcttttcatacgctatttcggtagctgtccagtcatctacatacagggtcggccatttgaggtgaaagagatgttcctggaggatatcctccgcactactggctacaccaataaagagatgttgaaatacaagaaggaaaaacagcaggaagagaagcagcagacaaccctgaccgagtggtactccgcgcaagagaatagttttaaacccgaatcccaaagacaaagaacagtattaaatgtgaccgatgagtacgatcttttggacgacggcggcgatgctgttttttcccagctcaccgaaaaagacgttaactgcctggaaccatggcttatcaaggagatggacgcctgtctcagcgacatctggctgcacaaggacattgacgccttcgcgcaggtctttcatcttatcctgacagagaatgtgtcagtggactataggcactcagagacctcagccaccgccctgatggtagccgctggcagaggctttgcttcccaggtggagcaacttatatctatgggcgccaacgtgcactctaaggcatctaacggatggatggccctggactgggcgaaacattttggccagactgagatcgtggatttgctagaaagctattcagccaccctcgaattcgggaatcttgacgaatcgtcactggttcagactaatggatctgacctatccgccgaagatagggagctcctaaaggcctaccaccattccttcgatgacgagaaagtcgatcttgacctgattatgcatctgctgtataacatttgccactcatgcgacgcaggagctgtgttgatcttcttgccaggctacgacgaaattgtgggtcttagggaccgcatcctcttcgatgataaaaggttcgcagactcaactcatcggtaccaggtcttcatgctgcattcaaacatgcagactagtgaccaaaagaaagtcctcaaaaatccaccagccggcgttcggaagattatactcagcaccaacattgcagagacaagtatcactgttaacgatgttgttttcgtgattgatagcggaaaagtgaaagaaaagtcattcgatgcactcaacttcgtgacaatgctcaagatggtgtggattagtaaggcaagtgccattcaacggaaagggcgcgcagggcgctgtagacccggtatttgtttccggttgttcagtcgcctccggtttcagaatatgcttgagttccagaccccagaattgctgcgcatgcctctgcaggagctttgcctgcacaccaaactgctggcaccggtcaattgccccattgcagacttcttaatgaaagccccagagccaccccccgcattaatcgtcagaaatgcagtgcagatgctgaagaccattgatgcaatggacacctgggaagatctgacagaactggggtaccacctggccgacctcccagtggagcctcacttgggcaaaatggttctttgcgccgtggtgctgaaatgcttggatcctatactgaccattgcctgcactttagcttaccgcgatcccttcgtcctacccacccaggcctctcagaagagagccgccatgctgtgtagaaaaagattcacagccggcgcgttttccgaccatatggcgctgctgagagctttccaagcatggcagaaagcacgttcggatggctgggagcgtgctttttgtgagaaaaacttcttatcacaggcgacgatggagatcataattggaatgagaacgcagctgctgggccagctacgcgctagcggattcgttcgagctagaggtggaggggatatccgggacgtcaacacaaactcagaaaactgggccgtggtgaaagccgctctcgtcgccgggatgtatccaaacttggtgcatgtcgaccgagagaacctcgtgctgacaggtcccaaggagaaaaaggttagattccaccccgctagtgtactgtcccaaccgcagtacaaaaagatcccacccgcgaatggtcaagcagccgcaatcaaagctctacccactgattggctcatatacgatgagatgactcgcgctcatcggatagcaaacataaggtgctgctccgccgtcacccccgttactatccttgtgttttgcggaccagcccgactggcgagtaacgctctgcaggagccatcatccttcagggttgacgggatccctaatgattcatcagacagtgaaatggaagataagacaactgctaatctcgccgcactcaaactggacgaatggctccacttcaccctggagccagaagccgccagcctattactacagctccgtcagaagtggcatagtctttttttaaggaggatgcgcgctccgagcaaaccatggtcacaggttgacgaagctacaataagagcaattattgcggtgctatccaccgaggagcagagcgctggcttgcaacagccctccggcatcggccagagacccaggccaatgagtagtgaagagttgccccttgccagtagctggcggtccaacaattctcgaaaatcctccgcggatactgagttctcagacgagtgcaccacagctgagcgggtgctcatgaaatccccctctcccgctttacatccgccccagaaatataaggatcggggaatcctccaccccaagagaggcactgaagataggtctgaccaaagttctcttaaaagcaccgattcctcttcctatcccagtccctgtgctagccccagccctccatcatccgggaaaggctcaaagtccccttcccctcgccccaatatgcctgttagatatttcatcatgaaatcttctaatctccgaaacttagagatcagccagcagaagggaatctggagtaccaccccctcgaacgagagaaaattgaatcgcgctttttgggagtcctcaatcgtgtacctcgttttctccgtgcaagggtctggtcactttcaggggttttccaggatgtcaagcgaaatcgggcgcgagaagtcccaggattggggatctgctggtttgggcggcgtgtttaaggttgaatggatccgaaaggagtcgctcccatttcagtttgcccaccacctgttgaatccgtggaatgataataagaaagtgcagatttcacgggacggccaggagcttgagcctctcgttggagagcagctgctacaattgtgggaaagactccctctgggtgaaaagaatactacagactag

SEQ ID NO: 213367 - DNA, 4293 bp, Artificial Sequence
  derived and/or modified sequence
atgtctaggccgagtagtgtgtcgccaagacagccagcgcccgggggtggtggcggaggcgggcccagcccgtgcggccctggaggaggcggtcgtgccaaaggactaaaagacatccgaattgacgaagaggtgaaaatcgctgttaacatcgcactcgagagatttcgctatggagatcagcgcgaaatggagttcccttcctcactcacaagcacagaaagagcttttatccataggttgtcccagagtctgggcctcgtttctaagagcaaaggaaagggagctaaccgatatctcacagtgaagaagaaagacggaagcgaaacagcacacgccatgatgacctgcaacctgacccacaatacaaagcatgcagtgcgatcgctgattcagagattcccagtaacaaacaaagaaaggacggagttattacctaagacagaacgaggcaatgtgtttgcggttgaggccgaaaacagagagatgtcgaaaacctcagggaggctgaataatggcatacctcagatcccagttaaacgcggagagtcagaattcgattcttttaggcagtctctcccggtgtttgaaaaacaggaggagatcgtaaagattattaaggaaaacaaagtggtactgatcgttggagaaaccgggagtggaaaaacaactcagatcccccaattcctgctggatgattgctttaagaacggtattccatgtagaatattctgtacacagccaagaaggctcgccgcaatagccgtggcagagcgcgtcgctgctgagcggagagagagaataggccagacaataggatatcagataagactagaaagtagggtgagtccaaagacactgctgacattttgcaccaatggcgtgttgctgagaacactcatggcgggagatagtacacttagcacggtcactcatgtcatcgtcgatgaagtgcacgaacgcgatagattctccgattttctcttaacaaagctgagggatctgctgcaaaaacaccctactttgaaattgattctgtccagcgccgcactcgacgtgaatctgtttatcaggtattttgggagctgccctgtgatatacatacaaggcagacctttcgaagttaaagaaatgttcctcgaagacatactacggactacgggctacaccaataaagagatgctcaaatacaagaaggagaagcagcaagaagagaagcagcagactactttgaccgaatggtatagcgcccaagagaattcttttaagcctgagagccagcggcaacgcacagttctgaatgtgaccgatgagtatgatctgctagatgatggaggcgatgccgtgttcagtcaactcactgaaaaggatgtgaattgtttggaaccatggttgatcaaggaaatggatgcctgtttgtccgacatttggttacataaggatattgacgcttttgcacaggtcttccacctgatcctgaccgaaaatgtgagcgtagactacagacatagcgaaacgtctgccaccgccctgatggtggctgccggtagggggtttgcttcacaggtcgagcagttgatctcgatgggcgccaatgtacatagtaaagcaagcaatggttggatggcattagattgggccaagcacttcggacagacggaaattgtcgaccttttagaatcatacagtgccaccctggaatttgggaacctcgatgaatcttcgctagtgcagacaaacggttctgacctaagcgctgaggatagggagctgttgaaagcctatcatcatagcttcgatgacgaaaaggtggacctcgacttaataatgcatcttctgtacaacatttgccattcctgtgatgcgggagctgtacttatctttcttccaggctatgacgaaattgttggcttacgcgaccgcattctgttcgatgacaaaagattcgccgattcgacccaccgctatcaggtatttatgctgcactctaacatgcagacctcagatcagaagaaggtgctcaaaaacccacccgccggagtccgaaaaatcattctgagcaccaatatcgccgaaacttcaatcacagtgaacgatgtggtgttcgtaattgactccggaaaagtgaaagagaaaagttttgatgctttgaattttgtcacaatgctgaagatggtgtggatcagtaaagcctcagctatccagcgtaagggtcgggctggacggtgcagacccggcatttgtttccgcctgttttcgcgtcttaggtttcagaacatgcttgagtttcagacacccgagctattgcgtatgcccttacaagaattgtgcctgcacactaagttgttagccccagtcaactgtcccattgctgacttcctgatgaaggccccagagcctccacccgcactgattgtccgcaatgctgtgcagatgttgaaaacaattgacgctatggacacctgggaagatttaaccgagcttggctatcacctggccgacctccctgtcgagccccacctgggcaagatggtcttatgcgccgtcgtgttaaagtgccttgaccccattctgaccatcgcctgcactcttgcctatagagaccccttcgtgctccccacacaagctagtcagaaacgggcagcaatgctctgcagaaaacgatttaccgcaggtgctttctctgaccacatggcactcttgcgggcgttccaagcatggcaaaaggctagaagtgacggatgggaacgggcattttgtgagaaaaacttcctgtcgcaagccacaatggagatcattatcggaatgaggacacagctcctgggccagctgcgggccagcgggttcgtgagggcccggggagggggagacattagagacgtcaacacaaacagtgagaattgggccgtggtgaaagcagccctggtggcaggaatgtaccctaatctagtgcatgtcgatagagaaaacttagtgcttaccggaccgaaggaaaagaaggtaagatttcatcccgcctctgtcttgtcgcaacctcaatacaagaagattcccccggcaaacggacaggccgctgcaataaaagccctgccgaccgattggcttatctatgacgaaatgacaagagcccatcgaatcgccaacattaggtgctgctctgccgtcacaccagtcactatcctcgttttctgcggccccgccagattagcttccaacgctctccaggaaccttccagttttagggtcgacggtattccaaacgattcttcagattccgaaatggaggacaaaacaaccgcgaacctggcagccctcaaactcgatgaatggctgcactttactctcgagcctgaagcagcctccctgttactgcaactgcgtcaaaagtggcactcactcttcctgcgacggatgagggctcctagcaagccttggtcgcaagtggatgaagctactatccgggctattatagccgttctctctacagaagagcagtccgccggattgcagcagccctcaggtatcggccaaaggccccgccctatgtcgagcgaggagcttccactcgcatcttcatggcgctccaacaacagtagaaagagctctgccgatactgaatttagtgatgaatgtacaactgccgaacgcgtattgatgaaatcaccctcgcccgccttgcacccacctcagaaatataaagaccgtggaattctgcaccctaaacgggggacagaagatcgatctgatcaatctagcctgaaaagcacagactcttctagttacccttctccttgcgcttcccctagccctccctcctccgggaagggatcaaagagcccttcaccccgaccaaatatgcctgtgcgctacttcattatgaagtcctctaatctacgtaatctggaaatatctcaacagaagggaatctggtccaccacaccaagtaatgagcgtaagctgaaccgagcattttgggaatccagcatcgtctatttggtattctctgtgcagggatccggccacttccagggattttcccgaatgagctcagagatcggaagggaaaagtcgcaggattggggaagcgcaggtttgggcggcgtctttaaggttgaatggattagaaaagaatcactgccatttcagttcgcacaccacttgctgaatccctggaatgataacaaaaaagtgcagatctcaagggatgggcaagagctcgagcctctggtcggggaacaactgctgcagctgtgggaacgcttacctttgggagaaaagaatacgacagactag

SEQ ID NO: 213368 - DNA, 6316 bp, Artificial Sequence
  derived and/or modified sequence
attacgcccgcgctcctcgcctggccgtgatatcaatggcgcaggcttcacttctgctgtggcggtgactgaggcctttctggtgacctcagcccaacacaggccgtctccggagcttcccggtagtggccccggattcccacggtctttgtcattggctgtcagctagcaggcctggccgctcccgtgcggagagaccatctcttcagggcaatgtccaggccgagcagcgtctccccgcggcagccggctcctggcggtggcggaggcggcggcccctcgccttgtggccctgggggcggcggccgggccaaggggctgaaggacattcgcattgatgaggaggtgaagatcgcagtcaatatcgcgctggagcgcttccgatacggggaccagagagaaatggaatttccttcttctttgaccagtactgaaagagcctttattcatcgactcagtcagtctcttggtttggtctctaaaagtaaaggaaagggagcaaatagatacctaactgtgaagaagaaagatggatcagaaacagctcatgcaatgatgacctgtaatttgactcataatacaaaacatgctgttaggagcctaattcaaagatttcctgtcaccaataaagagcgtacagaacttctgcctaaaacagaaagaggaaatgtgtttgcagttgaagctgaaaaccgggaaatgagcaagacaagtgggcgactcaacaatggcatacctcagattccagtgaaaagaggagaatccgaatttgattcttttaggcagtctttaccagtgtttgagaaacaggaagaaattgttaaaataattaaggaaaataaagtagttttgattgtaggagaaactgggtctggaaagaccacacagattcctcagttccttttagatgattgctttaaaaatggtatcccctgccgtatattttgtactcaaccaagacgattggcagctatcgctgtggctgaaagagttgccgcagagagacgggaaaggattggtcaaacaattggttatcagatccgattagaaagcagggtttctccaaagacacttctgacattttgtactaatggggtattgcttcgtacattgatggcaggagatagtacgttgtcgactgtgacacatgttatcgtggatgaagtgcatgaaagggatcgatttagtgattttttacttacaaagttaagagatttgttgcaaaagcacccaactttgaaactaattctttctagtgctgccttggatgtaaatctctttataagatattttggaagttgtccagtgatatatatacagggaagaccatttgaagtaaaagaaatgtttctggaagatattttaagaacaactggatatacaaacaaagaaatgttaaaatataaaaaggaaaaacagcaagaagagaaacaacaaaccacacttacagaatggtactcagctcaagaaaatagtttcaagcctgaatctcagaggcagagaactgttctaaatgtgactgatgagtatgacttactggatgatggtggtgatgctgtcttcagtcagctgactgaaaaagatgtgaattgccttgaaccatggttaataaaggaaatggatgcttgcctttctgatatatggctacataaagatattgatgcctttgctcaggtctttcatctcattttaactgaaaatgttagtgttgattacagacatagtgaaaccagtgcaacagctctgatggttgctgcaggacgtggctttgcaagtcaagtagaacagttaatcagtatgggagccaatgtccatagtaaagcatcaaatggctggatggcattggattgggctaaacactttgggcagactgaaattgtggatcttctagaatcttacagtgctacactggaatttggaaatctagatgaaagttctctggttcaaacaaatggaagtgacctcagtgctgaagacagagagctcctgaaagcttatcatcatagtttcgatgatgaaaaagtagacttggatttgatcatgcatcttctatacaatatctgccatagttgtgatgctggtgcagtactaatttttctgcctggatatgacgaaattgttggactgagagatcgcatcctgtttgatgacaagcggtttgctgacagtacacatagataccaagtctttatgcttcattcaaatatgcaaacatccgatcaaaagaaagtattaaaaaacccacctgcaggtgttcgaaaaataattctttccaccaatattgctgaaaccagcatcacagtcaatgatgttgtctttgttattgattctggtaaggtgaaagagaaatcctttgatgctctgaattttgttacaatgttaaaaatggtatggatttccaaagctagtgccatacagcggaaaggcagggcagggcgatgtagacctggaatttgttttcgtctgttcagtagactccgattccagaatatgttggaatttcagactccggaacttttgagaatgccattacaggaactttgcttacataccaagctgttagccccagttaattgtcccattgctgattttcttatgaaagctcctgaacctccaccagctttaattgtaagaaatgctgtacaaatgcttaagacaatagatgcaatggatacatgggaagatctgactgaacttgggtatcatttggctgacttgccagtagaaccacatcttggtaaaatggtcttgtgtgctgttgttttaaagtgtctggaccccatccttacaattgcttgcacactagcttatcgagatccttttgtactacctactcaggcctctcaaaaacgtgcagctatgctttgtaggaaacgttttactgcaggagctttcagtgaccatatggcacttctcagagcattccaggcctggcaaaaagcacgaagtgatgggtgggagcgagccttttgtgaaaagaattttctttcacaggctactatggaaataatcataggcatgagaacacagttgcttggtcaacttagagcatcaggttttgttagagcacgaggtggtggtgacattcgggacgttaacacaaactctgagaattgggctgtcgttaaagctgcattggtggcaggcatgtatcctaatttagtccacgtggacagagagaatctagtgttgacagggccaaaggagaaaaaagtacgatttcatcctgcttcagttctcagtcagcctcaatataaaaagattcctccagccaatggtcaagctgcagcaattaaggcactgcccacagattggcttatttatgatgaaatgaccagagcccatagaatagctaatattagatgttgttcagcagtgacgcctgtcactatattggtattctgtggaccagctagattggcaagtaatgctcttcaggaaccttcatcctttagagtggatggcattcccaatgacagtagtgatagtgaaatggaggacaaaactacagctaatttggcagccttgaaacttgatgagtggctccatttcacactggagccagaggcagctagtttattgctgcagctcagacagaagtggcatagcttatttttacgccgaatgagagctccatctaaaccttggtctcaagttgatgaagctaccataagagcaattatagctgttttaagcactgaagaacagtctgcaggtttacaacaaccatctgggattggccaaaggccaaggcctatgtcttcagaagagcttcctttggcctcatcttggaggtcaaataatagtaggaaaagttcagcagatactgaattttctgatgagtgtactactgcagaaagagtactgatgaaatctccatctccagcattacacccacctcagaagtacaaagatagaggaattttacatcctaaacgaggtactgaggaccgatcagatcagtcttctctgaaatctacagacagcagtagttacccaagtccttgtgctagtccttctcctccatcctcaggaaagggctcaaaatctccttcgccaagaccaaacatgcctgttcgatacttcataatgaagagtagcaatttgagaaaccttgaaatttctcaacagaagggtatctggtctacaactcctagtaatgaacggaagctaaatcgagccttttgggaaagcagcatagtttacttggtattttctgttcaaggatctggacatttccagggattttctaggatgtcttctgagattggaagggaaaagagtcaggactggggctctgctggactaggaggagtatttaaggtggagtggatacgaaaagaaagccttccctttcaatttgcacaccatttactcaatccatggaatgacaacaagaaagtgcagataagcagggatgggcaggaactagaacctctggttggtgaacagttgctccagttatgggaacgtcttcccttgggagaaaaaaacacaactgattgacactcagaactcttagctgtggaagaacatcatgcctatttataaccactgaatgcactgactttcaaaaactgaggtggggtgtgtgttacgaatgggctttttaacacttttagagtgttgctttagaactaccatcttcatatacaggagaaaggaagcatttaaatttttatagtgattatagagaatgattatatgatgtttgtaatgaataaaatagtagtttcattatttggcacaatagcagtttattttaaacaaacaatttgaagttaaacatttcatttttaaaaacactgaattacagttcttattgatgactttttaatgcagagtaagttgtttaagaaaggcctgaatatatcagaacatctgagcaccattttagaagagtcaactcttaagattatcattagaaaacaaatacgtcaacacctatgaaaagaagcggggaaaacaacaacaaggacaacaacaaaaaaccagtgaaattctacaagtgtcccttttaaaaatagtgtgtgctaactaagggctattcattctgccatttttaacttgagacacatttaagaataaagttggatgttctttttctgtgattatgaaatgcaataaaatctgaataaagggcaaagtttcttcctgatcagattagattaagtgcttagttttattcctaattctgccccttttaacctgatgtgtaccttactctttcctccctctcttcctcccttcctcctctccccgctcctttcctgcatttctccctccctccttccctcgtcacatctcttatatgagcacagtaattatgacctttttgttttggctacaacttgattgaaacaagttcaaaatttaaacaagttcatacaagtttttaaaaattctcaactggtagcttgcttgctgtgcgtcttccaaactaaagcctgcaagcgccacaattctaagtgccgccttccattttttttcagtatgttttcactggcttatgttttcagatatgattttcctttttcgcatatatggtttaataaatgggggataattttttttttgtaaatccgtgcttgtgccaagtctcatatttctttgccatctcagaattatctttttaccaccactgtttataaaatttccttagagactttttgaagggaaaatagagcaacagggaaaaatgaaagaaatgtcttggttactgagctctaaatagacaggtttgatggcacttctcatgatacattttagttattcttataaaagcaaacaggcaaacatgagtgtaaattaaagacaaaaagaaaactctggttttatatttgagaacacgtgaaaaatcatgggtcaacataaaatcttgagaaccttctactttctctgggaaagcattatatagtggtgcattagtttagaaagtcagctatgattttgcctatagttctagttattagctttggggttttcttgtactttaagacatacctgtaaattgaacctatttgaattatattccactgtatgtgtattatggctcttttcctattagagcaacttgtgtttccctgataatgtgtacattttttaggcatgtacttaatagttcacaatgttctaaatttggaaggacttaaaaaaaaaacttgtttaaatttccatctgttttgtaatatctagctctatatgtaaatgatgggtttgttggtatttaaaatgaatacaacttgaatgtaattaaagtgctgttttttggaagcgataaactttaaatatacttattaaaatgaaattctattaa

SEQ ID NO: 213369 - DNA, 4421 bp, Artificial Sequence
  derived and/or modified sequence
attagagtagacttcctgtccttctcttcagtagcatagtcatgtaagagctgatctggaatgaatagatatcttgggaaggagaattcaagaaggaagttatggagacaaaaatggggaatgcggaaacattgaagagccagagaaagaagaaaaaggaaagagatgctaagaaagggagcaaatagatacctaactgtgaagaagaaagatggatcagaaacagctcatgcaatgatgacctgtaatttgactcataatacaaaacatgctgttaggagcctaattcaaagatttcctgtcaccaataaagagcgtacagaacttctgcctaaaacagaaagaggaaatgtgtttgcagttgaagctgaaaaccgggaaatgagcaagacaagtgggcgactcaacaatggcatacctcagattccagtgaaaagaggagaatccgaatttgattcttttaggcagtctttaccagtgtttgagaaacaggaagaaattgttaaaataattaaggaaaataaagtagttttgattgtaggagaaactgggtctggaaagaccacacagattcctcagttccttttagatgattgctttaaaaatggtatcccctgccgtatattttgtactcaaccaagacgattggcagctatcgctgtggctgaaagagttgccgcagagagacgggaaaggattggtcaaacaattggttatcagatccgattagaaagcagggtttctccaaagacacttctgacattttgtactaatggggtattgcttcgtacattgatggcaggagatagtacgttgtcgactgtgacacatgttatcgtggatgaagtgcatgaaagggatcgatttagtgattttttacttacaaagttaagagatttgttgcaaaagcacccaactttgaaactaattctttctagtgctgccttggatgtaaatctctttataagatattttggaagttgtccagtgatatatatacagggaagaccatttgaagtaaaagaaatgtttctggaagatattttaagaacaactggatatacaaacaaagaaatgttaaaatataaaaaggaaaaacagcaagaagagaaacaacaaaccacacttacagaatggtactcagctcaagaaaatagtttcaagcctgaatctcagaggcagagaactgttctaaatgtgactgatgagtatgacttactggatgatggtggtgatgctgtcttcagtcagctgactgaaaaagatgtgaattgccttgaaccatggttaataaaggaaatggatgcttgcctttctgatatatggctacataaagatattgatgcctttgctcaggtctttcatctcattttaactgaaaatgttagtgttgattacagacatagtgaaaccagtgcaacagctctgatggttgctgcaggacgtggctttgcaagtcaagtagaacagttaatcagtatgggagccaatgtccatagtaaagcatcaaatggctggatggcattggattgggctaaacactttgggcagactgaaattgtggatcttctagaatcttacagtgctacactggaatttggaaatctagatgaaagttctctggttcaaacaaatggaagtgacctcagtgctgaagacagagagctcctgaaagcttatcatcatagtttcgatgatgaaaaagtagacttggatttgatcatgcatcttctatacaatatctgccatagttgtgatgctggtgcagtactaatttttctgcctggatatgacgaaattgttggactgagagatcgcatcctgtttgatgacaagcggtttgctgacagtacacatagataccaagtctttatgcttcattcaaatatgcaaacatccgatcaaaagaaagtattaaaaaacccacctgcaggtgttcgaaaaataattctttccaccaatattgctgaaaccagcatcacagtcaatgatgttgtctttgttattgattctggtaaggtgaaagagaaatcctttgatgctctgaattttgttacaatgttaaaaatggtatggatttccaaagctagtgccatacagcggaaaggcagggcagggcgatgtagacctggaatttgttttcgtctgttcagtagactccgattccagaatatgttggaatttcagactccggaacttttgagaatgccattacaggaactttgcttacataccaagctgttagccccagttaattgtcccattgctgattttcttatgaaagctcctgaacctccaccagctttaattgtaagaaatgctgtacaaatgcttaagacaatagatgcaatggatacatgggaagatctgactgaacttgggtatcatttggctgacttgccagtagaaccacatcttggtaaaatggtcttgtgtgctgttgttttaaagtgtctggaccccatccttacaattgcttgcacactagcttatcgagatccttttgtactacctactcaggcctctcaaaaacgtgcagctatgctttgtaggaaacgttttactgcaggagctttcagtgaccatatggcacttctcagagcattccaggcctggcaaaaagcacgaagtgatgggtgggagcgagccttttgtgaaaagaattttctttcacaggctactatggaaataatcataggcatgagaacacagttgcttggtcaacttagagcatcaggttttgttagagcacgaggtggtggtgacattcgggacgttaacacaaactctgagaattgggctgtcgttaaagctgcattggtggcaggcatgtatcctaatttagtccacgtggacagagagaatctagtgttgacagggccaaaggagaaaaaagtacgatttcatcctgcttcagttctcagtcagcctcaatataaaaagattcctccagccaatggtcaagctgcagcaattaaggcactgcccacagattggcttatttatgatgaaatgaccagagcccatagaatagctaatattagatgttgttcagcagtgacgcctgtcactatattggtattctgtggaccagctagattggcaagtaatgctcttcaggaaccttcatcctttagagtggatggcattcccaatgacagtagtgatagtgaaatggaggacaaaactacagctaatttggcagccttgaaacttgatgagtggctccatttcacactggagccagaggcagctagtttattgctgcagctcagacagaagtggcatagcttatttttacgccgaatgagagctccatctaaaccttggtctcaagttgatgaagctaccataagagcaattatagctgttttaagcactgaagaacagtctgcaggtttacaacaaccatctgggattggccaaaggccaaggcctatgtcttcagaagagcttcctttggcctcatcttggaggtcaaataatagtaggaaaagttcagcagatactgaattttctgatgagtgtactactgcagaaagagtactgatgaaatctccatctccagcattacacccacctcagaagtacaaagatagaggaattttacatcctaaacgaggtactgaggaccgatcagatcagtcttctctgaaatctacagacagcagtagttacccaagtccttgtgctagtccttctcctccatcctcaggaaagggctcaaaatctccttcgccaagaccaaacatgcctgttcgatacttcataatgaagagtagcaatttgagaaaccttgaaatttctcaacagaagggtatctggtctacaactcctagtaatgaacggaagctaaatcgagccttttgggaaagcagcatagtttacttggtattttctgttcaaggatctggacatttccagggattttctaggatgtcttctgagattggaagggaaaagagtcaggactggggctctgctggactaggaggagtatttaaggtggagtggatacgaaaagaaagccttccctttcaatttgcacaccatttactcaatccatggaatgacaacaagaaagtgcagataagcagggatgggcaggaactagaacctctggttggtgaacagttgctccagttatgggaacgtcttcccttgggagaaaaaaacacaactgattgacactcagaactcttagctgtggaagaacatcatgcctatttataaccactgaatgcactgactttcaaaaactgaggtggggtgtgtgttacgaatgggctttttaacacttttagagtgttgctttagaactaccatcttcatatacaggagaaaggaagcatttaaatttttatagtgattatagagaatgattatatgatgtttgtaatgaataaaatagtagtttcatt

SEQ ID NO: 213370 - protein, 602 aa, Artificial Sequence
  derived and/or modified sequence
MAALAAAAKKVWSARRLLVLLFTPLALLPVVFALPPKEGRCLFVILLMAVYWCTEALPLSVTALLPIVLFPFMGILPSNKVCPQYFLDTNFLFLSGLIMASAIEEWNLHRRIALKILMLVGVQPARLILGMMVTTSFLSMWLSNTASTAMMLPIANAILKSLFGQKEVRKDPSQESEENTAAVRRNGLHTVPTEMQFLASTEAKDHPGETEVPLDLPADSRKEDEYRRNIWKGFLISIPYSASIGGTATLTGTAPNLILLGQLKSFFPQCDVVNFGSWFIFAFPLMLLFLLAGWLWISFLYGGLSFRGWRKNKSEIRTNAEDRARAVIREEYQNLGPIKFAEQAVFILFCMFAILLFTRDPKFIPGWASLFNPGFLSDAVTGVAIVTILFFFPSQRPSLKWWFDFKAPNTETEPLLTWKKAQETVPWNIILLLGGGFAMAKGCEESGLSVWIGGQLHPLENVPPALAVLLITVVIAFFTEFASNTATIIIFLPVLAELAIRLRVHPLYLMIPGTVGCSFAFMLPVSTPPNSIAFASGHLLVKDMVRTGLLMNLMGVLLLSLAMNTWAQTIFQLGTFPDWADMYSVNVTALPPTLANDTFRTL

SEQ ID NO: 213371 - protein, 555 aa, Artificial Sequence
  derived and/or modified sequence
MAVYWCTEALPLSVTALLPIVLFPFMGILPSNKVCPQYFLDTNFLFLSGLIMASAIEEWNLHRRIALKILMLVGVQPARLILGMMVTTSFLSMWLSNTASTAMMLPIANAILKSLFGQKEVRKDPSQESEENTAAVRRNGLHTVPTEMQFLASTEAKDHPGETEVPLDLPADSRKEDEYRRNIWKGFLISIPYSASIGGTATLTGTAPNLILLGQLKSFFPQCDVVNFGSWFIFAFPLMLLFLLAGWLWISFLYGGLSFRGWRKNKSEIRTNAEDRARAVIREEYQNLGPIKFAEQAVFILFCMFAILLFTRDPKFIPGWASLFNPGFLSDAVTGVAIVTILFFFPSQRPSLKWWFDFKAPNTETEPLLTWKKAQETVPWNIILLLGGGFAMAKGCEESGLSVWIGGQLHPLENVPPALAVLLITVVIAFFTEFASNTATIIIFLPVLAELAIRLRVHPLYLMIPGTVGCSFAFMLPVSTPPNSIAFASGHLLVKDMVRTGLLMNLMGVLLLSLAMNTWAQTIFQLGTFPDWADMYSVNVTALPPTLANDTFRTL

SEQ ID NO: 213372 - DNA, 1809 bp, Artificial Sequence
  derived and/or modified sequence
atggccgctctggcggctgcagccaaaaaagtgtggtcagccaggcgactgctcgtcctgctgttcacccctctggctcttcttcccgtggtattcgctttaccccccaaggagggacggtgtctattcgtcattctgctgatggccgtgtactggtgtaccgaagccctgcctctgagtgtaacagctctgcttccaatcgtattgttccccttcatgggtattcttccgagtaataaagtatgtccccagtattttttagacactaacttcctatttttgtctgggttgatcatggcctccgctatcgaggaatggaacctgcacaggcgcatcgcactcaaaatactgatgttggttggcgtgcaaccggctaggctcattctgggaatgatggttaccacttcctttctctctatgtggcttagcaatacagcctcaactgccatgatgcttcccatcgccaacgccattctgaaaagtctcttcggccagaaggaggtgaggaaggacccttcacaggaaagcgaggaaaacactgctgccgtgcggcgcaacggcctccacaccgtccccaccgaaatgcaattccttgccagcactgaagccaaggatcaccccggagaaacagaggtgcccctggacttaccagctgatagcagaaaagaggatgagtacagacgcaatatatggaaaggctttctgatctcaattccgtattctgcctcaatcgggggaaccgccaccctgaccggtacagctcctaatctgattctcctgggccagctgaaatccttcttcccacaatgcgatgtggtgaacttcggatcatggttcatctttgcatttcctctgatgttgctgtttcttctcgccggatggttgtggatttcttttttgtatggaggactcagtttccgggggtggaggaagaataagtccgagatccgtaccaatgccgaggaccgcgctcgcgctgtcattagagaagagtatcagaacctcggccctattaaattcgccgagcaggccgtgtttattctgttctgtatgtttgccattctcctattcacacgggacccaaaattcatccccggatgggcctccttattcaaccccggttttctgtcggatgccgtcacaggtgtggccatagtaactatactgttttttttcccctcacagcggccctccctgaagtggtggttcgactttaaggcgcctaacacagaaacagagcctctgttgacctggaagaaagcccaggagacagtcccctggaatatcattctactcctagggggaggattcgctatggctaaaggatgcgaggaatcgggactgtcagtctggataggcggccaactccacccattagaaaacgtgccccctgctctggcagtgctgttgatcactgtggttatcgccttctttacggagttcgctagcaacacggctacgattatcatattcctcccagtcctagccgaattggctatcaggcttagagtacatcctctatacctgatgatcccgggcactgttggttgtagttttgcgtttatgctcccagtgagcacacccccaaactccattgctttcgcctcagggcacttactggtaaaggacatggttaggaccgggttattgatgaatctgatgggcgtgctgctgttgtcactcgccatgaatacctgggcacagacaattttccagctgggtacattccccgactgggctgatatgtattcagtgaacgtgacggccctgccaccgacactggccaatgacaccttcagaacgctgtag

SEQ ID NO: 213373 - DNA, 1668 bp, Artificial Sequence
  derived and/or modified sequence
atggctgtgtattggtgcacagaagccctgcccctgtcagttaccgccctgctgccaattgtgctcttcccatttatggggattctgccctcaaataaggtatgtccccagtattttctagacactaacttcttgttccttagcgggctcatcatggccagcgcgatcgaggagtggaatctacaccggaggattgctctgaagatccttatgttggtgggcgttcaacccgcgagattgattctcggaatgatggttaccacaagtttcctgtcaatgtggcttagtaacaccgcatcaacagctatgatgctgcctatcgccaacgccatccttaaatctttgttcggacagaaggaggtccgcaaggacccctctcaggaatccgaggagaacacagctgcggttaggcgcaacggtttgcataccgtcccaacagagatgcagtttcttgcctcaactgaagccaaggaccatccaggagaaaccgaagtcccactggatttaccagctgactctaggaaagaagacgaatacaggcggaatatctggaaaggctttctgatcagcatcccttactccgcttccatcgggggcactgccacattgacaggaaccgcaccaaatctgattctgctcggacaactgaaaagcttctttcctcagtgcgacgtcgtgaacttcggaagctggttcatctttgcgttcccacttatgttgctattcctattagccggttggctctggatttcctttttgtatggtggactgagttttcgcggatggcggaagaataagagcgaaattcgaacgaacgccgaggatcgggccagagctgttattagagaggaatatcaaaacctcggtcccatcaagtttgccgaacaggcagtatttatccttttctgcatgtttgccatcctgctttttacaagagaccccaaattcatccccgggtgggcatctctctttaatcccggcttcctctcagacgctgtgacaggcgtggccattgtcacaatcctgttcttttttccatcgcaaagacctagtcttaagtggtggttcgatttcaaggctccaaatacagagactgaacccctgttaacgtggaagaaagcccaggagacagtcccttggaatatcatcctgctcctcggaggtggcttcgctatggcgaaaggttgtgaagaatcaggcttgagcgtgtggatcggtggacagctgcatcctctcgagaatgtgccacccgcgctggcagtccttttgatcacagtggtcatcgctttttttacggagtttgccagtaacacggcaacaattataattttcctcccagtgcttgccgagctcgccattagactgcgggtacatcctctatatctgatgatccctggaacggtgggctgctccttcgctttcatgttacctgtgtccacacctccgaacagcattgcattcgcatctggacatttgctggtcaaggacatggtccgtactggcctgttaatgaatctgatgggggtgctcctcttgagcctggcaatgaacacgtgggcccagacaatcttccagttaggtacattcccagattgggcggatatgtacagcgtgaatgtgacggcactgccacctacacttgcaaacgatacatttcgaaccctttag

SEQ ID NO: 213374 - DNA, 1668 bp, Artificial Sequence
  derived and/or modified sequence
atggccgtatattggtgcaccgaagccctgccgctgagcgtgacagccctgctcccgatcgtgctttttcctttcatggggattctccccagcaacaaggtttgccctcagtacttcctggataccaattttctgtttttatctggattaatcatggctagcgcgatcgaggagtggaatctgcatagaaggattgcgcttaaaatcttgatgctcgtaggcgtgcagcccgcccgtcttatattaggtatgatggtaaccacctccttcttgagtatgtggctgagtaacactgcttccaccgccatgatgttgcctatcgccaacgccatcttaaagtcccttttcggccaaaaagaagtgaggaaagaccccagccaagaaagtgaagaaaacaccgcggctgtcagacggaacggacttcataccgtaccgaccgaaatgcagtttcttgccagcaccgaggcaaaagaccacccaggggagacagaagtcccgttggacctccctgccgactcgcgcaaggaggacgaatatcgccggaatatctggaaagggtttctgatctctatcccatacagtgcctcaatcggcggcaccgcgacactcacaggcacagcaccaaatctgatacttcttggacagctgaagagcttctttccccaatgtgacgtggtaaacttcggatcctggtttatctttgctttccccttaatgctactgttccttctcgctgggtggctttggatatctttcctttacggtggcctgtctttccgtggctggcggaaaaataagtccgagattcgcactaacgcagaggatagggcccgcgcagtgattcgggaggagtaccagaatctagggccgatcaaatttgccgagcaggctgtcttcattttattttgcatgtttgcgatactcctcttcactagagacccaaagtttatccccggatgggcttccctgttcaatccaggattcctctccgatgcggtgactggggtcgctattgtcacaattctattcttttttcctagccaacgcccaagcttgaagtggtggtttgatttcaaggccccgaatactgagactgagccccttctgacgtggaagaaggcacaggagactgtgccatggaacatcatcctgttgctgggcggaggatttgccatggcaaaaggttgtgaggaatctggcttatccgtttggattggaggacagctgcatccccttgaaaacgtccctcctgccctagccgtgctactgattacggtggttatcgcattcttcaccgagtttgccagcaatacagcgaccattatcatcttcttgccagttctggccgagctcgcaatacgactacgtgtgcaccctctgtacctgatgatacccggaactgtggggtgttcctttgctttcatgctacctgttagcacccccccaaatagcatcgccttcgcctcaggacacctgcttgtgaaggatatggtgcggaccggtctgctcatgaatctgatgggagtgctgctcctgtccttggccatgaacacatgggctcagaccattttccagctcggcacctttccagattgggcagacatgtactcagtgaacgttaccgcactgcccccaaccttagctaatgatactttccgcactctgtag

SEQ ID NO: 213375 - DNA, 1809 bp, Artificial Sequence
  derived and/or modified sequence
atggccgccctggccgctgctgccaagaaggtgtggagcgcccggcggctgctggtgctgctcttcacccccctggccctgctgcctgtggtgtttgccctgccccccaaggagggccgctgcctgtttgtgatcctgctgatggctgtgtactggtgcacagaggccctgcccctgtctgtgacagccctgctgcccatcgtgctcttccccttcatgggcatcctgcccagcaacaaggtgtgcccccagtacttcctggacaccaacttcctgttcctgagcggcctcatcatggccagcgccatcgaggagtggaacctgcaccggcgcatcgccctgaagatcctgatgctggtgggcgtgcagcctgcccggctcatcctgggcatgatggtgaccaccagcttcctgtccatgtggctgagcaacacagccagcacagccatgatgctgcccatcgccaatgccatcctgaagagcctgtttggccagaaggaggtgaggaaggaccccagccaggagagcgaggagaacacagctgctgtgagaagaaatggcctgcacacagtgcccacagagatgcagttcctggccagcacagaggccaaggaccaccctggagaaacagaggtgcccctggacctgcctgctgacagcaggaaagaagatgagtacagaagaaacatctggaagggcttcctgatcagcatcccctacagcgccagcatcggcggcacagccaccctgactggaacagcccccaacctgatcctgctgggccagctgaagagcttcttcccccagtgtgatgtggtgaactttggctcctggttcatctttgccttccccctgatgctgctcttcctgctggccggctggctgtggatctccttcctgtatggaggcctgtccttccggggctggaggaagaacaagtctgagatccgcaccaatgcagaagatcgggcccgggccgtcatccgggaggagtaccagaacctgggccccatcaagtttgctgagcaggccgtgttcatcctcttctgcatgtttgccatcctgctcttcacccgggaccccaagttcatccctggctgggccagcctcttcaaccctggcttcctgagtgatgctgtgactggagtggccatcgtgaccatcctcttcttcttccccagccagaggcccagcctgaagtggtggtttgacttcaaggcccccaacacagaaacagagcccctgctgacctggaagaaggcccaggagaccgtgccctggaacatcatcctgctgctgggcggcggctttgccatggccaagggctgtgaggagagcggcctgtctgtgtggattggaggccagctgcaccccctggagaatgtgcccccagccctggccgtgctgctgatcaccgtggtgattgccttcttcacagaatttgccagcaacacagccaccatcatcatcttcctgcctgtgctggccgagctggccatccggctgcgggtgcaccccctgtacctgatgatccctggcaccgtgggctgcagctttgccttcatgctgcctgtgtccaccccacccaacagcatcgcctttgccagcggccacctgctggtgaaggacatggtgaggacaggcctgctgatgaacctgatgggcgtgctgctgctgagcctggccatgaacacctgggcccagaccatcttccagctgggcaccttcccagactgggccgacatgtacagcgtgaatgtgacagccctgccccccaccctggccaatgacaccttccgcaccctgtag

SEQ ID NO: 213376 - DNA, 1668 bp, Artificial Sequence
  derived and/or modified sequence
atggctgtgtactggtgcacagaggccctgcccctgtctgtgacagccctgctgcccatcgtgctcttccccttcatgggcatcctgcccagcaacaaggtgtgcccccagtacttcctggacaccaacttcctgttcctgagcggcctcatcatggccagcgccatcgaggagtggaacctgcacagaagaattgccctgaagatcctgatgctggtgggcgtgcagcctgcccggctcatcctgggcatgatggtgaccaccagcttcctgtccatgtggctgagcaacacagccagcacagccatgatgctgcccatcgccaatgccatcctgaagagcctgtttggccagaaggaggtgaggaaggaccccagccaggagagtgaagaaaatacagctgctgtgagaagaaatggcctgcacacagtgcccacagagatgcagttcctggccagcacagaggccaaggaccaccctggagaaacagaggtgcccctggacctgcctgctgacagcaggaaggaggatgagtacagaagaaacatctggaagggcttcctgatcagcatcccctacagcgccagcattggaggaacagccaccctgaccggcacagcccccaacctgatcctgctgggccagctgaagagcttcttcccccagtgtgatgtggtgaactttggctcctggttcatctttgccttccccctgatgctgctcttcctgctggccggctggctgtggatctccttcctgtatggaggcctgtccttccggggctggaggaagaacaagtctgagatccgcaccaatgctgaggaccgggcccgggctgtgatccgggaggagtaccagaacctgggccccatcaagtttgctgagcaggccgtgttcatcctcttctgcatgtttgccatcctgctcttcacccgggaccccaagttcatccctggctgggccagcctcttcaaccctggcttcctgagtgatgctgtgactggagtggccatcgtgaccatcctcttcttcttccccagccagaggcccagcctgaagtggtggtttgacttcaaggcccccaacacagaaacagagcccctgctgacctggaagaaggcccaggagaccgtgccctggaacatcatcctgctgctgggcggcggctttgccatggccaagggctgtgaggagagcggcctgtctgtgtggattggaggccagctgcaccccctggagaatgtgcccccagccctggccgtgctgctgatcaccgtggtgattgccttcttcacagaatttgccagcaacacagccaccatcatcatcttcctgcctgtgctggccgagctggccatccggctgcgggtgcaccccctgtacctgatgatccctggcaccgtgggctgcagctttgccttcatgctgcctgtgtccaccccacccaacagcatcgcctttgccagcggccacctgctggtgaaggacatggtgaggacaggcctgctgatgaacctgatgggcgtgctgctgctgagcctggccatgaacacctgggcccagaccatcttccagctgggcaccttcccagactgggccgacatgtacagcgtgaatgtgacagccctgccccccaccctggccaatgacaccttccgcaccctgtag

SEQ ID NO: 213377 - DNA, 1809 bp, Artificial Sequence
  derived and/or modified sequence
atggccgccctggccgccgccgccaagaaggtgtggagcgcccggcggctgctggtgcttctgtttacacctctcgcattgctgcctgtcgtgtttgctctcccacccaaagaaggacgatgtctttttgttattctgctcatggccgtctactggtgtaccgaggctctgcccttatcagtcacagccttgctgccaattgtgttattcccatttatgggcatcctgcctagcaacaaagtttgcccacagtacttcctggacactaatttcctgtttctgtccggtctgatcatggcatcagcgattgaggaatggaacctccaccgtagaatcgccctgaaaatcttgatgctggttggcgtgcagcctgcaagactgatcttgggaatgatggtgactacgtccttcctgagcatgtggctgagtaacactgctagtaccgcaatgatgctgcccattgctaacgctattctcaagtccctgttcgggcagaaagaggtgcgcaaagaccctagtcaggagtccgaggagaatacagctgccgtacgaaggaacggcctgcatactgtgccaacggagatgcagttcctggcgtcgaccgaggctaaggaccacccaggggagacagaggtccctctcgatctacccgccgactctcggaaggaggacgaataccggcggaacatttggaaaggcttcctgatcagcatcccttacagcgcaagcattggcggcaccgctacgttaaccggaactgcaccaaatttgatactgctggggcaactgaagagtttctttccccaatgcgacgtggttaattttggttcctggtttattttcgcatttccactgatgctcctcttccttttggccggctggctgtggatttcttttctgtatgggggactgagcttccgcggttggcgaaagaataaatcagaaatccggacaaatgctgaggaccgagctagagctgtgattagagaggagtatcaaaacctaggccctatcaaattcgcagaacaggcggtctttatcctgttttgcatgttcgctattttgctgttcacgcgagaccccaagttcattcccggctgggccagtctgtttaaccctggcttcctgtcagacgccgttaccggggtagctattgtcaccatactgttttttttcccctcccagcgccccagcctgaaatggtggttcgacttcaaggcacccaataccgaaactgagccgctcttaacatggaagaaggcccaggagacggtcccatggaacatcatactgctgttgggcggaggattcgccatggcaaaaggctgtgaggaatctggattgtctgtttggatcggaggccaattgcacccactggaaaacgtgcctcctgctcttgccgttctcttaataaccgtggtaattgccttcttcaccgagtttgctagcaatacagctaccatcattatttttctgcctgtcctggccgagttagccatccgcctgagagtccatcccttgtatctcatgatacccggcaccgttggctgttcctttgcctttatgctcccagtgtctacaccaccgaatagtattgcctttgcctcagggcacctgttggtgaaagatatggtacgcacaggccttctgatgaacttaatgggcgtcttactgttgtccttggccatgaacacttgggcccagacaatcttccagctcggaacattccccgattgggcagatatgtactccgtgaacgtgaccgcactgcctccaactttagccaatgacacctttaggaccctgtag

SEQ ID NO: 213378 - DNA, 1668 bp, Artificial Sequence
  derived and/or modified sequence
atggccgtgtactggtgcaccgaggccctgcccctgagcgtgaccgccttactgcctatcgtgctgtttccctttatggggattctgccatccaacaaagtgtgtccccagtactttctggacacaaacttcttgttcttgagtgggttgattatggcctctgccattgaagagtggaacctgcaccgacggatagcgttgaagatcctgatgctcgtgggggtgcagcccgccaggctgatcctgggaatgatggtgaccacatctttcctgagtatgtggctctccaacaccgcaagcaccgcaatgatgctgccaatcgccaacgccatactcaaaagcctgtttggacagaaagaggtgagaaaggatccctcccaggagagtgaggagaacacagctgcagttcgacgcaacggcctgcatactgtgcctacagaaatgcaattcctggcttcaaccgaagcaaaagatcatcctggcgagaccgaggtcccactcgacctgcctgcagacagtaggaaagaggacgaatatcgccgcaacatttggaaaggcttcctcatctccattccttactctgcatccatcggaggcacggcaaccttgactggtacagccccaaatctcattctgctcggccagctgaaatcttttttcccacaatgcgacgtcgtcaacttcggatcctggttcattttcgcattcccgctgatgcttctgtttcttctggccggctggctgtggattagtttcctttacggcgggctgtctttccgcggctggagaaaaaacaagagtgaaattcggacaaacgctgaggatagagcccgagcagtaattagagaagaatatcagaacttaggtccaatcaaattcgccgaacaagctgtctttattttattctgtatgtttgccattctattgttcaccagagatcccaagttcatccctgggtgggcgtccctattcaatcccgggttcctgagtgacgctgtcaccggagttgctatcgttaccattctgttcttctttccatctcagcggccaagcctgaaatggtggtttgactttaaagcacccaacaccgaaacagaaccactattgacatggaaaaaggctcaggagaccgttccatggaatatcatcttgctactcggggggggtttcgccatggcaaagggctgcgaggaaagcggactctccgtgtggatcggcggccagctgcatcccctggaaaatgtcccccctgcacttgccgtgctgttgattacagtagtaatcgccttctttacagaattcgctagcaacactgctacgataatcatcttccttcccgtgctggcagagctggccattcggctaagagtgcatcctctgtatctgatgatccctggtactgtgggctgcagctttgcgttcatgctcccagtctctacccctccaaactcgattgcctttgcttccggccatctgttagtcaaggatatggtgaggaccggtctgctgatgaatcttatgggggtcctgttgctgagcctggccatgaacacttgggctcagacaattttccagctcggtacctttccggactgggcagatatgtactcagtgaatgttactgcactcccacctacactagccaacgatactttcagaactctgtag

SEQ ID NO: 213379 - DNA, 1668 bp, Artificial Sequence
  derived and/or modified sequence
atggccgtgtactggtgcaccgaggccctgcccctgagcgtgaccgccttgctcccaatcgttttgttcccatttatgggtatattaccaagcaacaaggtctgtcctcagtacttcttggacacaaattttctttttctctctggcctgattatggcctcagccattgaagagtggaacctgcacagacgcatcgccttgaagatcctgatgctcgtgggggtgcagccagccagactgatcctcggtatgatggtgaccacatctttcctgtcaatgtggctgtccaacacagctagcaccgctatgatgctgcccatcgccaatgccattctcaagagtctgttcggccaaaaggaggtgcggaaagatccttcgcaggaaagcgaggagaatacagctgcagtcagaaggaacggcctgcacacagtccctaccgagatgcagtttctcgccagcaccgaggcaaaagatcacccaggagagacggaggtgcccctcgacctgcccgccgattccagaaaggaggacgaatatcgcaggaacatttggaaaggatttctgatttcaatcccttattccgcctccataggaggaacagcgaccctgacgggtaccgcaccaaatcttatccttctaggccaattgaaatcttttttcccccagtgcgatgtggtaaattttgggtcttggtttatttttgcgtttcctctgatgctgctgtttctgttagctggatggctatggatcagtttcctctatggcggactctcgtttagggggtggcggaaaaacaagtctgagatccgcactaatgctgaggatcgtgcccgtgcagtgatccgagaagagtaccagaatttggggccaattaagttcgccgagcaggcagtcttcatactcttttgcatgtttgccatactgctgtttaccagggatccaaagttcattccaggctgggcctccctgttcaatccagggttcctatcagacgctgtgactggagtggcaatcgtcaccatcctctttttcttccctagccagaggccctctctcaagtggtggttcgattttaaagcccctaatacggagacagaaccattgctaacctggaagaaagcacaggaaaccgtgccttggaacatcatcctattgcttggaggcggttttgccatggcgaaaggttgtgaggaaagtggactctccgtctggatcgggggacagctccacccactggagaacgtgcctcccgccctagctgtgctgctgatcactgtggtaattgctttcttcactgaatttgcctcaaatacggccactataattatatttttacccgtcttggccgagcttgcgataagactgagggtgcacccactgtacctaatgataccagggaccgtgggatgctcgtttgcttttatgctgccagttagcacaccaccgaactctattgcatttgctagtgggcatctgctggtgaaagacatggtgaggaccgggttgctgatgaatctgatgggtgtgctgttgctgtccctggctatgaatacctgggcgcagacaatattccagcttgggacatttcccgactgggctgacatgtactccgtgaatgtgactgcccttcctcccaccctcgcaaatgataccttcaggactttgtag

SEQ ID NO: 213380 - DNA, 1809 bp, Artificial Sequence
  derived and/or modified sequence
atggctgccttagctgccgctgcgaaaaaagtctggagcgccagaagattacttgtgttgctgttcacacccctagccctcctgcccgtcgtgttcgccctcccccctaaggagggaaggtgtctgttcgtcatactgttgatggcagtatattggtgtacggaggccttgccattgtcggttaccgcactgttgcccattgttctgttcccatttatgggcatcctcccatcaaacaaagtttgtcctcagtactttctagataccaattttctcttcctttccggccttatcatggcctccgccatagaagaatggaaccttcaccggcgtattgccctcaagatacttatgctggtgggggttcaaccggcaaggctgatcctggggatgatggtgactacaagtttcctttccatgtggttgtccaatacagcctcaacagccatgatgttaccgatagctaacgccattctaaaatccctctttggccagaaggaagtgcggaaagacccttcccaggagtcggaggagaacacagccgcagtgcggcgaaacggtcttcacactgttccaactgagatgcaattcctcgcttcaaccgaggcaaaagatcatcccggtgaaaccgaggtgcccttagacctccctgccgatagccgtaaggaggacgagtaccgccgtaatatctggaagggctttctgatctcaatcccctatagtgcgagtatcggtggcaccgctaccctgacgggtaccgcgcctaatctgatacttctcggccagcttaagtcattcttcccccagtgcgacgtggttaatttcggaagctggttcatattcgccttccccctcatgttgttgttccttctggctggctggttatggatctcattcctctacgggggactgtctttcagaggatggcggaagaataagagtgagatcagaactaacgcagaggatagagccagagcggtaatccgagaggaatatcaaaatttaggacccatcaaattcgccgagcaagctgtgtttatccttttttgcatgttcgctatactcttgttcactagggaccctaagtttatcccaggatgggcatccttattcaaccccggattcctgtccgacgccgtaaccggtgtcgccatcgtaaccatcctatttttttttccctcccagaggccaagtctgaaatggtggttcgatttcaaagcacccaacactgagaccgaaccacttctaacttggaaaaaagctcaggaaaccgtaccttggaatatcatcctgctgttaggcggaggatttgccatggcaaaagggtgcgaggagtccggcctgtccgtttggatcggcggacagctgcaccctctggagaacgttccacctgccctggcagtgctcctcattacagtcgtcatagccttctttacagagttcgcgtcaaatactgcaacaatcattatcttcctgccagtgctcgctgagctcgcaatacgtctgcgcgtgcacccactgtacctgatgattcctgggaccgtcggctgctcctttgctttcatgcttccagttagcactccgcctaacagtatagcgttcgccagtggacatcttctcgtgaaggacatggtccgtaccgggttgctcatgaacttgatgggggtgctcctcctttcattagctatgaatacatgggctcaaacgatattccagctgggaactttccctgactgggccgatatgtattccgtgaacgtgaccgcattgccgcctacactggcaaatgacacttttcgaaccctttag

SEQ ID NO: 213381 - DNA, 1668 bp, Artificial Sequence
  derived and/or modified sequence
atggctgtttattggtgcactgaggcccttcctctttctgtgactgcactgctgcctattgtccttttcccctttatggggattctgcctagtaacaaggtttgcccccaatacttcctggacaccaacttcttattcctctccggtctgatcatggcatctgctatcgaagagtggaacctgcataggcggattgcattgaaaatcttgatgttggtcggagtgcagccagcccgtctcattctgggcatgatggtaactacaagtttcctgtccatgtggttatccaacactgcttccacggcaatgatgctgcctatcgccaacgccatcctgaaatccctcttcggtcagaaagaggttcgcaaggaccctagtcaagaatccgaggagaataccgctgcagtccgcaggaacgggctgcatactgtcccgaccgagatgcaatttctggcttcaacagaggccaaggaccatccgggtgaaacagaggtcccactggacctgccagcagattcccgcaaagaagacgaatatcgcaggaacatttggaagggttttctcatatctattccatacagtgccagcattggcggtacagccactttgacgggaaccgctcccaacttgatcctcctaggccagctgaaatcgttcttcccccaatgcgacgtcgtgaactttggctcctggtttatcttcgcttttcctttgatgttgctctttctgctcgcaggatggctgtggatctcattcctgtatggcggactttcctttcgcggttggcgcaagaacaaatctgagataagaactaacgccgaggatcgcgctcgagcagtcattcgcgaagagtatcaaaacctgggacctattaagttcgcagagcaagccgtcttcattctcttctgcatgtttgctatcctgctgttcactagagaccctaaattcattcctggctgggcctctctcttcaatcccggtttcttgagtgacgcagtgaccggagtggctatcgtcactatactgttcttttttccctctcagcgcccttccctgaaatggtggttcgacttcaaggcaccaaatacagaaaccgagcccctgctgacatggaagaaagctcaggagaccgtcccctggaacatcatcctgctgctgggtggcggttttgcaatggccaaaggctgtgaggaatcaggcctttcggtttggatcggtggtcagcttcatcccttggagaatgtaccgcctgccctggccgtgctcctcatcacagtggtgattgcattttttactgaatttgcctcaaacactgccacaataatcatcttcctccctgtacttgccgagctcgccattcggctgcgagtgcatccactttacttaatgatacccggaaccgtgggctgcagctttgctttcatgttgcccgtgagtactccacccaatagcatcgcttttgcctccgggcaccttctcgttaaagacatggtcagaaccggcctgctgatgaatttaatgggcgtactccttctgagtctcgcaatgaatacttgggcgcagacgatctttcagttgggaacgtttcctgattgggctgacatgtattctgtcaacgtgacagcgctccctcctacccttgccaatgatacctttaggacactatag

SEQ ID NO: 213382 - DNA, 1668 bp, Artificial Sequence
  derived and/or modified sequence
atggctgtatactggtgcactgaggcactcccattgagtgttaccgccctgctgcctatagtgctgttcccgttcatgggtatcttgcctagcaataaggtgtgccctcaatactttctcgatactaactttctgttcctgagcggtctgatcatggcaagtgccattgaggaatggaatttgcatagaagaattgctttaaagatcctcatgttggtgggcgtgcaaccagccaggctgatcctgggaatgatggtgaccacgagtttcctgagcatgtggttgagtaacaccgcgagtactgccatgatgttgccgatcgccaacgcaatcctgaaaagtctgtttggacagaaagaagtccgcaaagacccttcccaggaaagtgaggaaaataccgccgcagtgaggcgcaacggactgcataccgtgcccaccgaaatgcaattcttagccagtaccgaagcaaaggatcatccaggggagaccgaagtccctttggatttacctgccgatagtcgtaaggaggacgaatatcgaaggaacatttggaagggatttctgatcagcatcccttattccgccagtatcggtggtacggccacgctgacagggaccgctcctaacctcatcctactagggcaactgaaaagtttctttccccaatgcgatgtcgtaaatttcgggtcttggttcattttcgccttcccgctgatgttgctgtttttactagccggatggctgtggatcagcttcttgtacggaggactgtccttccgaggatggcggaaaaataagagcgagattaggacgaacgctgaggatcgcgcacgagccgttatcagggaggagtatcagaatctgggcccaattaagtttgccgaacaggctgtgttcatcctcttttgcatgttcgctatcctgctgtttactagagaccctaagttcatccccggttgggcctcactgttcaatcccggatttttatccgatgcagtgaccggtgtggccatcgtgaccatcctgttttttttccctagccagaggccatctttaaagtggtggttcgactttaaagcccctaatacggaaacggagcccctcttgacttggaaaaaagctcaggaaacagtgccatggaatataattctgcttctgggcggtggctttgccatggccaaagggtgtgaggagtcaggtctcagcgtctggattgggggacagctccatccacttgaaaatgtgccgcctgcactggccgtcctgctcataacagttgtgattgctttttttacagaattcgccagcaacactgccactatcattatattccttccagtattggcagaacttgcgataaggctgcgggttcaccctctatacctcatgataccaggcaccgtgggctgcagctttgctttcatgctgcccgttagtacacctccaaactctattgcattcgcatccggacaccttctggtaaaggacatggtgcgcacaggtctcttaatgaatttaatgggggtccttctgctaagcctcgcgatgaacacatgggcccagactatctttcagttgggcacttttcccgattgggccgatatgtacagcgtgaatgtgacagcactccctcctacactggccaacgacacctttcgaaccctgtag

SEQ ID NO: 213383 - DNA, 4017 bp, Artificial Sequence
  derived and/or modified sequence
ccgccaggcgatcgcgctgatggcggcgctggcagcagcggccaagaaggtgtggagcgcgcggcggctgctggtgctgctgttcacgccgctcgcgctgctgccggtggtcttcgccctcccgcccaaggaaggccgctgcttgtttgtcatcctgctcatggcggtgtactggtgcacggaggccctgccgctctcagtgacggcgctgctgcccatcgtcctcttccccttcatgggcatcttgccctccaacaaggtctgcccccagtacttcctcgacaccaacttcctcttcctcagtgggctgatcatggccagcgccattgaggagtggaacctgcaccggcgaatcgccctcaagatcctgatgcttgttggagtccagccggccaggctcatcctggggatgatggtgaccacctcgttcttgtccatgtggctgagcaacaccgcctccactgccatgatgcttcccattgccaatgccatcctgaaaagtctctttggccagaaggaggttcgaaaggaccccagccaggagagtgaagagaacacagctgctgtgcggagaaacggcctacacactgtgcccacggagatgcagtttctcgccagcacagaagccaaagaccaccctggggagacagaggttccactggatctgccggctgactccaggaaggaggatgaatatcgtcggaacatctggaagggcttcctcatctccatcccctactcagccagtattgggggcacagccacactcacgggcacagcccctaacctcatcctgcttggccagctcaagagtttctttccgcagtgtgacgtggtgaatttcggctcctggttcattttcgccttccctcttatgctgttgttcctgttggcaggctggctctggatctccttcctgtacgggggactgagcttcaggggctggaggaagaataaatctgagataagaaccaatgcagaagatagggctcgagctgtaattcgggaagaataccagaacctggggcccatcaagtttgccgaacaggctgttttcatccttttctgcatgtttgccatcctcctcttcacccgggacccgaagttcatccctggctgggccagcctcttcaatcctgggtttctttctgatgctgtcaccggcgtggctattgtcaccatcttgttcttcttcccgtcccaaaggccctctctcaagtggtggtttgacttcaaagctcccaacacagagacagagcccttgctgacctggaagaaggcccaggagacagtgccctggaacatcatccttctcctgggagggggcttcgccatggccaaaggctgtgaggaatcggggctgtctgtatggattggtgggcagctgcaccccctggagaatgtgccccccgccctggctgtgctgctcatcactgtggtcatcgccttcttcactgagtttgccagcaacacggcgaccatcatcatcttcctgccggtcctggcagagctggccatccgcctgagagtgcaccccctgtatctgatgattccgggcacagtcggctgctcctttgccttcatgctcccggtctcaacgccccccaactccatcgccttcgcctctggacacttgctggtcaaagacatggtgcggacaggcctcctgatgaacctgatgggtgtcctgctgctcagtttggctatgaatacctgggcacagaccatcttccagctgggcaccttcccggactgggctgatatgtactcggtcaatgtcacagcattgccacccaccttggccaatgacacatttcggaccctctgagtccccctggaggactcccttgaggctgaaccctctcaaagggctgtcaccatcacctgctgctaggacactacaaaacaatcaaataattcttttctgtaatccaatatgcagcaagcaagggtgacctccagtggcccactcaagtccatgagccattatctaggatactttctctctctttcatgcagttcaaagcccaggtatctctcagatctgctgcctgagaaataagctcctttatcagttagctgttttatcattaggatacaagacagcccagtgtcatcaacagtgagcaaatctggcatggtgtttgtctcgtacagttgggataggaggccattcattcccatgggcacagctaacattatcccccagtgattactttcgattacactgaagagaccaccttgtctttaaagatcactttcctgggctgcaatgttccaacccagttgttccagctgttcacaaccagtgtgtgattttgcttagttggtgcccattctgcaccagttgttttacccctgccgataaccagcagtcagagattcttttttaatccttggagacagggaaagggacagatagctttccaaggacatgagactgtgcaaagcctctttgctgtttctctgggctcctgagcataccaggggaagttctagaaaccgcagctgacatctcgacccaagagatttaggattctcctgtttcatctgggtcagtttggccataattctggggtcaggccaggcctgggtcctgccctcccatggggtgactcatgacccctccagccaggactctcctacatgtggcccccataggcctctgtggctgcaaggcggtcagttgctgcttgtcccagcaggtggccttgatctctccatgccccaccttaagtggtaagcatgtttaattatcaaaggccccatttgtcaggggtgagagaaaagtcaaaagataaattggggccttgtaaaaggccagggtaaaatgtctcaggcaagcaaaagattgtccccttctgcatatgggtaaaactgagacgtccccgtgagcccgaggctggaagtggtgtctgccttcaagggttaatccctctttgttccaagcagaagcattctggcatcccagtgaagagctcaggccctcaggaagtgtctgctgaatggaatggcccagcattagcccagtattggaaaagacaccagcccaggggccctgactcgtcacacttccctttcctaagcctctgagggtggagattcccctaggagcgcttggccagctgggaaggcagcgcccagctgcacttgttgttgatacagcataagtgaatcatgggcatttccctgagagcagtgggagaggccctctgagttggaagttgagctccacctcctttccaagtgagcactcagtgttgaatcacagttacaacccactggggctggtgggagatgcgttgtatgggactggaagcaagaggttcattcaaagagaaactcatgggatttgtaaccagatgaatcatgatttctaagacttctgatcaaaaatactgtgaaataaagaatgttaatcaactttggacctggagatgatttgcctttctgaacataagagagcttcaaagccccaaattcctgggctggggattccacagagttgacctctctgattttctactgctcttccctcccctctccagctacatactctgcctcagggccttcgcatgtgctgttccctctgcctagaacactctctcccaagtatatgtctggttccccgactcactttattcaagtccctgctcaggtgtcaccttccctgagaggcttccctgacctcctgtctaaaatgtcaccctcattactctccacccccttactctgctataatttctccttaataggacactgtataacttattttcttattatcttcttctccctctagaatataaatttatgaaaatacaaatgttattttttttactgctgtaactccagttcctagaacaatttccagcacatagcaagtgttcagtaaatatttgctgcttgaatctgctccagaattaacaagaaagccatctcttcctctgatctggggtctgttttgttcattactttgttcactccttcttccatttattcattcaataaacatttatt

SEQ ID NO: 213384 - DNA, 3993 bp, Artificial Sequence
  derived and/or modified sequence
ggaagtggcactaaggtccaaaggaagctacatatgggtggtccctgctacaccagcctcccaagcctcccagtgcaccttctaggagacaagcaaggaaggccgctgcttgtttgtcatcctgctcatggcggtgtactggtgcacggaggccctgccgctctcagtgacggcgctgctgcccatcgtcctcttccccttcatgggcatcttgccctccaacaaggtctgcccccagtacttcctcgacaccaacttcctcttcctcagtgggctgatcatggccagcgccattgaggagtggaacctgcaccggcgaatcgccctcaagatcctgatgcttgttggagtccagccggccaggctcatcctggggatgatggtgaccacctcgttcttgtccatgtggctgagcaacaccgcctccactgccatgatgcttcccattgccaatgccatcctgaaaagtctctttggccagaaggaggttcgaaaggaccccagccaggagagtgaagagaacacagctgctgtgcggagaaacggcctacacactgtgcccacggagatgcagtttctcgccagcacagaagccaaagaccaccctggggagacagaggttccactggatctgccggctgactccaggaaggaggatgaatatcgtcggaacatctggaagggcttcctcatctccatcccctactcagccagtattgggggcacagccacactcacgggcacagcccctaacctcatcctgcttggccagctcaagagtttctttccgcagtgtgacgtggtgaatttcggctcctggttcattttcgccttccctcttatgctgttgttcctgttggcaggctggctctggatctccttcctgtacgggggactgagcttcaggggctggaggaagaataaatctgagataagaaccaatgcagaagatagggctcgagctgtaattcgggaagaataccagaacctggggcccatcaagtttgccgaacaggctgttttcatccttttctgcatgtttgccatcctcctcttcacccgggacccgaagttcatccctggctgggccagcctcttcaatcctgggtttctttctgatgctgtcaccggcgtggctattgtcaccatcttgttcttcttcccgtcccaaaggccctctctcaagtggtggtttgacttcaaagctcccaacacagagacagagcccttgctgacctggaagaaggcccaggagacagtgccctggaacatcatccttctcctgggagggggcttcgccatggccaaaggctgtgaggaatcggggctgtctgtatggattggtgggcagctgcaccccctggagaatgtgccccccgccctggctgtgctgctcatcactgtggtcatcgccttcttcactgagtttgccagcaacacggcgaccatcatcatcttcctgccggtcctggcagagctggccatccgcctgagagtgcaccccctgtatctgatgattccgggcacagtcggctgctcctttgccttcatgctcccggtctcaacgccccccaactccatcgccttcgcctctggacacttgctggtcaaagacatggtgcggacaggcctcctgatgaacctgatgggtgtcctgctgctcagtttggctatgaatacctgggcacagaccatcttccagctgggcaccttcccggactgggctgatatgtactcggtcaatgtcacagcattgccacccaccttggccaatgacacatttcggaccctctgagtccccctggaggactcccttgaggctgaaccctctcaaagggctgtcaccatcacctgctgctaggacactacaaaacaatcaaataattcttttctgtaatccaatatgcagcaagcaagggtgacctccagtggcccactcaagtccatgagccattatctaggatactttctctctctttcatgcagttcaaagcccaggtatctctcagatctgctgcctgagaaataagctcctttatcagttagctgttttatcattaggatacaagacagcccagtgtcatcaacagtgagcaaatctggcatggtgtttgtctcgtacagttgggataggaggccattcattcccatgggcacagctaacattatcccccagtgattactttcgattacactgaagagaccaccttgtctttaaagatcactttcctgggctgcaatgttccaacccagttgttccagctgttcacaaccagtgtgtgattttgcttagttggtgcccattctgcaccagttgttttacccctgccgataaccagcagtcagagattcttttttaatccttggagacagggaaagggacagatagctttccaaggacatgagactgtgcaaagcctctttgctgtttctctgggctcctgagcataccaggggaagttctagaaaccgcagctgacatctcgacccaagagatttaggattctcctgtttcatctgggtcagtttggccataattctggggtcaggccaggcctgggtcctgccctcccatggggtgactcatgacccctccagccaggactctcctacatgtggcccccataggcctctgtggctgcaaggcggtcagttgctgcttgtcccagcaggtggccttgatctctccatgccccaccttaagtggtaagcatgtttaattatcaaaggccccatttgtcaggggtgagagaaaagtcaaaagataaattggggccttgtaaaaggccagggtaaaatgtctcaggcaagcaaaagattgtccccttctgcatatgggtaaaactgagacgtccccgtgagcccgaggctggaagtggtgtctgccttcaagggttaatccctctttgttccaagcagaagcattctggcatcccagtgaagagctcaggccctcaggaagtgtctgctgaatggaatggcccagcattagcccagtattggaaaagacaccagcccaggggccctgactcgtcacacttccctttcctaagcctctgagggtggagattcccctaggagcgcttggccagctgggaaggcagcgcccagctgcacttgttgttgatacagcataagtgaatcatgggcatttccctgagagcagtgggagaggccctctgagttggaagttgagctccacctcctttccaagtgagcactcagtgttgaatcacagttacaacccactggggctggtgggagatgcgttgtatgggactggaagcaagaggttcattcaaagagaaactcatgggatttgtaaccagatgaatcatgatttctaagacttctgatcaaaaatactgtgaaataaagaatgttaatcaactttggacctggagatgatttgcctttctgaacataagagagcttcaaagccccaaattcctgggctggggattccacagagttgacctctctgattttctactgctcttccctcccctctccagctacatactctgcctcagggccttcgcatgtgctgttccctctgcctagaacactctctcccaagtatatgtctggttccccgactcactttattcaagtccctgctcaggtgtcaccttccctgagaggcttccctgacctcctgtctaaaatgtcaccctcattactctccacccccttactctgctataatttctccttaataggacactgtataacttattttcttattatcttcttctccctctagaatataaatttatgaaaatacaaatgttattttttttactgctgtaactccagttcctagaacaatttccagcacatagcaagtgttcagtaaatatttgctgcttgaatctgctccagaattaacaagaaagccatctcttcctctgatctggggtctgttttgttcattactttgttcactccttcttccatttattcattcaataaacatttattgggaacctg

SEQ ID NO: 213385 - DNA, 3940 bp, Artificial Sequence
  derived and/or modified sequence
agtcccgggccggcccgtaccgccaggcgatcgcgctgatggcggcgctggcagcagcggccaagaaggtgtggagcgcgcggcggctgctggtgctgctgttcacgccgctcgcgctgctgccggtggtcttcgccctcccgcccaaggaaggccgctgcttgtttgtcatcctgctcatggcggtgtactggtgcacggaggccctgccgctctcagtgacggcgctgctgcccatcgtcctcttccccttcatgggcatcttgccctccaacaaggtctgcccccagtacttcctcgacaccaacttcctcttcctcagtgggctgatcatggccagcgccattgaggagtggaacctgcaccggcgaatcgccctcaagatcctgatgcttgttggagtccagccggccaggctcatcctggggatgatggtgaccacctcgttcttgtccatgtggctgagcaacaccgcctccactgccatgatgcttcccattgccaatgccatcctgaaaagtctctttggccagaaggaggttcgaaaggaccccagccaggagagtgaagagaacacagctgctgtgcggagaaacggcctacacactgtgcccacggagatgcagtttctcgccagcacagaagccaaagaccaccctggggagacagaggttccactggatctgccggctgactccaggaaggaggatgaatatcgtcggaacatctggaagggcttcctcatctccatcccctactcagccagtattgggggcacagccacactcacgggcacagcccctaacctcatcctgcttggccagctcaagagtttctttccgcagtgtgacgtggtgaatttcggctcctggttcattttcgccttccctcttatgctgttgttcctgttggcaggctggctctggatctccttcctgtacgggggactgagcttcaggggctggaggaagaataaatctgagataagaaccaatgcagaagatagggctcgagctgtaattcgggaagaataccagaacctggggcccatcaagtttctttctgatgctgtcaccggcgtggctattgtcaccatcttgttcttcttcccgtcccaaaggccctctctcaagtggtggtttgacttcaaagctcccaacacagagacagagcccttgctgacctggaagaaggcccaggagacagtgccctggaacatcatccttctcctgggagggggcttcgccatggccaaaggctgtgaggaatcggggctgtctgtatggattggtgggcagctgcaccccctggagaatgtgccccccgccctggctgtgctgctcatcactgtggtcatcgccttcttcactgagtttgccagcaacacggcgaccatcatcatcttcctgccggtcctggcagagctggccatccgcctgagagtgcaccccctgtatctgatgattccgggcacagtcggctgctcctttgccttcatgctcccggtctcaacgccccccaactccatcgccttcgcctctggacacttgctggtcaaagacatggtgcggacaggcctcctgatgaacctgatgggtgtcctgctgctcagtttggctatgaatacctgggcacagaccatcttccagctgggcaccttcccggactgggctgatatgtactcggtcaatgtcacagcattgccacccaccttggccaatgacacatttcggaccctctgagtccccctggaggactcccttgaggctgaaccctctcaaagggctgtcaccatcacctgctgctaggacactacaaaacaatcaaataattcttttctgtaatccaatatgcagcaagcaagggtgacctccagtggcccactcaagtccatgagccattatctaggatactttctctctctttcatgcagttcaaagcccaggtatctctcagatctgctgcctgagaaataagctcctttatcagttagctgttttatcattaggatacaagacagcccagtgtcatcaacagtgagcaaatctggcatggtgtttgtctcgtacagttgggataggaggccattcattcccatgggcacagctaacattatcccccagtgattactttcgattacactgaagagaccaccttgtctttaaagatcactttcctgggctgcaatgttccaacccagttgttccagctgttcacaaccagtgtgtgattttgcttagttggtgcccattctgcaccagttgttttacccctgccgataaccagcagtcagagattcttttttaatccttggagacagggaaagggacagatagctttccaaggacatgagactgtgcaaagcctctttgctgtttctctgggctcctgagcataccaggggaagttctagaaaccgcagctgacatctcgacccaagagatttaggattctcctgtttcatctgggtcagtttggccataattctggggtcaggccaggcctgggtcctgccctcccatggggtgactcatgacccctccagccaggactctcctacatgtggcccccataggcctctgtggctgcaaggcggtcagttgctgcttgtcccagcaggtggccttgatctctccatgccccaccttaagtggtaagcatgtttaattatcaaaggccccatttgtcaggggtgagagaaaagtcaaaagataaattggggccttgtaaaaggccagggtaaaatgtctcaggcaagcaaaagattgtccccttctgcatatgggtaaaactgagacgtccccgtgagcccgaggctggaagtggtgtctgccttcaagggttaatccctctttgttccaagcagaagcattctggcatcccagtgaagagctcaggccctcaggaagtgtctgctgaatggaatggcccagcattagcccagtattggaaaagacaccagcccaggggccctgactcgtcacacttccctttcctaagcctctgagggtggagattcccctaggagcgcttggccagctgggaaggcagcgcccagctgcacttgttgttgatacagcataagtgaatcatgggcatttccctgagagcagtgggagaggccctctgagttggaagttgagctccacctcctttccaagtgagcactcagtgttgaatcacagttacaacccactggggctggtgggagatgcgttgtatgggactggaagcaagaggttcattcaaagagaaactcatgggatttgtaaccagatgaatcatgatttctaagacttctgatcaaaaatactgtgaaataaagaatgttaatcaactttggacctggagatgatttgcctttctgaacataagagagcttcaaagccccaaattcctgggctggggattccacagagttgacctctctgattttctactgctcttccctcccctctccagctacatactctgcctcagggccttcgcatgtgctgttccctctgcctagaacactctctcccaagtatatgtctggttccccgactcactttattcaagtccctgctcaggtgtcaccttccctgagaggcttccctgacctcctgtctaaaatgtcaccctcattactctccacccccttactctgctataatttctccttaataggacactgtataacttattttcttattatcttcttctccctctagaatataaatttatgaaaatacaaatgttattttttttactgctgtaactccagttcctagaacaatttccagcacatagcaagtgttcagtaaatatttgctgcttgaatctgctccagaattaacaagaaagccatctcttcctctgatctggggtctgttttgttcattactttgttcactccttcttccatttattcattcaataaacatttattgggaacctg

SEQ ID NO: 213386 - DNA, 3932 bp, Artificial Sequence
  derived and/or modified sequence
agtcccgggccggcccgtaccgccaggcgatcgcgctgatggcggcgctggcagcagcggccaagaaggtgtggagcgcgcggcggctgctggtgctgctgttcacgccgctcgcgctgctgccggtggtcttcgccctcccgcccaaggaaggccgctgcttgtttgtcatcctgctcatggcggtgtactggtgcacggaggccctgccgctctcagtgacggcgctgctgcccatcgtcctcttccccttcatgggcatcttgccctccaacaaggtctgcccccagtacttcctcgacaccaacttcctcttcctcagtgggctgatcatggccagcgccattgaggagtggaacctgcaccggcgaatcgccctcaagatcctgatgcttgttggagtccagccggccaggctcatcctggggatgatggtgaccacctcgttcttgtccatgtggctgagcaacaccgcctccactgccatgatgcttcccattgccaatgccatcctgaaaagtctctttggccagaaggaggttcgaaaggaccccagccaggagagtgaagagaacacagctgctgtgcggagaaacggcctacacactgtgcccacggagatgcagtttctcgccagcacagaagccaaagaccaccctggggagacagaggttccactggatctgccggctgactccaggaaggaggatgaatatcgtcggaacatctggaagggcttcctcatctccatcccctactcagccagtattgggggcacagccacactcacgggcacagcccctaacctcatcctgcttggccagctcaagagtttctttccgcagtgtgacgtggtgaatttcggctcctggttcattttcgccttccctcttatgctgttgttcctgttggcaggctggctctggatctccttcctgtacgggggactgagcttcaggggctggaggaagaataaatctgagataagaaccaatgcagaagatagggctcgagctgtaattcgggaagaataccagaacctggggcccatcaagtttgccgaacaggctgttttcatccttttctgcatgtttgccatcctcctcttcacccgggacccgaagttcatccctggctgggccagcctcttcaatcctgggtttctttctgatgctgtcaccggcgtggctattgtcaccatcttgttcttcttcccgtcccaaaggccctctctcaagtggtggtttgacttcaaaggaatcggggctgtctgtatggattggtgggcagctgcaccccctggagaatgtgccccccgccctggctgtgctgctcatcactgtggtcatcgccttcttcactgagtttgccagcaacacggcgaccatcatcatcttcctgccggtcctggcagagctggccatccgcctgagagtgcaccccctgtatctgatgattccgggcacagtcggctgctcctttgccttcatgctcccggtctcaacgccccccaactccatcgccttcgcctctggacacttgctggtcaaagacatggtgcggacaggcctcctgatgaacctgatgggtgtcctgctgctcagtttggctatgaatacctgggcacagaccatcttccagctgggcaccttcccggactgggctgatatgtactcggtcaatgtcacagcattgccacccaccttggccaatgacacatttcggaccctctgagtccccctggaggactcccttgaggctgaaccctctcaaagggctgtcaccatcacctgctgctaggacactacaaaacaatcaaataattcttttctgtaatccaatatgcagcaagcaagggtgacctccagtggcccactcaagtccatgagccattatctaggatactttctctctctttcatgcagttcaaagcccaggtatctctcagatctgctgcctgagaaataagctcctttatcagttagctgttttatcattaggatacaagacagcccagtgtcatcaacagtgagcaaatctggcatggtgtttgtctcgtacagttgggataggaggccattcattcccatgggcacagctaacattatcccccagtgattactttcgattacactgaagagaccaccttgtctttaaagatcactttcctgggctgcaatgttccaacccagttgttccagctgttcacaaccagtgtgtgattttgcttagttggtgcccattctgcaccagttgttttacccctgccgataaccagcagtcagagattcttttttaatccttggagacagggaaagggacagatagctttccaaggacatgagactgtgcaaagcctctttgctgtttctctgggctcctgagcataccaggggaagttctagaaaccgcagctgacatctcgacccaagagatttaggattctcctgtttcatctgggtcagtttggccataattctggggtcaggccaggcctgggtcctgccctcccatggggtgactcatgacccctccagccaggactctcctacatgtggcccccataggcctctgtggctgcaaggcggtcagttgctgcttgtcccagcaggtggccttgatctctccatgccccaccttaagtggtaagcatgtttaattatcaaaggccccatttgtcaggggtgagagaaaagtcaaaagataaattggggccttgtaaaaggccagggtaaaatgtctcaggcaagcaaaagattgtccccttctgcatatgggtaaaactgagacgtccccgtgagcccgaggctggaagtggtgtctgccttcaagggttaatccctctttgttccaagcagaagcattctggcatcccagtgaagagctcaggccctcaggaagtgtctgctgaatggaatggcccagcattagcccagtattggaaaagacaccagcccaggggccctgactcgtcacacttccctttcctaagcctctgagggtggagattcccctaggagcgcttggccagctgggaaggcagcgcccagctgcacttgttgttgatacagcataagtgaatcatgggcatttccctgagagcagtgggagaggccctctgagttggaagttgagctccacctcctttccaagtgagcactcagtgttgaatcacagttacaacccactggggctggtgggagatgcgttgtatgggactggaagcaagaggttcattcaaagagaaactcatgggatttgtaaccagatgaatcatgatttctaagacttctgatcaaaaatactgtgaaataaagaatgttaatcaactttggacctggagatgatttgcctttctgaacataagagagcttcaaagccccaaattcctgggctggggattccacagagttgacctctctgattttctactgctcttccctcccctctccagctacatactctgcctcagggccttcgcatgtgctgttccctctgcctagaacactctctcccaagtatatgtctggttccccgactcactttattcaagtccctgctcaggtgtcaccttccctgagaggcttccctgacctcctgtctaaaatgtcaccctcattactctccacccccttactctgctataatttctccttaataggacactgtataacttattttcttattatcttcttctccctctagaatataaatttatgaaaatacaaatgttattttttttactgctgtaactccagttcctagaacaatttccagcacatagcaagtgttcagtaaatatttgctgcttgaatctgctccagaattaacaagaaagccatctcttcctctgatctggggtctgttttgttcattactttgttcactccttcttccatttattcattcaataaacatttattgggaacctg

SEQ ID NO: 213387 - DNA, 1597 bp, Artificial Sequence
  derived and/or modified sequence
ttagccgggcatgatggcgggtgcctgtaatctcagctacttgggaggctgagataggagaatcgcttgaacccaggatgtggaggttgcagtgagccgagatcgccactgcactccagcctggacagggcactgggagtgtggcagggggcaattgggactcccttgttcccctggagtttaacctagtggtaaacactttcagacgacgaatcatgctatttggggattttgtacagggtgaggaagtggcactaaggtccaaaggaagctacatatgggtggtccctgctacaccagcctcccaagcctcccagtgcaccttctaggagacaagcaaggaaggccgctgcttgtttgtcatcctgctcatggcggtgtactggtgcacggaggccctgccgctctcagtgacggcgctgctgcccatcgtcctcttccccttcatgggcatcttgccctccaacaaggtctgcccccagtacttcctcgacaccaacttcctcttcctcagtgggctgatcatggccagcgccattgaggagtggaacctgcaccggcgaatcgccctcaagatcctgatgcttgttggagtccagccggccaggctcatcctggggatgatggtgaccacctcgttcttgtccatgtggctgagcaacaccgcctccactgccatgatgcttcccattgccaatgccatcctgaaaagtctctttggccagaaggaggttcgaaaggaccccagccaggagagtgaagagaacacagctgctgtgcggagaaacggcctacacactgtgcccacggagatgcagtttctcgccagcacagaagccaaagaccaccctggggagacagaggttccactggatctgccggctgactccaggaaggaggatgaatatcgtcggaacatctggaagggcttcctcatctccatcccctactcagccagtattgggggcacagccacactcacgggcacagcccctaacctcatcctgcttggccagctcaagagtttctttccgcagtgtgacgtggtgaatttcggctcctggttcattttcgccttccctcttatgctgttgttcctgttggcaggctggctctggatctccttcctgtacgggggactgagcttcaggggctggaggaagaataaatctgagataagaaccaatgcagaagatagggctcgagctgtaattcgggaagaataccagaacctggggcccatcaagtttgccgaacaggctgttttcatccttttctgcatgtttgccatcctcctcttcacccgggacccgaagttcatccctggctgggccagcctcttcaatcctgggtttctttctgatgctgtcaccggcgtggctattgtcaccatcttgttcttcttcccgtcccaaaggccctctctcaagtggtggtttgacttcaaagctcccaacacagagacagagcccttgctgacctggaagaaggcccaggagacagtgccctggaacatcatccttctcctgggagggggcttcgccatggccaaaggctgtgaggaatcggggctgtctgtatggattggtgggcagct

SEQ ID NO: 213388 - DNA, 1887 bp, Artificial Sequence
  derived and/or modified sequence
actgctgccctgagaacaagccggggcaggccctgccgcaggcctccttccccctctgcccccagcccaggcctccttccccctctgccctgagccctgggcctccttccccttctgccccgagccccgctgaccctctgagcatgcatctcctcctgcaggaaggccgctgcttgtttgtcatcctgctcatggcggtgtactggtgcacggaggccctgccgctctcagtgacggcgctgctgcccatcgtcctcttccccttcatgggcatcttgccctccaacaaggtctgcccccagtacttcctcgacaccaacttcctcttcctcagtgggctgatcatggccagcgccattgaggagtggaacctgcaccggcgaatcgccctcaagatcctgatgcttgttggagtccagccggccaggctcatcctggggatgatggtgaccacctcgttcttgtccatgtggctgagcaacaccgcctccactgccatgatgcttcccattgccaatgccatcctgaaaagtctctttggccagaaggaggttcgaaaggaccccagccaggagagtgaagagaacacagctgctgtgcggagaaacggcctacacactgtgcccacggagatgcagtttctcgccagcacagaagccaaagaccaccctggggagacagaggttccactggatctgccggctgactccaggaaggaggatgaatatcgtcggaacatctggaagggcttcctcatctccatcccctactcagccagtattgggggcacagccacactcacgggcacagcccctaacctcatcctgcttggccagctcaagagtttctttccgcagtgtgacgtggtgaatttcggctcctggttcattttcgccttccctcttatgctgttgttcctgttggcaggctggctctggatctccttcctgtacgggggactgagcttcaggggctggaggaagaataaatctgagataagaaccaatgcagaagatagggctcgagctgtaattcgggaagaataccagaacctggggcccatcaagtttgccgaacaggctgttttcatccttttctgcatgtttgccatcctcctcttcacccgggacccgaagttcatccctggctgggccagcctcttcaatcctgggtttctttctgatgctgtcaccggcgtggctattgtcaccatcttgttcttcttcccgtcccaaaggccctctctcaagtggtggtttgacttcaaagctcccaacacagagacagagcccttgctgacctggaagaaggcccaggagacagtgccctggaacatcatccttctcctgggagggggcttcgccatggccaaaggctgtgaggaatcggggctgtctgtatggattggtgggcagctgcaccccctggagaatgtgccccccgccctggctgtgctgctcatcactgtggtcatcgccttcttcactgagtttgccagcaacacggcgaccatcatcatcttcctgccggtcctggcagagctggccatccgcctgagagtgcaccccctgtatctgatgattccgggcacagtcggctgctcctttgccttcatgctcccggtctcaacgccccccaactccatcgccttcgcctctggacacttgctggtcaaagacatggtgcggacaggcctcctgatgaacctgatgggtgtcctgctgctcagtttggctatgaatacctgggcacagaccatcttccagctgggcaccttcccggactgggctgatatgtactcggtcaatgtcacagcattgccacccaccttggccaatgacacatttcggaccctctgagtccccctggaggactcccttgaggctg

SEQ ID NO: 213389 - DNA, 1809 bp, Artificial Sequence
  derived and/or modified sequence
atggccgccctggccgccgccgccaagaaggtgtggagcgccagaagactgctggtgctgctgttcacccccctggccctgctgcccgtggtgttcgccctgccccccaaggagggcagatgcctgttcgtgatcctgctgatggccgtgtactggtgcaccgaggccctgcccctgagcgtgaccgccctgctgcccatcgtgctgttccccttcatgggcatcctgcccagcaacaaggtgtgcccccagtacttcctggacaccaacttcctgttcctgagcggcctgatcatggccagcgccatcgaggagtggaacctgcacagaagaatcgccctgaagatcctgatgctggtgggcgtgcagcccgccagactgatcctgggcatgatggtgaccaccagcttcctgagcatgtggctgagcaacaccgccagcaccgccatgatgctgcccatcgccaacgccatcctgaagagcctgttcggccagaaggaggtgagaaaggaccccagccaggagagcgaggagaacaccgccgccgtgagaagaaacggcctgcacaccgtgcccaccgagatgcagttcctggccagcaccgaggccaaggaccaccccggcgagaccgaggtgcccctggacctgcccgccgacagcagaaaggaggacgagtacagaagaaacatctggaagggcttcctgatcagcatcccctacagcgccagcatcggcggcaccgccaccctgaccggcaccgcccccaacctgatcctgctgggccagctgaagagcttcttcccccagtgcgacgtggtgaacttcggcagctggttcatcttcgccttccccctgatgctgctgttcctgctggccggctggctgtggatcagcttcctgtacggcggcctgagcttcagaggctggagaaagaacaagagcgagatcagaaccaacgccgaggacagagccagagccgtgatcagagaggagtaccagaacctgggccccatcaagttcgccgagcaggccgtgttcatcctgttctgcatgttcgccatcctgctgttcaccagagaccccaagttcatccccggctgggccagcctgttcaaccccggcttcctgagcgacgccgtgaccggcgtggccatcgtgaccatcctgttcttcttccccagccagagacccagcctgaagtggtggttcgacttcaaggcccccaacaccgagaccgagcccctgctgacctggaagaaggcccaggagaccgtgccctggaacatcatcctgctgctgggcggcggcttcgccatggccaagggctgcgaggagagcggcctgagcgtgtggatcggcggccagctgcaccccctggagaacgtgccccccgccctggccgtgctgctgatcaccgtggtgatcgccttcttcaccgagttcgccagcaacaccgccaccatcatcatcttcctgcccgtgctggccgagctggccatcagactgagagtgcaccccctgtacctgatgatccccggcaccgtgggctgcagcttcgccttcatgctgcccgtgagcaccccccccaacagcatcgccttcgccagcggccacctgctggtgaaggacatggtgagaaccggcctgctgatgaacctgatgggcgtgctgctgctgagcctggccatgaacacctgggcccagaccatcttccagctgggcaccttccccgactgggccgacatgtacagcgtgaacgtgaccgccctgccccccaccctggccaacgacaccttcagaaccctgtag

SEQ ID NO: 213390 - DNA, 1668 bp, Artificial Sequence
  derived and/or modified sequence
atggccgtgtactggtgcaccgaggccctgcccctgagcgtgaccgccctgctgcccatcgtgctgttccccttcatgggcatcctgcccagcaacaaggtgtgcccccagtacttcctggacaccaacttcctgttcctgagcggcctgatcatggccagcgccatcgaggagtggaacctgcacagaagaatcgccctgaagatcctgatgctggtgggcgtgcagcccgccagactgatcctgggcatgatggtgaccaccagcttcctgagcatgtggctgagcaacaccgccagcaccgccatgatgctgcccatcgccaacgccatcctgaagagcctgttcggccagaaggaggtgagaaaggaccccagccaggagagcgaggagaacaccgccgccgtgagaagaaacggcctgcacaccgtgcccaccgagatgcagttcctggccagcaccgaggccaaggaccaccccggcgagaccgaggtgcccctggacctgcccgccgacagcagaaaggaggacgagtacagaagaaacatctggaagggcttcctgatcagcatcccctacagcgccagcatcggcggcaccgccaccctgaccggcaccgcccccaacctgatcctgctgggccagctgaagagcttcttcccccagtgcgacgtggtgaacttcggcagctggttcatcttcgccttccccctgatgctgctgttcctgctggccggctggctgtggatcagcttcctgtacggcggcctgagcttcagaggctggagaaagaacaagagcgagatcagaaccaacgccgaggacagagccagagccgtgatcagagaggagtaccagaacctgggccccatcaagttcgccgagcaggccgtgttcatcctgttctgcatgttcgccatcctgctgttcaccagagaccccaagttcatccccggctgggccagcctgttcaaccccggcttcctgagcgacgccgtgaccggcgtggccatcgtgaccatcctgttcttcttccccagccagagacccagcctgaagtggtggttcgacttcaaggcccccaacaccgagaccgagcccctgctgacctggaagaaggcccaggagaccgtgccctggaacatcatcctgctgctgggcggcggcttcgccatggccaagggctgcgaggagagcggcctgagcgtgtggatcggcggccagctgcaccccctggagaacgtgccccccgccctggccgtgctgctgatcaccgtggtgatcgccttcttcaccgagttcgccagcaacaccgccaccatcatcatcttcctgcccgtgctggccgagctggccatcagactgagagtgcaccccctgtacctgatgatccccggcaccgtgggctgcagcttcgccttcatgctgcccgtgagcaccccccccaacagcatcgccttcgccagcggccacctgctggtgaaggacatggtgagaaccggcctgctgatgaacctgatgggcgtgctgctgctgagcctggccatgaacacctgggcccagaccatcttccagctgggcaccttccccgactgggccgacatgtacagcgtgaacgtgaccgccctgccccccaccctggccaacgacaccttcagaaccctgtag

SEQ ID NO: 213391 - protein, 912 aa, Artificial Sequence
  derived and/or modified sequence
MSLPIGSAEVASERVELWRSGFRWWQRCLCFCRYRRVAMAAVDSDVESLPRGGFRCCLCHVTTANRPSLDAHLGGRKHRHLVELRAARKAQGLRSVFVSGFPRDVDSAQLSEYFLAFGPVASVVMDKDKGVFAIVEMGDVGAREAVLSQSQHSLGGHRLRVRPREQKEFQSPASKSPKGAAPDSHQLAKALAEAADVGAQMIKLVGLRELSEAERQLRSLVVALMQEVFTEFFPGCVVHPFGSSINSFDVHGCDLDLFLDLGDLEEPQPVPKAPESPSLDSALASPLDPQALACTPASPPDSQPPASPQDSEALDFETPSSSLAPQTPDSALASETLASPQSLPPASPLLEDREEGDLGKASELAETPKEEKAEGAAMLELVGSILRGCVPGVYRVQTVPSARRPVVKFCHRPSGLHGDVSLSNRLALHNSRFLSLCSELDGRVRPLVYTLRCWAQGRGLSGSGPLLSNYALTLLVIYFLQTRDPPVLPTVSQLTQKAGEGEQVEVDGWDCSFPRDASRLEPSINVEPLSSLLAQFFSCVSCWDLRGSLLSLREGQALPVAGGLPSNLWEGLRLGPLNLQDPFDLSHNVAANVTSRVAGRLQNCCRAAANYCRSLQYQRRSSRGRDWGLLPLLQPSSPSSLLSATPIPLPLAPFTQLTAALVQVFREALGCHIEQATKRTRSEGGGTGESSQGGTSKRLKVDGQKNCCEEGKEEQQGCAGDGGEDRVEEMVIEVGEMVQDWAMQSPGQPGDLPLTTGKHGAPGEEGQPSHAALAERGPKGHEAAQEWSQGEAGKGASLPSSASWRCALWHRVWQGRRRARRRLQQQTKEGAGGGAGTRAGWLATEAQVTQELKGLSGGEERPETEPLLSFVASVSPADRMLTVTPLQDPQGLFPDLHHFLQVFLPQAIRHLK

SEQ ID NO: 213392 - protein, 874 aa, Artificial Sequence
  derived and/or modified sequence
MAAVDSDVESLPRGGFRCCLCHVTTANRPSLDAHLGGRKHRHLVELRAARKAQGLRSVFVSGFPRDVDSAQLSEYFLAFGPVASVVMDKDKGVFAIVEMGDVGAREAVLSQSQHSLGGHRLRVRPREQKEFQSPASKSPKGAAPDSHQLAKALAEAADVGAQMIKLVGLRELSEAERQLRSLVVALMQEVFTEFFPGCVVHPFGSSINSFDVHGCDLDLFLDLGDLEEPQPVPKAPESPSLDSALASPLDPQALACTPASPPDSQPPASPQDSEALDFETPSSSLAPQTPDSALASETLASPQSLPPASPLLEDREEGDLGKASELAETPKEEKAEGAAMLELVGSILRGCVPGVYRVQTVPSARRPVVKFCHRPSGLHGDVSLSNRLALHNSRFLSLCSELDGRVRPLVYTLRCWAQGRGLSGSGPLLSNYALTLLVIYFLQTRDPPVLPTVSQLTQKAGEGEQVEVDGWDCSFPRDASRLEPSINVEPLSSLLAQFFSCVSCWDLRGSLLSLREGQALPVAGGLPSNLWEGLRLGPLNLQDPFDLSHNVAANVTSRVAGRLQNCCRAAANYCRSLQYQRRSSRGRDWGLLPLLQPSSPSSLLSATPIPLPLAPFTQLTAALVQVFREALGCHIEQATKRTRSEGGGTGESSQGGTSKRLKVDGQKNCCEEGKEEQQGCAGDGGEDRVEEMVIEVGEMVQDWAMQSPGQPGDLPLTTGKHGAPGEEGQPSHAALAERGPKGHEAAQEWSQGEAGKGASLPSSASWRCALWHRVWQGRRRARRRLQQQTKEGAGGGAGTRAGWLATEAQVTQELKGLSGGEERPETEPLLSFVASVSPADRMLTVTPLQDPQGLFPDLHHFLQVFLPQAIRHLK

SEQ ID NO: 213393 - DNA, 2739 bp, Artificial Sequence
  derived and/or modified sequence
atgtctctacccattgggtctgccgaagtagcgtccgagcgagtcgagctatggagatcaggcttcagatggtggcagaggtgcctgtgcttttgtaggtaccgtagggtcgcaatggcagcagtggatagcgacgtcgagtcccttcccagaggcgggttccggtgctgtttatgccatgtcacaactgctaaccgccccagtcttgacgcgcatctgggaggcaggaaacaccgacacttggtggagctgcgggcggcgaggaaagcccaaggactacggtctgtgttcgtcagcgggtttcctagggacgttgactcagcccagctgtctgaatactttctcgctttcggtcccgtcgcatcagtagtgatggacaaagataagggcgtgtttgccatcgttgaaatgggagatgtgggcgctcgtgaggctgttctctctcagtcccagcacagcttggggggccacagactcagagtgcggcctcgggagcaaaaagagtttcaaagtcccgcgtcaaagagtcccaagggggctgcgcctgactcccatcaactcgcaaaagcccttgcggaagccgccgacgtgggtgcccagatgattaagttagtgggtcttcgggagctaagtgaggctgagcggcaactcaggtctctcgtggtcgcgctgatgcaagaggtgtttacggagtttttccccggctgcgtggttcacccttttgggtcttctataaattcattcgacgtgcatgggtgtgacctcgacctgttcttggacctgggcgacctagaggaaccccagcccgttccaaaagcccccgagtctccgagtctcgacagtgcactagcctccccgcttgacccacaggctcttgcatgcacccccgcaagtccgccagactcacagccacctgctagccctcaggacagcgaagccctcgacttcgagacaccttcgtccagcctggcacctcagacccctgacagtgccctggcttcagaaactcttgcttcaccgcagtctctgccccctgctagccccctgctggaggaccgagaggaaggagatctgggcaaagcatcagaactggcagagactcccaaggaagagaaagctgaaggtgccgctatgttggagctcgttggctcaatcctgcgagggtgcgtccccggcgtctatagggtccagaccgtcccttccgcccgcaggcccgtggtgaaattttgtcataggccaagtggcctgcacggagacgttagcctgtctaatcgcctcgctctccataatagtaggtttctgagcttgtgctcggaacttgacggcagagtgcgcccattagtatacaccctccgctgttgggctcaaggccgtggattgtctggttcggggcctctcctgtccaattatgcacttaccctgcttgtgatttactttcttcaaacaagagatccgccagtcttgccaaccgtctcacagttgacccaaaaagctggggaaggggagcaggtagaggtggacggatgggactgtagttttccacgtgatgcaagccgattagagccgtccattaacgtggagcctctcagtagcttgctggcccagtttttctcttgtgtatcctgctgggacctgcgggggtctctgctgtccctccgcgagggtcaggcattacctgtggcagggggtctcccatctaatttgtgggagggcctacgtctcgggccactgaacctgcaggatccttttgacctgagccacaacgtggctgccaatgttacttctcgcgttgcaggaaggcttcagaactgctgcagggcggctgctaactactgcaggtccctgcaataccaacggcggagttctagaggacgcgactggggactgctgcccctactgcagcccagttctccctcctcattgctaagcgcaaccccaattccactgcccctggcgccatttactcagctgaccgccgccttggtgcaggttttcagagaagctcttggctgtcatatcgaacaggcaaccaaacgaacgcgctctgaagggggtgggaccggcgaaagcagccagggggggacgagcaaacgcctcaaggttgatggccagaagaactgctgcgaggagggtaaagaagagcagcagggctgcgccggagacggcggcgaggatcgggtggaggaaatggtaattgaagtgggggagatggtgcaggattgggccatgcaatcgcctgggcaacctggggacttgccactgaccaccggcaagcacggcgccccaggagaggaaggacagccttctcatgcagcattagcggagaggggccccaaaggtcatgaggcggcacaggaatggtctcagggggaggcaggcaagggggctagcttgcccagttctgcctcctggcggtgcgctttatggcatagagtctggcagggacggaggcgagcacgaaggcggctccaacaacagactaaggagggtgccggaggaggagcgggaacacgcgccgggtggctggctaccgaagctcaggttacacaagaacttaagggcctgtcgggaggtgaggaaagacccgagactgagcccctgctgagctttgtggcatccgtgtcacctgccgatcgcatgttaacagttacccccttacaggacccccaggggttgtttccggatctccaccactttctccaggtattcctcccacaggccatcagacatctgaaatag

SEQ ID NO: 213394 - DNA, 2625 bp, Artificial Sequence
  derived and/or modified sequence
atggccgccgtggacagtgatgtcgaaagtttaccgaggggaggctttcggtgctgtctttgtcacgtgacaacagcaaatcggccaagcctggatgcgcatctcggaggtcgcaagcatcgacacctcgttgagttgagagcggctcgtaaagcacaggggcttaggtctgtattcgtgagcggatttccacgagacgtggacagcgctcagctaagcgagtatttcctggcatttgggccggttgcctcagtcgtgatggataaggataagggggtatttgccattgtcgaaatgggcgatgttggagctcgcgaggctgtgctgtcccagtcacaacatagtttagggggccatcgtctgagagtcagaccgagggagcaaaaggaatttcagagtcctgcatctaagtcgcccaagggggcagcaccggattctcatcagctggctaaagccctcgccgaggctgctgatgttggggcccaaatgatcaaattggttggactgcgcgagctatctgaggccgaaaggcagctgaggtcactggtagtggccctcatgcaggaggtttttacggagtttttcccggggtgcgtagtccacccatttggctctagcatcaatagctttgatgtacacggctgtgacttggacctgtttcttgacctgggcgacctggaggagccgcagccagtgcctaaggcccccgaaagcccatcactcgattccgccctggcaagtccgctggaccctcaggctctggcgtgtactcccgcttctccccccgacagtcagccaccagcttctccccaggacagcgaagcactggatttcgaaaccccatcctcttcccttgcaccacagacacctgattccgcattggccagcgagactcttgcttctccccagtcccttccccccgcttccccattgttggaagaccgagaagagggggacctggggaaggcatccgaactcgcagagacaccgaaggaggaaaaggccgaaggagccgccatgctagaactggtgggtagcattctcagggggtgtgtccctggcgtgtatcgggttcagacagttccatccgctcgacgtcccgtcgttaagttctgccaccgccctagcggactgcacggtgatgtttccctgtccaaccggctggcacttcataattctcgctttttaagtctgtgttcagaattagacggcagagttagacctcttgtgtacacgctccgctgttgggcgcaagggagaggcctgagtggcagtggacctttgctgtctaattacgcactgaccctactggttatttattttttgcagaccagagaccccccggtcctgccaaccgtaagccaacttactcaaaaagctggcgaaggagaacaagtggaagtcgacgggtgggactgttccttcccacgagacgcctccagactcgagccaagtattaacgtggaaccattgtcaagcctactagctcagtttttttcttgtgtaagctgctgggatctgcggggctctttactgtctctgagagagggtcaggcattgcctgtggctggaggtcttccatccaatctgtgggagggcctgcgtttgggcccactcaacctgcaggacccattcgatctttctcacaatgtggctgcaaatgtgaccagccgtgtggccggacggctgcagaactgctgccgcgcagctgccaactattgtaggagcttgcagtatcagaggaggtctagccggggaagagattggggcctccttcctctgttgcaaccaagttccccgtcttccctcctctctgccacaccaattccgctccccctggctccctttacacaactgaccgccgctctcgtgcaagtgttccgtgaggctctcggttgccacatcgaacaggcaaccaaaagaacacgaagtgaggggggaggaacaggcgaatcttcacagggcggtacgtccaagagactgaaagtggacggccagaaaaattgctgcgaggaaggcaaagaagaacagcagggatgtgctggtgacgggggcgaggatagagtggaagaaatggtgattgaggtcggtgagatggtgcaggactgggcgatgcagagtccaggacagccaggagatttgcctcttactaccggtaagcatggagccccaggtgaggagggccagccctcccatgctgcactggcagagaggggtcccaagggccacgaggcagcacaagagtggtctcaaggtgaagccggcaagggcgcctcactgccgtcctcagcttcatggagatgcgccctgtggcaccgggtgtggcaggggcggcggcgggcgaggcgcagactccagcagcagaccaaagagggagctggcggcggcgctgggacccgggctggatggctcgcgactgaggcacaggttacacaggaacttaagggcctctcggggggggaagaacggcctgaaaccgaacccctgcttagttttgtggctagtgtgtcaccagcagacagaatgctcaccgtcactcctttacaggatccccaggggctgttccctgatctgcatcatttcctgcaagttttcctgcctcaggccattcgccacctcaagtag

SEQ ID NO: 213395 - DNA, 2739 bp, Artificial Sequence
  derived and/or modified sequence
atgagcctgcccatcggcagcgctgaggtggccagcgagcgggtggagctgtggaggagcggcttccgctggtggcagcgctgcctgtgcttctgccgctacagaagagtggccatggctgctgtggacagtgatgtggagagcctgccccggggcggcttccgctgctgcctgtgccacgtgaccacagccaaccggcccagcctggatgcccacctgggcggcaggaagcaccgccacctggtggagctgcgggccgccaggaaggcccagggcctgcggtctgtgtttgtgtctggcttccccagagatgtggacagcgcccagctgtctgagtacttcctggcctttggacctgtggcctctgtggtgatggacaaggacaagggcgtgtttgccatcgtggagatgggagatgtgggcgcccgggaggccgtgctgagccagagccagcacagcctgggcggccaccggctgcgggtgcggccccgggagcagaaggagttccagagccctgccagcaagagccccaagggggccgccccagacagccaccagctggccaaggccctggccgaggccgcagatgtgggcgcccagatgatcaagctggtgggcctgcgggagctgtctgaggccgagcggcagctgcggagcctggtggtggccctgatgcaggaggtgttcacagagttcttccctggctgtgtggtgcaccccttcggcagcagcatcaacagctttgatgtgcacggctgtgacctggacctcttcctggacctgggggacctggaggagccccagcctgtgcccaaggcccctgagagccccagcctggacagcgccctggccagccccctggacccccaggccctggcctgcaccccagccagccccccagacagccagcccccagccagcccccaggacagcgaggccctggactttgagacccccagcagcagcctggccccccagaccccagacagcgccctggccagcgagaccctggccagcccccagagcctgcccccagccagccccctgctggaggaccgggaggagggggacctgggcaaggccagcgagctggccgagacccccaaggaggagaaggccgagggcgccgccatgctggagctggtgggcagcatcctgcggggctgtgtgcctggggtgtacagagtgcagacagtgcccagcgcccggcggcctgtggtgaagttctgccaccggcccagcggcctgcatggagatgtgtccctgagcaaccggctggccctgcacaacagccgcttcctgagcctgtgcagcgagctggatggccgggtgcggcccctggtgtacaccctgcgctgctgggcccagggccggggcctgagcggcagcggccccctgctgagcaactatgccctgaccctgctggtgatctacttcctgcagacccgggacccccctgtgctgcccaccgtgtcccagctgacccagaaggccggggagggggagcaggtggaggtggatggctgggactgcagcttccccagagatgccagccggctggagcccagcatcaacgtggagcccctgagcagcctgctggcccagttcttcagctgtgtgtcctgctgggacctgcggggcagcctgctgagcctgcgggagggccaggccctgcctgtggccggcggcctgcccagcaacctgtgggagggcctgcggctgggccccctgaacctgcaggacccctttgacctgagccacaacgtggccgccaacgtgaccagccgggtggccggccgcctgcagaactgctgcagagctgctgccaactactgccgcagcctgcagtaccagaggaggagcagccggggccgggactggggcctgctgcccctgctgcagcccagcagccccagcagcctgctgagcgccacccccatccccctgcccctggcccccttcacccagctgacagctgccctggtgcaggtgttccgggaggccctgggctgccacatcgagcaggccaccaagaggaccaggtctgagggcggcggcactggagagagcagccagggcggcaccagcaagaggctgaaggtggatggccagaagaactgctgtgaggagggcaaggaggagcagcagggctgtgctggagatggaggagaggacagagtggaggagatggtgattgaggtgggggagatggtgcaggactgggccatgcagagccctggccagcccggggacctgcccctgaccaccgggaagcatggagcccctggagaggagggccagcccagccatgctgccctggccgagcggggccccaagggccatgaagctgcccaggagtggagccagggcgaggccggcaagggggccagcctgcccagcagcgcctcctggaggtgtgccctgtggcaccgggtgtggcagggcagaagaagagcccggcggcggctgcagcagcagaccaaggagggcgccggcggcggggccggcaccagggctggctggctggccacagaggcccaggtgacccaggagctgaagggcctgagcggcggggaggagaggcctgagacagagcccctgctgagctttgtggcctctgtgtccccagctgacaggatgctgactgtgacccccctgcaggacccccagggcctcttcccagacctgcaccacttcctgcaggtgttcctgccccaggccatccgccacctgaagtag

SEQ ID NO: 213396 - DNA, 2625 bp, Artificial Sequence
  derived and/or modified sequence
atggctgctgtggacagtgatgtggagagcctgccccggggcggcttccgctgctgcctgtgccacgtgaccacagccaaccggcccagcctggatgcccacctgggcggcaggaagcaccgccacctggtggagctgcgggccgccaggaaggcccagggcctgcggtctgtgtttgtgtctggcttccccagagatgtggacagcgcccagctgtctgagtacttcctggcctttggacctgtggcctctgtggtgatggacaaggacaagggcgtgtttgccatcgtggagatgggagatgtgggcgcccgggaggccgtgctgagccagagccagcacagcctgggcggccaccggctgcgggtgcggccccgggagcagaaggagttccagagccctgccagcaagagccccaagggggccgccccagacagccaccagctggccaaggccctggccgaggccgcagatgtgggcgcccagatgatcaagctggtgggcctgcgggagctgtctgaggccgagcggcagctgcggagcctggtggtggccctgatgcaggaggtgttcacagagttcttccctggctgtgtggtgcaccccttcggcagcagcatcaacagctttgatgtgcacggctgtgacctggacctcttcctggacctgggggacctggaggagccccagcctgtgcccaaggcccctgagagccccagcctggacagcgccctggccagccccctggacccccaggccctggcctgcaccccagccagccccccagacagccagcccccagccagcccccaggacagcgaggccctggactttgagacccccagcagcagcctggccccccagaccccagacagcgccctggccagcgagaccctggccagcccccagagcctgcccccagccagccccctgctggaggaccgggaggagggggacctgggcaaggccagcgagctggccgagacccccaaggaggagaaggccgagggcgccgccatgctggagctggtgggcagcatcctgcggggctgtgtgcctggggtgtacagagtgcagacagtgcccagcgcccggcggcctgtggtgaagttctgccaccggcccagcggcctgcatggagatgtgtccctgagcaaccggctggccctgcacaacagccgcttcctgagcctgtgcagcgagctggatggccgggtgcggcccctggtgtacaccctgcgctgctgggcccagggccggggcctgagcggcagcggccccctgctgagcaactatgccctgaccctgctggtgatctacttcctgcagacccgggacccccctgtgctgcccaccgtgtcccagctgacccagaaggccggggagggggagcaggtggaggtggatggctgggactgcagcttccccagagatgccagccggctggagcccagcatcaacgtggagcccctgagcagcctgctggcccagttcttcagctgtgtgtcctgctgggacctgcggggcagcctgctgagcctgcgggagggccaggccctgcctgtggccggcggcctgcccagcaacctgtgggagggcctgcggctgggccccctgaacctgcaggacccctttgacctgagccacaacgtggccgccaacgtgaccagccgggtggccggccgcctgcagaactgctgcagagctgctgccaactactgccgcagcctgcagtaccagaggaggagcagccggggccgggactggggcctgctgcccctgctgcagcccagcagccccagcagcctgctgagcgccacccccatccccctgcccctggcccccttcacccagctgacagctgccctggtgcaggtgttccgggaggccctgggctgccacatcgagcaggccaccaagaggaccaggtctgagggcggcggcactggagagagcagccagggcggcaccagcaagaggctgaaggtggatggccagaagaactgctgtgaggagggcaaggaggagcagcagggctgtgctggagatggaggagaggacagagtggaggagatggtgattgaggtgggggagatggtgcaggactgggccatgcagagccctggccagcccggggacctgcccctgaccaccgggaagcatggagcccctggagaggagggccagcccagccatgctgccctggccgagcggggccccaagggccatgaagctgcccaggagtggagccagggcgaggccggcaagggggccagcctgcccagcagcgcctcctggaggtgtgccctgtggcaccgggtgtggcagggcagaagaagagcccggcggcggctgcagcagcagaccaaggagggcgccggcggcggggccggcaccagggctggctggctggccacagaggcccaggtgacccaggagctgaagggcctgagcggcggggaggagaggcctgagacagagcccctgctgagctttgtggcctctgtgtccccagctgacaggatgctgactgtgacccccctgcaggacccccagggcctcttcccagacctgcaccacttcctgcaggtgttcctgccccaggccatccgccacctgaagtag

SEQ ID NO: 213397 - DNA, 2739 bp, Artificial Sequence
  derived and/or modified sequence
atgagcctgcccatcggcagcgccgaggtggccagcgagcgggtggagctttggaggtcaggcttccggtggtggcaaagatgcttatgtttctgcaggtacaggcgcgtcgctatggctgctgtcgacagtgatgtcgagagtctgccacgcgggggcttccggtgctgtttgtgccacgtcactacagccaatcgtcctagcttggatgcgcatctgggtgggcggaaacataggcatttggtagagctaagggctgcgcgaaaagcacagggactgagatcagtgtttgtcagcggcttccctagagatgtcgactcggcccaactttccgaatacttccttgccttcggcccagtcgcctccgtggtgatggataaagataaaggggtgttcgccatcgtagagatgggagacgtcggagcccgggaagccgttctcagtcaaagccaacactctctgggtggacacagacttagggtaaggccacgcgagcagaaagagttccagtcacccgcttctaaatcacccaaaggcgccgctccggattcacaccagctcgccaaagctttggccgaggctgccgacgtgggcgcccaaatgatcaagctcgtgggactgagggagttatctgaagcagaacgacaattgcgttccctagtggttgcactcatgcaggaggtgttcactgagttcttccctggatgtgtagtacatcctttcgggagttctatcaatagcttcgacgtgcacggttgcgacttagatctcttcctcgatctgggtgacttggaggaaccacaacctgtaccaaaagcaccagaatccccctcactggatagcgcactggcctcaccattggatcctcaggcccttgcttgcacccccgcgagccctccagacagtcagcctcccgcgagccctcaggacagcgaagcgctcgactttgagacgccaagctctagtcttgctccccaaactcctgattccgccctcgcatcagaaaccctggcatctccacagtcactgccgccagcctctccgctgttagaagatagagaagagggagatctaggcaaggcatctgagctggctgagactcccaaagaggagaaggccgagggggccgctatgctggaactggtgggctccatactccgcggctgcgtgcccggcgtgtatcgagtacaaaccgtgccctccgcacgccgcccggtggttaagttctgccatcggccctccgggctacacggagacgtttccctgagcaatcgcctagccttgcacaacagccggttcctctccctttgcagcgaactggacgggagggtgagaccattggtgtacacactcagatgttgggcccagggccgagggttgtccggcagcggtccgttgctaagcaattatgcactgacgctcttagtaatatatttcctccagacacgagacccaccagtgctgcctacagtttctcagctgactcagaaagccggagaaggagaacaagttgaagtggatggctgggactgttcctttcctcgcgatgcctctagactggagccatcaatcaacgtcgaacccctctcctccctactggcgcagttctttagctgtgtctcatgctgggacctgaggggctcgctgctgagcttgcgagaaggccaggcactgccagtcgcaggcgggctgccaagtaatttatgggaagggttaaggctgggtcctctgaacctgcaggacccctttgacctcagccacaatgtggctgcaaatgtaacgagcagagtagcaggccgcctgcagaattgttgcagagctgccgccaattattgcaggtcactgcagtatcagcgcagatcttctcggggcagagactggggcttgctgccccttctccaaccgagttctccctcatctctccttagcgccaccccgatccctctgcctctcgcaccattcactcagttaaccgccgcgctggtgcaggtctttcgggaagctctgggatgccacatagagcaggcgaccaagaggacccgctctgaggggggcggcacaggcgaatcaagtcaggggggaacatcaaagagattaaaggtcgacggccagaagaactgttgtgaggagggtaaggaggagcagcaaggctgcgctggggacggaggggaggacagggtcgaggaaatggtcattgaggtcggggaaatggtgcaggactgggcaatgcagagccccggacagccaggggatttaccactcaccacagggaagcatggcgcgcctggagaggagggccagccatcccatgccgctctggccgagagggggcccaagggacacgaagctgcccaggagtggtcccaaggtgaggccggcaaaggagccagcctgccatctagtgcctcctggcgatgtgccctatggcaccgggtgtggcaggggcgaagacgggcacgaaggaggctgcagcagcagaccaaggaaggtgctgggggaggagctggtacccgagcaggatggctcgcaaccgaagcccaggtcacgcaagaactgaaaggcctctcaggtggagaagagcggcctgagactgagcccctgctttcatttgtggcttcagttagtcccgccgaccgaatgctgactgttactcctctgcaggacccccagggtctttttcctgatctgcaccattttctacaggtctttctgccccaagctattaggcacctgaagtag

SEQ ID NO: 213398 - DNA, 2625 bp, Artificial Sequence
  derived and/or modified sequence
atggccgccgtggacagcgacgtggagagcctgccccggggcggcttccggtgttgtctctgtcacgttacgacagctaaccggcctagccttgacgctcatctgggaggccgaaaacaccgacacctcgtcgaactccgggcagctcggaaggcccagggtttaaggagtgtattcgtgtcaggatttccacgcgacgtagatagcgcccagctgtccgagtacttcttggcgtttggacctgtagcctcagtggtcatggacaaggacaagggggtctttgccatcgttgagatgggcgatgtgggcgcacgtgaggccgtgctgagccagtcccagcactcactgggaggtcatcgtctgcgcgtccgacctagagaacagaaggagttccagtccccggctagtaaatcccccaaaggcgctgccccggactcacatcagctggcgaaggcacttgccgaagccgctgacgtgggcgcgcagatgatcaagctggtgggcctcagggagcttagcgaggctgaacgccaacttcgatcattggtggtcgctttgatgcaggaagtgttcaccgagttcttccctgggtgcgtcgtgcacccatttgggtccagtatcaactcatttgacgttcatggctgcgacttagacctcttcctcgatctcggcgatctggaagaaccccagcccgtgcccaaggctcctgagtctccctcgctggattccgccttggccagccctctggaccctcaggcactggcgtgcacaccggcctcgcccccagactctcagcctccggcgagccctcaggactcggaggcgctagacttcgaaacacctagctcctctctagctccccaaacacccgattcagcactggctagcgaaacattagcaagccctcaatctcttcctcctgccagtccattgctggaagaccgtgaggagggggacttgggcaaggctagcgaactggccgaaactcccaaggaggaaaaggctgagggcgccgctatgctagaactcgtgggctctatattgaggggatgtgtgcctggagtgtatagagtacaaaccgtgccttcagccaggaggcccgttgttaaattctgtcaccggccgagtggattacacggcgacgtgtcgctgtcaaaccgactggctctgcacaattctcggtttctgagcctctgcagcgaactcgacggtcgggtgcggcccctagtttacacattgcgctgttgggctcaaggaagggggttaagcggcagtggcccactgctgtcaaattacgcactcacactgcttgtcatctatttcctgcagactcgggacccaccagtccttccgacggtgtcgcagttgacacagaaggctggcgaaggcgaacaggtcgaggtagacggatgggattgctcgttcccccgcgacgcctcgaggctggaaccgtccatcaatgtggagcccctatcatccctgctcgcacagttcttctcttgtgtgtcctgctgggatctgcggggctcactgttaagccttcgggagggtcaagcattgccggtcgccgggggactgccatctaacctctgggagggtctacggctgggcccactgaacctccaggacccattcgacttatcacacaacgtggctgccaacgtgacatctagagtggctggaagacttcagaactgctgtcgcgccgccgccaattattgccgctcattacagtatcagagaaggtcctcccggggtagagattggggacttctgccattactccagccctcttcccctagcagtctgctgagtgccacgcctatccctttaccattggccccttttacccaactcacggccgcacttgtgcaggtgttcagggaggctcttggctgtcacattgagcaagctaccaaacgcacaaggtccgaggggggaggcaccggggagagctcacaagggggcacaagcaaacgcctaaaagtggatggccagaaaaactgttgtgaagagggaaaagaggagcagcagggatgcgcgggtgatggcggagaggatagagtcgaagagatggtgattgaggtgggcgaaatggtccaggactgggcaatgcagtcaccagggcagccgggggaccttcctctgaccactgggaagcacggcgctcccggagaagaaggccagccaagccacgccgcactagccgaaagggggcctaagggccacgaggccgcccaggaatggtctcaaggagaagcaggcaaaggagcttctctacccagctctgcctcctggcggtgtgcactttggcatagggtgtggcaggggaggaggagggctcgccgtcgtttacaacagcagactaaagaaggcgctggaggtggagcaggcacccgagccgggtggctagccacagaggcacaggttacacaggaactcaagggactgagtggaggcgaggaacgaccagagactgaacccttattaagctttgtcgcatccgtctcaccagcagatcgcatgctaacagtgacaccgttgcaggaccctcagggcctcttccctgacctgcatcactttctgcaggtcttcctcccccaagctatacgccatctcaaatag

SEQ ID NO: 213399 - DNA, 2826 bp, Artificial Sequence
  derived and/or modified sequence
gtttccggaggagtgtgtccgcgcaattgaacgactttatgtcacttcctatcggatcggcggaagttgcttccgagcgcgttgagctttggcgaagtgggttccggtggtggcagaggtgcttgtgtttttgtcggtacaggagagtcgctatggcggcggtggattcggatgtcgaatcgctgccgcgtggggggttccgctgctgcctctgccacgttactacagccaaccgacccagccttgatgcccacttgggaggcagaaagcaccggcacctggtagaactacgagctgcgagaaaggcccagggacttcgaagtgtgtttgtcagtggctttcccagggatgtggattctgctcagctctctgagtacttcctagcatttggacctgtggccagtgttgtcatggacaaggacaagggagtgtttgccattgtggagatgggggacgtgggtgctcgagaggctgtcttgtcacagtcccagcacagcctgggaggacatcgcctgcgtgtccgcccacgggagcagaaggagttccagagcccggcctccaaatcccccaaaggagcggcccccgacagtcaccagctggccaaagcgctagctgaggctgcagacgtgggggcacaaatgataaagcttgtggggctgagggagttgtccgaggccgagcggcagcttcgcagcctagtggtggccctgatgcaggaggtcttcacagagttcttccctggctgtgtggtccacccttttggctcttccataaatagcttcgatgtccatggctgtgatcttgacctcttcttggatctgggtgacttggaagagccccagccagtcccaaaggctccagaatctccatcgctggactcggccctggcttccccactggaccctcaagccctggcctgcaccccagcttcccctccagattcacaacctcctgcttctccccaggattctgaagccctggactttgaaaccccttcctcctccctggcgccccaaactccggactctgccttggcctccgagacccttgcttctccccagtctctgcctccagcttcaccactgctagaggacagggaagagggggacctggggaaggcctcggaactagcagagaccccaaaggaggagaaagcagagggggcagcaatgctggagctggtgggatccattctccggggctgtgtccctggggtgtatcgagtccaaactgtgccctctgcccggcgccctgtggtcaagttctgtcatcggccttcaggtctccacggtgatgtctccctcagtaaccggctggccctgcataactcccgtttcctgagtctctgctctgagctggatggtcgagtccggcccctcgtgtacaccctccgctgctgggctcagggtcgggggctgtcagggagtggcccccttctcagtaactacgccctgaccttgctggtgatctattttcttcagaccagggaccctcctgtgttgcccactgtgtcccagctcacccagaaagcaggagagggggaacaggtggaagtcgatggctgggactgcagtttccccagggatgcctcaagactggagcccagcataaatgtggagcccctcagttccctgctagcccagttcttctcctgtgtatcttgttgggatcttcgtggctccctgctgtccctgcgggagggtcaggcactgcctgtggcagggggcctgccttctaatctctgggagggtctgcgccttggccccctgaatctccaggacccttttgacctgagtcacaatgtcgcagccaatgtgaccagccgggtggctgggcgcctacagaactgctgccgagcagcagccaattactgccgaagcctccagtaccagcgccgttcctcccggggtcgggactgggggctgctccctcttctgcagcccagctcccccagctccctgctctctgctacgccgatccctttaccccttgcacccttcacccagctcactgctgccctggtgcaggtattcagggaagcactggggtgccatatagaacaggcaaccaagagaacgcggtcagaaggaggtggaactggggagtcctctcagggagggacaagcaaaagactcaaagtagatggacagaaaaactgctgtgaggaggggaaagaggagcagcagggatgtgcaggggacggtggggaagacagggtagaagagatggttatagaggttggagagatggtgcaggactgggccatgcagagccctgggcagccaggggacctgcccctgaccactggaaagcatggagcccctggagaagaggggcagcccagccacgcagccctggcagagcgggggcccaagggacatgaggcagcccaagaatggtctcagggtgaggcagggaagggggcatccctgccctcctcagcgagctggcgctgtgccttgtggcaccgagtgtggcaagggcggcggcgagcccgtagacgcttgcagcagcaaaccaaggagggagctggaggtggcgctggcacaagagcagggtggctggcgactgaggctcaggtcacccaggagctgaaaggactgagtggtggcgaagagaggccagaaactgagcccctgctgagctttgtggcgtctgtctccccggctgaccgaatgctcactgtgaccccgctccaggatccccaaggcctgttccctgatctccatcatttcttacaggttttcctccctcaagcaattcgacatctcaagtgaagacatggcccctgaagggcaataaagctgctagtttattaatacagtc

SEQ ID NO: 213400 - DNA, 3363 bp, Artificial Sequence
  derived and/or modified sequence
gaggtgcgccagtagctctggcgcctccggcgtacaccacgcagcccactactgcggaaggaatgggcctggctccaggacctcgtggagtccggaaggtgcccggtggtggcagagctccccaaccagggctagaagccgtcgcagaacacccgttttgcgggaggacagggggcggagggagggagtaacagccctgaaaaggttggaagtccagggacagccctgggctccgtggggcaaagaattggaagccgccgatcctccgcctttattcgtcgggtaaataagggtcgagggtacagacgcacgggtgtctactgcggggtgaaggagctgccgcaagatgccacccggcgccggcctttgtggctgctgtcatgaatattcacgatgctttgggccaatcaacgtctgaacagcttaaagcacaccaatcggcttaccgcatgcagataagcatcgtaacgcgccgcttttcctgaaacgggcggggactggacagcggctagaaacggaacccagagtcgaaggagcttggtttccggaggagtgtgtccgcgcaattgaacgactttatgtcacttcctatcggatcggcggaagttgcttccgagcgcgttgagctttggcgaagtgggttccggtggtggcagaggtgcttgtgtttttgtcggtacaggagagtcgctatggcggcggtggattcggatgtcgaatcgctgccgcgtggggggttccgctgctgcctctgccacgttactacagccaaccgacccagccttgatgcccacttgggaggcagaaagcaccggcacctggtagaactacgagctgcgagaaaggcccagggacttcgaagtgtgtttgtcagtggctttcccagggatgtggattctgctcagctctctgagtacttcctagcatttggacctgtggccagtgttgtcatggacaaggacaagggagtgtttgccattgtggagatgggggacgtgggtgctcgagaggctgtcttgtcacagtcccagcacagcctgggaggacatcgcctgcgtgtccgcccacgggagcagaaggagttccagagcccggcctccaaatcccccaaaggagcggcccccgacagtcaccagctggccaaagcgctagctgaggctgcagacgtgggggcacaaatgataaagcttgtggggctgagggagttgtccgaggccgagcggcagcttcgcagcctagtggtggccctgatgcaggaggtcttcacagagttcttccctggctgtgtggtccacccttttggctcttccataaatagcttcgatgtccatggctgtgatcttgacctcttcttggatctgggtgacttggaagagccccagccagtcccaaaggctccagaatctccatcgctggactcggccctggcttccccactggaccctcaagccctggcctgcaccccagcttcccctccagattcacaacctcctgcttctccccaggattctgaagccctggactttgaaaccccttcctcctccctggcgccccaaactccggactctgccttggcctccgagacccttgcttctccccagtctctgcctccagcttcaccactgctagaggacagggaagagggggacctggggaaggcctcggaactagcagagaccccaaaggaggagaaagcagagggggcagcaatgctggagctggtgggatccattctccggggctgtgtccctggggtgtatcgagtccaaactgtgccctctgcccggcgccctgtggtcaagttctgtcatcggccttcaggtctccacggtgatgtctccctcagtaaccggctggccctgcataactcccgtttcctgagtctctgctctgagctggatggtcgagtccggcccctcgtgtacaccctccgctgctgggctcagggtcgggggctgtcagggagtggcccccttctcagtaactacgccctgaccttgctggtgatctattttcttcagaccagggaccctcctgtgttgcccactgtgtcccagctcacccagaaagcaggagagggggaacaggtggaagtcgatggctgggactgcagtttccccagggatgcctcaagactggagcccagcataaatgtggagcccctcagttccctgctagcccagttcttctcctgtgtatcttgttgggatcttcgtggctccctgctgtccctgcgggagggtcaggcactgcctgtggcagggggcctgccttctaatctctgggagggtctgcgccttggccccctgaatctccaggacccttttgacctgagtcacaatgtcgcagccaatgtgaccagccgggtggctgggcgcctacagaactgctgccgagcagcagccaattactgccgaagcctccagtaccagcgccgttcctcccggggtcgggactgggggctgctccctcttctgcagcccagctcccccagctccctgctctctgctacgccgatccctttaccccttgcacccttcacccagctcactgctgccctggtgcaggtattcagggaagcactggggtgccatatagaacaggcaaccaagagaacgcggtcagaaggaggtggaactggggagtcctctcagggagggacaagcaaaagactcaaagtagatggacagaaaaactgctgtgaggaggggaaagaggagcagcagggatgtgcaggggacggtggggaagacagggtagaagagatggttatagaggttggagagatggtgcaggactgggccatgcagagccctgggcagccaggggacctgcccctgaccactggaaagcatggagcccctggagaagaggggcagcccagccacgcagccctggcagagcgggggcccaagggacatgaggcagcccaagaatggtctcagggtgaggcagggaagggggcatccctgccctcctcagcgagctggcgctgtgccttgtggcaccgagtgtggcaagggcggcggcgagcccgtagacgcttgcagcagcaaaccaaggagggagctggaggtggcgctggcacaagagcagggtggctggcgactgaggctcaggtcacccaggagctgaaaggactgagtggtggcgaagagaggccagaaactgagcccctgctgagctttgtggcgtctgtctccccggctgaccgaatgctcactgtgaccccgctccaggatccccaaggcctgttccctgatctccatcatttcttacaggttttcctccctcaagcaattcgacatctcaagtgaagacatggcccctgaagggcaataaagctgctagtttattaataca

SEQ ID NO: 213401 - DNA, 2739 bp, Artificial Sequence
  derived and/or modified sequence
atgtcactgccgatcggatccgcggaggtcgccagcgagcgagttgaactgtggcgctccggattccggtggtggcagcggtgtctctgtttttgcaggtaccgcagggtggccatggctgccgtagattctgatgtggagagcctccctcgtggtggatttcggtgttgtttatgccatgtgacaacagcaaatagacccagccttgacgcccacctcgggggacgcaagcacaggcacctagtggaactcagagctgctcgaaaagcccagggcctaaggtctgtctttgtgtctggtttccctagagacgtcgactcagctcagttgtccgaatactttcttgccttcggacccgttgcaagcgtggtgatggataaggataaaggagtgtttgccattgtagagatgggcgatgttggcgcacgcgaggccgtgctgagtcaatctcaacacagccttggcggtcatcggcttcgcgtgagaccaagggaacagaaggagtttcaaagtcccgcttctaaatccccaaagggcgctgccccagattcccaccagctggcaaaagcactagctgaggccgctgatgtgggagcgcagatgataaagctggtggggttaagggaacttagtgaggctgaacggcaattgaggtccttagtggtagcccttatgcaggaagtgttcacggaattttttcccggttgcgtggtgcatccattcggctcatccattaatagctttgacgtccacgggtgcgacctcgatctgttcctcgatctgggagacctggaggagccacaacccgtgccaaaggcacccgagagccccagcctggattcggcactagccagtcctctggatccacaggcactggcatgtacacccgcatctcctcctgattctcagccgcctgcttcccctcaggatagcgaagccctcgacttcgagaccccctcatccagtttggcccctcaaacccccgactctgcacttgctagcgaaaccctcgcctctccgcagtcactgccccctgcttcccccctccttgaggacagggaggaaggagacctcggtaaagcatcggagttagccgagacccccaaggaagagaaagctgagggggcagcgatgctggaactggtcgggtctatcctgcgcggttgcgtccccggagtgtacagggtgcaaactgtgccatcggcccgacggccagtggtgaagttctgccaccgaccatcagggttgcatggcgacgtttcactgtcaaatcggcttgcacttcacaacagccgtttcctatccctatgctccgaacttgatgggcgagtgaggcccctggtgtataccttaagatgctgggcccagggccgaggtctgtcgggaagcggaccactcctgtccaattatgcgctgacattgcttgttatctatttcctgcagaccagggatccgccagtcttgcccactgtgtcccagcttacccagaaagccggagaaggtgaacaggtggaggtcgacggctgggattgctcctttccaagggatgctagccgcctcgagcccagtatcaatgttgaacccttgtccagcctgctggcacagttcttctcctgcgtatcatgttgggatctgagaggctcacttctgtcattgagagagggccaggctctgccagtcgccggtggactgcccagcaatctgtgggaaggcttgcgactaggtcctctgaatcttcaagatccatttgacttgtcgcataacgtggctgccaacgtgacttcaagggtcgcaggacgactgcagaactgttgtagggctgcggctaattattgtaggtccctgcagtatcagcgcagatcctctaggggacgagattggggcctcctgccattgttgcagcccagttctccaagtagcttattaagtgctacacctattcccttgccactggccccatttacccaattgacagcggcactcgtacaagtgttcagagaggcactgggctgtcatatcgaacaagctacaaaaaggacccgatctgaaggaggaggtaccggcgaaagttcacagggtggcacctctaagcggcttaaggtagatggccagaagaattgctgcgaggagggcaaagaggaacagcagggctgcgccggtgatggtggcgaagacagggtcgaggagatggtgattgaggtcggcgagatggtccaagactgggccatgcagtccccgggacagcctggcgacttacccctgacaactggaaaacacggggcacctggagaggaaggacaaccatcccatgcagcgctggcagaaagggggccaaaaggccatgaagcggctcaggaatggtctcagggcgaggccggaaagggcgcaagcctgcctagcagcgcgagttggagatgtgccctgtggcacagggtttggcaagggcgtcggagagcgcgacgaagactgcagcaacaaactaaggaaggggcaggagggggagccggaacacgagctggatggctggccacagaggcacaggtcacacaagaactgaaggggctgtctggtggtgaggagagacctgaaactgagcctctgctgtcgttcgtggcgtcagtgtccccagcggaccgcatgctgaccgtcacaccacttcaggaccctcagggattattccctgatctgcaccactttctccaggtattcctgccacaggcaatccggcacctcaagtag

SEQ ID NO: 213402 - DNA, 2625 bp, Artificial Sequence
  derived and/or modified sequence
atggcggctgtcgacagtgatgtggagagccttcctagaggtgggtttcggtgttgtctatgccacgttactacggcaaaccggccttccttggacgcccacttgggcggaagaaaacatcggcacttggttgaattgcgggctgccaggaaagcgcaggggttgcgctcagtctttgtaagtggcttccccagggacgtggacagtgctcagctctccgagtattttctggcttttggaccagttgcgtctgtggtaatggacaaagacaagggggtgtttgccattgtggagatgggtgacgtgggcgcaagggaggccgtcttgtcccagagccagcattctctaggagggcataggcttcgcgtccggcctagagaacagaaggagttccagagtcctgctagcaaaagcccaaagggtgccgcacctgattcgcaccagctggccaaggcattagccgaggcagccgacgttggggcacagatgattaaacttgtagggctccgcgagctctcagaagctgagaggcagctgaggtcccttgtggtagcgttgatgcaagaggtgttcactgaattctttcccggatgtgtggtgcacccttttgggtcatccatcaactccttcgatgtgcacgggtgtgatctggacctctttcttgatctcggtgatctcgaggaacctcaacctgtcccaaaagctcccgaaagcccctccttagactcagccctggcatccccactagacccacaggctctggcatgcacccccgctagcccaccagacagccagcctccagccagcccccaggacagcgaggctctcgacttcgagaccccaagctcgtctttggcaccacagactccagatagcgccttggcctcagagaccctcgcatctccgcaatctttaccacccgcttcccctttgctcgaggatcgggaggagggcgatctgggcaaggcctctgagctggccgagacccctaaagaagagaaagctgaaggtgctgcaatgctcgagctagtagggtctatcttgaggggctgcgtgcccggagtataccgcgtgcaaacagtgcctagtgctaggagacccgtggtaaagttttgtcacagacctagtggcttacacggggacgttagtctttcaaataggctggcactacacaactctcggttcctaagcctttgcagtgagctcgacggacgtgtgagacctctggtctacacattaaggtgctgggcacaaggtaggggcttgtccgggagtggtccccttctttccaattacgccttgactctactagtgatttacttcttacaaactcgagatcctcctgtcctccccacagtctcacagctcacacagaaagccggagaaggagagcaagtcgaagtagacgggtgggactgctctttcccaagagacgcctcaagacttgaacctagtattaatgttgagcctctgtcgagtctacttgctcagtttttttcttgtgtaagctgctgggacctcagagggtcccttctcagtcttagggaaggacaggcactgcctgtggctggcggactaccctctaacctctgggaggggcttagactgggacccctaaacttgcaggatcccttcgacctctcccacaatgtcgcggcaaatgttacaagcagggtcgccggaaggctgcaaaactgttgtagggcagctgctaactattgcagaagccttcagtaccagagacgtagcagtagggggagagattggggcctgctgcctctgcttcagcccagctccccatcaagtttgctctcggcaacccctatccccctaccgttagcaccatttacgcagctgactgcagcgttagtgcaagtgttccgtgaggccctaggttgtcacatcgagcaggcaacaaagagaactcggtccgagggtggcggtacaggagagtcctcccagggtggtacttcaaagaggctcaaagtagatggacagaaaaactgttgcgaagagggtaaggaagaacagcagggatgtgcaggcgatggtggagaggacagggtggaggagatggttattgaggtcggggaaatggtacaagactgggcaatgcagagccctgggcagcccggtgatttgccactgacaacgggcaaacacggtgcacctggagaggaggggcagccatctcatgctgctttggcagaacgcggaccaaagggccatgaagcggcacaggaatggtcccagggggaggctggcaagggcgctagtctcccaagcagcgcaagttggcgatgcgcgttgtggcatcgtgtgtggcagggcagaagacgagcacggaggcgtctccagcagcagaccaaagagggagccggagggggtgcaggcacacgcgctgggtggctggccacagaggcccaggtcacccaggagctgaaaggactgagtgggggtgaagaaagacctgaaacagaacctctcctatccttcgttgccagtgttagcccagctgaccgcatgctgaccgtgacccccttgcaagatccacagggcctttttcccgacctgcatcactttctgcaggtgtttctcccacaggccatccgtcacctgaaatag

SEQ ID NO: 213403 - DNA, 2739 bp, Artificial Sequence
  derived and/or modified sequence
atgagcctgcccatcggcagcgccgaggtggccagcgagagagtggagctgtggagaagcggcttcagatggtggcagagatgcctgtgcttctgcagatacagaagagtggccatggccgccgtggacagcgacgtggagagcctgcccagaggcggcttcagatgctgcctgtgccacgtgaccaccgccaacagacccagcctggacgcccacctgggcggcagaaagcacagacacctggtggagctgagagccgccagaaaggcccagggcctgagaagcgtgttcgtgagcggcttccccagagacgtggacagcgcccagctgagcgagtacttcctggccttcggccccgtggccagcgtggtgatggacaaggacaagggcgtgttcgccatcgtggagatgggcgacgtgggcgccagagaggccgtgctgagccagagccagcacagcctgggcggccacagactgagagtgagacccagagagcagaaggagttccagagccccgccagcaagagccccaagggcgccgcccccgacagccaccagctggccaaggccctggccgaggccgccgacgtgggcgcccagatgatcaagctggtgggcctgagagagctgagcgaggccgagagacagctgagaagcctggtggtggccctgatgcaggaggtgttcaccgagttcttccccggctgcgtggtgcaccccttcggcagcagcatcaacagcttcgacgtgcacggctgcgacctggacctgttcctggacctgggcgacctggaggagccccagcccgtgcccaaggcccccgagagccccagcctggacagcgccctggccagccccctggacccccaggccctggcctgcacccccgccagcccccccgacagccagccccccgccagcccccaggacagcgaggccctggacttcgagacccccagcagcagcctggccccccagacccccgacagcgccctggccagcgagaccctggccagcccccagagcctgccccccgccagccccctgctggaggacagagaggagggcgacctgggcaaggccagcgagctggccgagacccccaaggaggagaaggccgagggcgccgccatgctggagctggtgggcagcatcctgagaggctgcgtgcccggcgtgtacagagtgcagaccgtgcccagcgccagaagacccgtggtgaagttctgccacagacccagcggcctgcacggcgacgtgagcctgagcaacagactggccctgcacaacagcagattcctgagcctgtgcagcgagctggacggcagagtgagacccctggtgtacaccctgagatgctgggcccagggcagaggcctgagcggcagcggccccctgctgagcaactacgccctgaccctgctggtgatctacttcctgcagaccagagacccccccgtgctgcccaccgtgagccagctgacccagaaggccggcgagggcgagcaggtggaggtggacggctgggactgcagcttccccagagacgccagcagactggagcccagcatcaacgtggagcccctgagcagcctgctggcccagttcttcagctgcgtgagctgctgggacctgagaggcagcctgctgagcctgagagagggccaggccctgcccgtggccggcggcctgcccagcaacctgtgggagggcctgagactgggccccctgaacctgcaggaccccttcgacctgagccacaacgtggccgccaacgtgaccagcagagtggccggcagactgcagaactgctgcagagccgccgccaactactgcagaagcctgcagtaccagagaagaagcagcagaggcagagactggggcctgctgcccctgctgcagcccagcagccccagcagcctgctgagcgccacccccatccccctgcccctggcccccttcacccagctgaccgccgccctggtgcaggtgttcagagaggccctgggctgccacatcgagcaggccaccaagagaaccagaagcgagggcggcggcaccggcgagagcagccagggcggcaccagcaagagactgaaggtggacggccagaagaactgctgcgaggagggcaaggaggagcagcagggctgcgccggcgacggcggcgaggacagagtggaggagatggtgatcgaggtgggcgagatggtgcaggactgggccatgcagagccccggccagcccggcgacctgcccctgaccaccggcaagcacggcgcccccggcgaggagggccagcccagccacgccgccctggccgagagaggccccaagggccacgaggccgcccaggagtggagccagggcgaggccggcaagggcgccagcctgcccagcagcgccagctggagatgcgccctgtggcacagagtgtggcagggcagaagaagagccagaagaagactgcagcagcagaccaaggagggcgccggcggcggcgccggcaccagagccggctggctggccaccgaggcccaggtgacccaggagctgaagggcctgagcggcggcgaggagagacccgagaccgagcccctgctgagcttcgtggccagcgtgagccccgccgacagaatgctgaccgtgacccccctgcaggacccccagggcctgttccccgacctgcaccacttcctgcaggtgttcctgccccaggccatcagacacctgaagtag

SEQ ID NO: 213404 - DNA, 2625 bp, Artificial Sequence
  derived and/or modified sequence
atggccgccgtggacagcgacgtggagagcctgcccagaggcggcttcagatgctgcctgtgccacgtgaccaccgccaacagacccagcctggacgcccacctgggcggcagaaagcacagacacctggtggagctgagagccgccagaaaggcccagggcctgagaagcgtgttcgtgagcggcttccccagagacgtggacagcgcccagctgagcgagtacttcctggccttcggccccgtggccagcgtggtgatggacaaggacaagggcgtgttcgccatcgtggagatgggcgacgtgggcgccagagaggccgtgctgagccagagccagcacagcctgggcggccacagactgagagtgagacccagagagcagaaggagttccagagccccgccagcaagagccccaagggcgccgcccccgacagccaccagctggccaaggccctggccgaggccgccgacgtgggcgcccagatgatcaagctggtgggcctgagagagctgagcgaggccgagagacagctgagaagcctggtggtggccctgatgcaggaggtgttcaccgagttcttccccggctgcgtggtgcaccccttcggcagcagcatcaacagcttcgacgtgcacggctgcgacctggacctgttcctggacctgggcgacctggaggagccccagcccgtgcccaaggcccccgagagccccagcctggacagcgccctggccagccccctggacccccaggccctggcctgcacccccgccagcccccccgacagccagccccccgccagcccccaggacagcgaggccctggacttcgagacccccagcagcagcctggccccccagacccccgacagcgccctggccagcgagaccctggccagcccccagagcctgccccccgccagccccctgctggaggacagagaggagggcgacctgggcaaggccagcgagctggccgagacccccaaggaggagaaggccgagggcgccgccatgctggagctggtgggcagcatcctgagaggctgcgtgcccggcgtgtacagagtgcagaccgtgcccagcgccagaagacccgtggtgaagttctgccacagacccagcggcctgcacggcgacgtgagcctgagcaacagactggccctgcacaacagcagattcctgagcctgtgcagcgagctggacggcagagtgagacccctggtgtacaccctgagatgctgggcccagggcagaggcctgagcggcagcggccccctgctgagcaactacgccctgaccctgctggtgatctacttcctgcagaccagagacccccccgtgctgcccaccgtgagccagctgacccagaaggccggcgagggcgagcaggtggaggtggacggctgggactgcagcttccccagagacgccagcagactggagcccagcatcaacgtggagcccctgagcagcctgctggcccagttcttcagctgcgtgagctgctgggacctgagaggcagcctgctgagcctgagagagggccaggccctgcccgtggccggcggcctgcccagcaacctgtgggagggcctgagactgggccccctgaacctgcaggaccccttcgacctgagccacaacgtggccgccaacgtgaccagcagagtggccggcagactgcagaactgctgcagagccgccgccaactactgcagaagcctgcagtaccagagaagaagcagcagaggcagagactggggcctgctgcccctgctgcagcccagcagccccagcagcctgctgagcgccacccccatccccctgcccctggcccccttcacccagctgaccgccgccctggtgcaggtgttcagagaggccctgggctgccacatcgagcaggccaccaagagaaccagaagcgagggcggcggcaccggcgagagcagccagggcggcaccagcaagagactgaaggtggacggccagaagaactgctgcgaggagggcaaggaggagcagcagggctgcgccggcgacggcggcgaggacagagtggaggagatggtgatcgaggtgggcgagatggtgcaggactgggccatgcagagccccggccagcccggcgacctgcccctgaccaccggcaagcacggcgcccccggcgaggagggccagcccagccacgccgccctggccgagagaggccccaagggccacgaggccgcccaggagtggagccagggcgaggccggcaagggcgccagcctgcccagcagcgccagctggagatgcgccctgtggcacagagtgtggcagggcagaagaagagccagaagaagactgcagcagcagaccaaggagggcgccggcggcggcgccggcaccagagccggctggctggccaccgaggcccaggtgacccaggagctgaagggcctgagcggcggcgaggagagacccgagaccgagcccctgctgagcttcgtggccagcgtgagccccgccgacagaatgctgaccgtgacccccctgcaggacccccagggcctgttccccgacctgcaccacttcctgcaggtgttcctgccccaggccatcagacacctgaagtag

SEQ ID NO: 213405 - protein, 306 aa, Artificial Sequence
  derived and/or modified sequence
MSEVTRSLLQRWGASFRRGADFDSWGQLVEAIDEYQILARHLQKEAQAQHNNSEFTEEQKKTIGKIATCLELRSAALQSTQSQEEFKLEDLKKLEPILKNILTYNKEFPFDVQPVPLRRILAPGEEENLEFEEDEEEGGAGAGSPDSFPARVPGTLLPRLPSEPGMTLLTIRIEKIGLKDAGQCIDPYITVSVKDLNGIDLTPVQDTPVASRKEDTYVHFNVDIELQKHVEKLTKGAAIFFEFKHYKPKKRFTSTKCFAFMEMDEIKPGPIVIELYKKPTDFKRKKLQLLTKKPLYLHLHQTLHKE

SEQ ID NO: 213406 - protein, 224 aa, Artificial Sequence
  derived and/or modified sequence
MSEVTRSLLQRWGASFRRGADFDSWGQLVEAIDEYQILARHLQKEAQAQHNNSEFTEEQKKTIGKIATCLELRSAALQSTQSQEEFKLEDLKKLEPILKNILTYNKEFPFDVQPVPLRRILAPGEEENLEFEEDEEEGGAGAGSPDSFPARVPGAAIFFEFKHYKPKKRFTSTKCFAFMEMDEIKPGPIVIELYKKPTDFKRKKLQLLTKKPLYLHLHQTLHKE

SEQ ID NO: 213407 - protein, 282 aa, Artificial Sequence
  derived and/or modified sequence
MIATEAVVRAAQGLARHLQKEAQAQHNNSEFTEEQKKTIGKIATCLELRSAALQSTQSQEEFKLEDLKKLEPILKNILTYNKEFPFDVQPVPLRRILAPGEEENLEFEEDEEEGGAGAGSPDSFPARVPGTLLPRLPSEPGMTLLTIRIEKIGLKDAGQCIDPYITVSVKDLNGIDLTPVQDTPVASRKEDTYVHFNVDIELQKHVEKLTKGAAIFFEFKHYKPKKRFTSTKCFAFMEMDEIKPGPIVIELYKKPTDFKRKKLQLLTKKPLYLHLHQTLHKE

SEQ ID NO: 213408 - DNA, 921 bp, Artificial Sequence
  derived and/or modified sequence
atgtccgaggttaccaggtcgctcctgcagcgctggggcgccagttttcgtagaggcgctgattttgactcctggggacagctggtggaggcaatagacgagtatcagatcctcgctaggcatttgcagaaagaagctcaggctcaacacaataactcagaattcaccgaggaacagaaaaagaccatcggtaagatcgcgacttgtctagagcttagatccgccgctttgcaaagcacgcagtcacaggaggaattcaaactggaggacttgaaaaagctcgagcctatcctgaaaaacatcttaacgtacaacaaagagtttccctttgatgtgcagcctgtccctctgagacgtatcctggcccctggcgaggaggagaacttggagttcgaagaagacgaggaggagggcggcgcgggtgctggttctcctgattccttcccggctagagtgcctggtacgctgctccctaggttaccctctgaaccaggcatgactctcctgaccataaggatagaaaagatcggcctcaaggatgctggtcaatgtattgatccttacattaccgtgtccgtcaaagatttgaatgggattgaccttacccctgtgcaagacaccccagtggctagccgaaaagaggatacttacgtgcacttcaacgtcgacattgaattacaaaagcacgtggaaaagctcacaaagggcgcagcaatttttttcgagttcaaacactacaaacctaagaaacgattcaccagcacaaaatgttttgctttcatggagatggacgaaatcaagccaggtcctatagtgattgagctctataaaaagccaactgatttcaaacggaagaagctgcagctcctcaccaaaaagccgctctacctgcacctgcaccagaccttgcataaggagtag

SEQ ID NO: 213409 - DNA, 675 bp, Artificial Sequence
  derived and/or modified sequence
atgtccgaagttacccgctccctccttcagcggtggggtgctagtttccgtcggggcgccgactttgattcatggggtcaactggtggaggccatagacgagtaccaaatcctggcacgacatctccagaaggaagcccaggcacaacataataacagtgagttcacggaagagcaaaaaaaaaccatcgggaagatagcaacttgtctcgagctgaggtccgccgcccttcagagcacccagtctcaggaagagtttaagctggaggatctgaagaagctcgaacccattttaaagaatatattaacctataataaagaattcccctttgacgttcagccggtgcccctgcgcagaatattggcgcctggagaggaagaaaatctcgagtttgaggaagatgaggaagagggtggcgccggggctgggtcacctgactcattccccgctcgggtgccgggagcagctatcttttttgagttcaagcattataagcctaaaaaacgattcactagtactaaatgctttgcgtttatggaaatggacgagatcaaaccaggacccatagtaattgagctgtacaaaaaacctaccgattttaagaggaagaagctgcagttgctgaccaaaaagcctctgtacctgcacctccaccagacactccataaagaatag

SEQ ID NO: 213410 - DNA, 849 bp, Artificial Sequence
  derived and/or modified sequence
atgatcgctaccgaagccgtcgtccgcgctgcccagggactggctcgtcaccttcaaaaagaggcacaggcccagcacaacaacagtgagtttaccgaagagcagaagaagacgataggaaaaatcgccacttgtctggagctacgctcagctgccttacaaagcacccaatcgcaggaagagttcaagctggaggatctcaagaagttagaacccattctgaagaatattctgacatataataaagagttccctttcgacgtgcagcccgtgccccttcgacgcatcctggctcctggtgaagaggagaatctcgagttcgaagaggacgaggaggaaggaggggccggcgccggttccccagacagctttccagcaagggtgcccggaactctgctaccccgcctcccctccgagcccggcatgacactcctgacaatccgcattgagaaaataggactgaaggacgcaggccagtgcattgacccttacataaccgtatcagtaaaggacttaaacggaattgacctgactcccgtccaggacacccctgtggcgtcacgcaaagaggacacatatgtgcacttcaatgttgacattgagcttcaaaagcacgtcgagaagctcactaagggcgccgccattttctttgaatttaaacattacaagccaaaaaaaaggtttactagcactaaatgtttcgctttcatggagatggatgaaatcaagcccggtccaattgttatcgagctgtacaaaaaacctaccgattttaagcgaaagaagcttcagcttctcaccaaaaagccactgtatttacatctgcatcagactttacacaaggagtag

SEQ ID NO: 213411 - DNA, 921 bp, Artificial Sequence
  derived and/or modified sequence
atgtctgaggtgaccaggagcctgctgcagcgctggggcgccagcttcagaagaggagctgactttgacagctggggccagctggtggaggccattgatgagtaccagatcctggcccggcacctgcagaaggaggcccaggcccagcacaacaacagcgagttcacagaggagcagaagaagaccatcggcaagatcgccacctgcctggagctgcggtctgctgccctgcagagcacccagagccaggaggagttcaagctggaggacctgaagaagctggagcccatcctgaagaacatcctgacctacaacaaggagttcccctttgatgtgcagcctgtgcccctgcggcgcatcctggcccctggagaggaggagaacctggagtttgaagaagatgaggaggagggcggggccggggccggcagcccagacagcttccctgcccgggtgcccggcaccctgctgccccggctgcccagcgagcccggcatgaccctgctgaccatcagaattgagaagattggcctgaaggatgctggccagtgcatcgacccctacatcaccgtgtctgtgaaggacctgaatggaattgacctgacccctgtgcaggacacccctgtggccagcaggaaggaggacacctacgtgcacttcaacgtggacatcgagctgcagaagcacgtggagaagctgaccaagggagctgccatcttctttgagttcaagcactacaagcccaagaagcgcttcaccagcaccaagtgctttgccttcatggagatggatgagatcaagccaggccccatcgtgattgagctgtacaagaagcccacagacttcaagaggaagaagctgcagctgctgaccaagaagcccctgtacctgcacctgcaccagaccctgcacaaggagtag

SEQ ID NO: 213412 - DNA, 675 bp, Artificial Sequence
  derived and/or modified sequence
atgtctgaggtgaccaggagcctgctgcagcgctggggcgccagcttcagaagaggagctgactttgacagctggggccagctggtggaggccattgatgagtaccagatcctggcccggcacctgcagaaggaggcccaggcccagcacaacaacagcgagttcacagaggagcagaagaagaccatcggcaagatcgccacctgcctggagctgcggtctgctgccctgcagagcacccagagccaggaggagttcaagctggaggacctgaagaagctggagcccatcctgaagaacatcctgacctacaacaaggagttcccctttgatgtgcagcctgtgcccctgcggcgcatcctggcccctggagaggaggagaacctggagtttgaagaagatgaggaggagggcggggccggggccggcagcccagacagcttccctgcccgggtgcctggagctgccatcttctttgagttcaagcactacaagcccaagaagcgcttcaccagcaccaagtgctttgccttcatggagatggatgagatcaagccaggccccatcgtgattgagctgtacaagaagcccacagacttcaagaggaagaagctgcagctgctgaccaagaagcccctgtacctgcacctgcaccagaccctgcacaaggagtag

SEQ ID NO: 213413 - DNA, 849 bp, Artificial Sequence
  derived and/or modified sequence
atgattgccacagaggccgtggtgcgggccgcccagggcctggcccggcacctgcagaaggaggcccaggcccagcacaacaacagcgagttcacagaggagcagaagaagaccatcggcaagatcgccacctgcctggagctgcggtctgctgccctgcagagcacccagagccaggaggagttcaagctggaggacctgaagaagctggagcccatcctgaagaacatcctgacctacaacaaggagttcccctttgatgtgcagcctgtgcccctgcggcgcatcctggcccctggagaggaggagaacctggagtttgaagaagatgaggaggagggcggggccggggccggcagcccagacagcttccctgcccgggtgcccggcaccctgctgccccggctgcccagcgagcccggcatgaccctgctgaccatcagaattgagaagattggcctgaaggatgctggccagtgcatcgacccctacatcaccgtgtctgtgaaggacctgaatggaattgacctgacccctgtgcaggacacccctgtggccagcaggaaggaggacacctacgtgcacttcaacgtggacatcgagctgcagaagcacgtggagaagctgaccaagggagctgccatcttctttgagttcaagcactacaagcccaagaagcgcttcaccagcaccaagtgctttgccttcatggagatggatgagatcaagccaggccccatcgtgattgagctgtacaagaagcccacagacttcaagaggaagaagctgcagctgctgaccaagaagcccctgtacctgcacctgcaccagaccctgcacaaggagtag

SEQ ID NO: 213414 - DNA, 921 bp, Artificial Sequence
  derived and/or modified sequence
atgagcgaggtgacccggagcctgctgcagcggtggggcgccagcttccgacgcggtgcggactttgatagttgggggcaactggtcgaggctattgatgaataccaaatacttgcccgacacctccagaaagaggcccaggctcaacacaacaactctgagttcaccgaggagcagaaaaagaccatcggaaaaattgctacttgtcttgagctgcgttccgccgccctccagagtacacaaagtcaagaggagttcaagcttgaggatctgaagaagctagaacctatcctgaagaatatcctcacttacaataaggaatttcctttcgacgttcagcctgtaccgctaaggcgcatactggccccaggggaggaggagaatcttgagttcgaagaggacgaggaagaaggaggggcgggtgctggcagccccgactccttccctgctcgggttcccggtaccctcctgcctagactgccctccgaaccaggcatgacactactgacaatcagaattgagaagatcggcctgaaggacgccggccagtgcatcgatccgtatattaccgtaagcgtaaaggacctcaatggcattgatcttactccagttcaggatacgcctgtggcttcccgcaaagaagatacatatgtgcattttaacgtggatattgaactccagaaacatgtggaaaaactgacaaagggtgccgcgatttttttcgagtttaagcattataaaccaaaaaagcggtttacttctacaaaatgttttgcttttatggagatggatgaaattaaacccggacccatcgtgatcgaactttataagaagccaacagattttaagcgtaagaaactccaacttctgactaagaagcccttatacctgcacctgcaccaaacactccataaggagtag

SEQ ID NO: 213415 - DNA, 675 bp, Artificial Sequence
  derived and/or modified sequence
atgagcgaggtgacccggagcctgctgcagcggtggggcgccagctttaggaggggtgcagacttcgactcatggggtcaactcgtggaagctatcgatgagtaccaaatcttagcccgacacctccagaaagaagcccaggcccagcacaataactccgaattcacagaggagcagaaaaagactattggtaaaattgctacctgcctggagctgcggtctgctgccctccagagtacccagtcccaggaggaatttaaacttgaggatctgaaaaaactcgaacccatcctgaaaaatattcttacctacaataaagagtttccattcgatgtgcagcctgtgccactgagacgaattcttgctcccggagaggaagaaaacctggagtttgaagaggatgaggaggagggaggagcaggagccggatctcccgattcctttccagcccgcgttcctggggccgcgatcttctttgaattcaagcactataaaccaaaaaaaagattcacaagcacgaagtgctttgcctttatggaaatggatgaaatcaaaccaggtccaatcgttatcgaactatacaaaaagcccaccgatttcaagcggaaaaagctgcagctgctcactaaaaagcccttatacctccacctgcaccagactctgcacaaggagtag

SEQ ID NO: 213416 - DNA, 849 bp, Artificial Sequence
  derived and/or modified sequence
atgatcgccaccgaggccgtggtgcgggccgcccagggcctggcccgtcatctccagaaggaggcccaggcccagcacaacaatagtgagtttacagaggagcagaagaaaacgatcggcaaaatcgctacctgcctggaactgcgctccgcggcacttcaaagcacacagagccaggaagaatttaagttagaagaccttaaaaagcttgaacccattcttaaaaatatcctgacctataataaagagttcccatttgatgtgcaaccggtcccattgcggagaattttagctcctggcgaagaggagaatctggagttcgaagaggatgaggaagaaggcggggcaggagcagggagcccagactccttccctgctcgtgtcccaggcacgctgttacccagattgccctccgagcccggcatgactctgctgaccattcggattgaaaagatcggcctcaaagacgccggccaatgcattgacccatacattaccgtaagtgtcaaggacctcaatggaatcgaccttacccccgtgcaggacacccctgttgcatcaaggaaagaggacacctatgttcatttcaacgtggatatcgaactgcaaaagcatgtggagaaactcacaaaaggggcggccatctttttcgagtttaagcattacaaacctaaaaagagattcacaagcactaaatgctttgcctttatggagatggatgaaattaaacccggccctatcgtgattgaactgtataaaaagcctacggacttcaagaggaagaagctccaattacttacgaaaaaacctctttatttgcatctgcaccagacgctccataaagagtag

SEQ ID NO: 213417 - DNA, 921 bp, Artificial Sequence
  derived and/or modified sequence
atgtctgaggtgacacggagcctgttgcagcgctggggtgcgtccttccggagaggcgctgatttcgactcatggggccagctcgttgaagctattgacgaataccagatactggctcgacatcttcagaaggaagcccaggcccagcacaacaactcggagtttacagaggagcagaagaaaacaataggaaagattgccacgtgtctggagctgcggagcgccgctctgcaaagcacacaaagtcaggaggagtttaaactggaagaccttaaaaaactggagccaatattgaagaacattctgacctacaataaagaatttccctttgatgtacaacctgtgcccctgagacggattttagctcccggagaggaagagaacctggaattcgaagaggatgaagaggaagggggtgcgggagccggttctcctgattccttcccagccagggtcccgggaaccctcctgcccagattgccttcagagccgggaatgacactgttaactatccgaatagagaaaatcggcctaaaggacgccggacaatgtatcgatccttacatcacagttagtgtgaaggatttgaacggaattgatctcactcctgtgcaggacacccctgttgcaagcagaaaagaagacacttacgttcatttcaatgtggacattgaactgcagaaacacgtggaaaagctgactaaaggagcagccatttttttcgagtttaaacattacaaacctaagaagcgctttaccagcactaaatgcttcgccttcatggaaatggatgaaatcaagcccggaccaattgttatcgagctatacaagaagcctactgactttaaacgtaagaagttgcagctcctgaccaagaaacctttatatttgcatctgcaccagacattacataaggagtag

SEQ ID NO: 213418 - DNA, 675 bp, Artificial Sequence
  derived and/or modified sequence
atgtcggaggtgaccaggagtttactccaacggtggggcgcaagctttcggagaggtgccgattttgacagttggggtcagctggtggaggccatagatgagtaccagatcctggctcgtcacctacagaaagaagcgcaggctcagcacaacaactcagagtttaccgaggagcagaaaaagaccataggcaaaattgccacgtgtctggaactgcggtctgcggcattacagtcaacacagtcacaggaggagttcaagctggaggaccttaagaaacttgagccaatcttgaagaacattctcacctataataaggagttcccattcgacgtacagcccgtgccactgaggcggattttagcccctggcgaagaagagaatctggaattcgaagaagatgaggaagagggaggggcaggggctggaagcccagactcttttcccgcaagggtacctggcgctgccatattcttcgagttcaagcactataaaccaaaaaagcgtttcacttccacaaaatgttttgctttcatggaaatggatgagattaaacccggtccaatagtgatcgagctctacaagaagccaaccgacttcaaaagaaagaaactgcagttgctgactaagaaacccttatatttgcacctgcaccagactctgcacaaggaatag

SEQ ID NO: 213419 - DNA, 849 bp, Artificial Sequence
  derived and/or modified sequence
atgatcgctacagaagctgtagttcgcgcagcccagggcctggcgaggcacctgcagaaggaggcgcaggctcagcacaacaatagcgaattcaccgaagaacaaaagaagacaatcggcaagatcgcaacctgcctggagttgcgaagtgctgcactgcagtccacacaatcacaggaggaattcaaactggaggacctcaaaaaacttgagcccatcttaaagaatattttgacctacaataaagagtttccatttgatgtacaaccagtgcccttgagacggattctggctcccggagaagaggagaaccttgaattcgaagaagacgaggaagagggcggagcaggcgctggcagccccgatagcttccccgcaagagtccctggaaccttgctacctcgcttaccgtctgaacccggtatgactctgctgaccattcgtatcgaaaagatcggactaaaggatgctggccagtgcatcgacccttatatcacagtgtctgtcaaggacctgaatggaattgacttgacccctgtccaggacacccccgtggcctcgcggaaagaagatacatacgtgcactttaacgtggatatcgagctccagaaacacgtggagaaactgacaaagggggcagccatttttttcgagttcaaacactataagcctaaaaagagattcactagtactaaatgctttgcattcatggaaatggacgagatcaaacccggacctatcgtgatcgagctgtacaagaagccaactgatttcaagcggaagaaactgcagttactgacaaagaaacctctgtatctgcatctgcaccaaactctccataaagaatag

SEQ ID NO: 213420 - DNA, 3008 bp, Artificial Sequence
  derived and/or modified sequence
cggggtctcggcggggcggtcgctttggagccgcaaagtttggctgtggcggcaaatgggcttgggcggctcctcggcgggtggcggtggtggccgtagcggttcctcctggccctgttaatgtcggggccaggccgggggaggatggcgccctagaacccggccttgctggggtaggggcgggaggggacggggtggggaccggccatgtcggaggtgacccggagtctgctgcagcgctggggcgccagttttaggagaggcgccgacttcgactcttggggccagctggtggaggcgatagacgagtatcagatattagcaagacatctacaaaaggaggcccaagctcaacacaataattctgaattcacagaagaacaaaagaaaaccataggcaaaattgcaacatgcttggaattgcgaagtgcagctttacagtccacacagtctcaagaagaatttaaactggaggacctgaagaagctagaaccaatcctaaagaatattcttacatataataaagaattcccatttgatgttcagcctgtcccattaagaagaattttggcacctggtgaagaagagaatttggaatttgaagaagatgaagaagagggtggtgctggagcagggtctcctgattcttttcctgctagagttcccggtactttattaccaaggttgccatcggaaccaggaatgacattactcactatcagaattgagaaaattggtttgaaagatgctgggcagtgcatcgatccctatattacagttagtgtaaaggatctgaatggcatagacttaactcctgtgcaagatactcctgtggcttcaagaaaagaagatacatatgttcattttaatgtggacattgagctccagaagcatgttgaaaaattaaccaaaggtgcagctatcttctttgaattcaaacactacaagcctaaaaaaaggtttaccagcaccaagtgttttgctttcatggagatggatgaaattaaacctgggccaattgtaatagaactatacaagaaacccactgactttaaaagaaagaaattgcaattattgaccaagaaaccactttatcttcatctacatcaaactttgcacaaggaatgatcctgacatgatgaacctggaacttctgtgaattttaccactcagtagaaaccatcatagctctgtgtagcatattcacccttcaacaggcaggaagcaagccgtacccagaccagtaggccggacggagtccaatgcaaagctgtaccacagaattcagagtccagcacatcacactgacgtataggactccttgggatacaggtttattgtagattttgaaacatgtttttacttttctattaattgtgcaattaatagtctattttctaatttaccactactcctaccctgcttcctggaacaatactgttgtgggtaggatgtgctcatcttcagacttaatacagcaataagaatgtgctagagtttacacatctgttcacttttgctccaatatgctcttttgacttaacgtcaagctttgggttgatgtgggtagggtagtgtcaaactgctttgagaggaatgggaccagttctgctgcctaagaaggtctgtctggatgtttataggcagcacctctgaagtggcctaaattcaccctgatctgatagttttcctgcttagaaagtgtgccttggccagatcagtatcccacatgggagtgttccctaggttgtagctgtgattgtttccagatgaccagattgtttttctgaaaatgagcatatttttagtcatgtcgattagctgttcttctacatcacattgttactctttctgatgatgattctagggttaacattggaaccatctcaaaataattacaaagttttagatgggtttacaatgtcttctaaacaatgtaatctaaaaataattgagtcagatgctaacgagatactgcaggcataactgctgtttttctgacaactgattgtgaaaccttaaaacctgcatacctcttcttacagtgaggagtatgcaaaatctggaaagatattctattttttttatataggtagataggatcgccatttatttcctatttagatatactgacattcatccatatgaaaatatgcaggtcattagcttactataatttacttttgacttaatggggcataaataaaactttcatagtacacatgaggtggatatttgatacacagaacatttgcggtgggctttctgtgggttagatgtaaagcccacatattttaatattcactattttaaatgagcaatgcatgaggggaatgcagtgtcagtacctggcctatttttaaactagtgtaatcaccctagtcataccattcagtatgtttgctttttaaaataagtaaccacaactaagttgttgtagcccttgcacttcaagagatctagtctttactttcagttgtctgttaggtccattctgtttactagacggatgttaataaaaactatgcgagcctgaatgaattctcagccaaatttagtcttgtctctcatcttgattggattaattccaaattctaaaatgattcagtccacaatagctctaggggatgaagaatttgccttactttgcccagttcctaagactgtgagttgtcaaatccctagactgtaagctcttcaaggagcaagaggcgcattttctccgtgtcatgtaatttttctaaggtgcttggcagcactctgtaccctgtggagtactcagtaccttttgtttgatgttgctgacaagacctgaaaaaaaatcccttaaaaaaaaaacccattaaagtgtagcaaaaccgatgtattattttttctcttttctcataaaccataagatatgtatatcaaaatgataatttatatgaagcatctgctatccttcacataagtatagtttatatgaactacaaatacctttcatcaacattaaagaagcttaaattgaa

SEQ ID NO: 213421 - DNA, 1875 bp, Artificial Sequence
  derived and/or modified sequence
tagcggttcctcctggccctgttaatgtcggggccaggccgggggaggatggcgccctagaacccggccttgctggggtaggggcgggaggggacggggtggggaccggccatgtcggaggtgacccggagtctgctgcagcgctggggcgccagttttaggagaggcgccgacttcgactcttggggccagctggtggaggcgatagacgagtatcagatattagcaagacatctacaaaaggaggcccaagctcaacacaataattctgaattcacagaagaacaaaagaaaaccataggcaaaattgcaacatgcttggaattgcgaagtgcagctttacagtccacacagtctcaagaagaatttaaactggaggacctgaagaagctagaaccaatcctaaagaatattcttacatataataaagaattcccatttgatgttcagcctgtcccattaagaagaattttggcacctggtgaagaagagaatttggaatttgaagaagatgaagaagagggtggtgctggagcagggtctcctgattcttttcctgctagagttcccggtgcagctatcttctttgaattcaaacactacaagcctaaaaaaaggtttaccagcaccaagtgttttgctttcatggagatggatgaaattaaacctgggccaattgtaatagaactatacaagaaacccactgactttaaaagaaagaaattgcaattattgaccaagaaaccactttatcttcatctacatcaaactttgcacaaggaatgatcctgacatgatgaacctggaacttctgtgaattttaccactcagtagaaaccatcatagctctgtgtagcatattcacccttcaacaggcaggaagcaagccgtacccagaccagtaggccggacggagtccaatgcaaagctgtaccacagaattcagagtccagcacatcacactgacgtataggactccttgggatacaggtttattgtagattttgaaacatgtttttacttttctattaattgtgcaattaatagtctattttctaatttaccactactcctaccctgcttcctggaacaatactgttgtgggtaggatgtgctcatcttcagacttaatacagcaataagaatgtgctagagtttacacatctgttcacttttgctccaatatgctcttttgacttaacgtcaagctttgggttgatgtgggtagggtagtgtcaaactgctttgagaggaatgggaccagttctgctgcctaagaaggtctgtctggatgtttataggcagcacctctgaagtggcctaaattcaccctgatctgatagttttcctgcttagaaagtgtgccttggccagatcagtatcccacatgggagtgttccctaggttgtagctgtgattgtttccagatgaccagattgtttttctgaaaatgagcatatttttagtcatgtcgattagctgttcttctacatcacattgttactctttctgatgatgattctagggttaacattggaaccatctcaaaataattacaaagttttagatgggtttacaatgtcttctaaacaatgtaatctaaaaataattgagtcagatgctaacgagatactgcaggcataactgctgtttttctgacaactgattgtgaaaccttaaaacctgcatacctcttcttacagtgaggagtatgcaaaatctggaaagatattctattttttttatataggtagataggatcgccatttatttcctatttagatatactgacattcatccatatgaaaatatgcaggtcattagcttactataatttacttttgacttaatggggcataaataaaactttcatag

SEQ ID NO: 213422 - DNA, 1568 bp, Artificial Sequence
  derived and/or modified sequence
aatgaccaatggagatgcggggcaaggggattcagcggatctagctgttaatgccactgatttgtggtgaccaatatggattttctttctgtcgtttgtttcaaggcactagaaggagacttttggtccactgtccaggggtctatggagactaatgtaaaagggggtgatcctattgcttgagactccggggaagtagcgggggatattactgagaaacacccatcctctgacatacttaccaaatttctcagagtcggttcagcagttcttctaagggaagaagggcaatatatcggagtccacaagcgagaaaaagagggagtcggagaaccgagactacagaaccagggtgacggaaaaccaggacggcgccaagccggagtcacgtgacccggcggccatgatagctaccgaggcggtagtgcgcgcagctcagggattagcaagacatctacaaaaggaggcccaagctcaacacaataattctgaattcacagaagaacaaaagaaaaccataggcaaaattgcaacatgcttggaattgcgaagtgcagctttacagtccacacagtctcaagaagaatttaaactggaggacctgaagaagctagaaccaatcctaaagaatattcttacatataataaagaattcccatttgatgttcagcctgtcccattaagaagaattttggcacctggtgaagaagagaatttggaatttgaagaagatgaagaagagggtggtgctggagcagggtctcctgattcttttcctgctagagttcccggtactttattaccaaggttgccatcggaaccaggaatgacattactcactatcagaattgagaaaattggtttgaaagatgctgggcagtgcatcgatccctatattacagttagtgtaaaggatctgaatggcatagacttaactcctgtgcaagatactcctgtggcttcaagaaaagaagatacatatgttcattttaatgtggacattgagctccagaagcatgttgaaaaattaaccaaaggtgcagctatcttctttgaattcaaacactacaagcctaaaaaaaggtttaccagcaccaagtgttttgctttcatggagatggatgaaattaaacctgggccaattgtaatagaactatacaagaaacccactgactttaaaagaaagaaattgcaattattgaccaagaaaccactttatcttcatctacatcaaactttgcacaaggaatgatcctgacatgatgaacctggaacttctgtgaattttaccactcagtagaaaccatcatagctctgtgtagcatattcacccttcaacaggcaggaagcaagccgtacccagaccagtaggccggacggagtccaatgcaaagctgtaccacagaattcagagtccagcacatcacactgacgtataggactccttgggatacaggtttattgtagattttgaaacatgtttttacttttctattaattgtgcaattaatagtctattttctaatttaccactactcctaccctgcttcctggaacaatactgttgt

SEQ ID NO: 213423 - DNA, 921 bp, Artificial Sequence
  derived and/or modified sequence
atgagcgaggtgaccagaagcctgctgcagagatggggcgccagcttcagaagaggcgccgacttcgacagctggggccagctggtggaggccatcgacgagtaccagatcctggccagacacctgcagaaggaggcccaggcccagcacaacaacagcgagttcaccgaggagcagaagaagaccatcggcaagatcgccacctgcctggagctgagaagcgccgccctgcagagcacccagagccaggaggagttcaagctggaggacctgaagaagctggagcccatcctgaagaacatcctgacctacaacaaggagttccccttcgacgtgcagcccgtgcccctgagaagaatcctggcccccggcgaggaggagaacctggagttcgaggaggacgaggaggagggcggcgccggcgccggcagccccgacagcttccccgccagagtgcccggcaccctgctgcccagactgcccagcgagcccggcatgaccctgctgaccatcagaatcgagaagatcggcctgaaggacgccggccagtgcatcgacccctacatcaccgtgagcgtgaaggacctgaacggcatcgacctgacccccgtgcaggacacccccgtggccagcagaaaggaggacacctacgtgcacttcaacgtggacatcgagctgcagaagcacgtggagaagctgaccaagggcgccgccatcttcttcgagttcaagcactacaagcccaagaagagattcaccagcaccaagtgcttcgccttcatggagatggacgagatcaagcccggccccatcgtgatcgagctgtacaagaagcccaccgacttcaagagaaagaagctgcagctgctgaccaagaagcccctgtacctgcacctgcaccagaccctgcacaaggagtag

SEQ ID NO: 213424 - DNA, 675 bp, Artificial Sequence
  derived and/or modified sequence
atgagcgaggtgaccagaagcctgctgcagagatggggcgccagcttcagaagaggcgccgacttcgacagctggggccagctggtggaggccatcgacgagtaccagatcctggccagacacctgcagaaggaggcccaggcccagcacaacaacagcgagttcaccgaggagcagaagaagaccatcggcaagatcgccacctgcctggagctgagaagcgccgccctgcagagcacccagagccaggaggagttcaagctggaggacctgaagaagctggagcccatcctgaagaacatcctgacctacaacaaggagttccccttcgacgtgcagcccgtgcccctgagaagaatcctggcccccggcgaggaggagaacctggagttcgaggaggacgaggaggagggcggcgccggcgccggcagccccgacagcttccccgccagagtgcccggcgccgccatcttcttcgagttcaagcactacaagcccaagaagagattcaccagcaccaagtgcttcgccttcatggagatggacgagatcaagcccggccccatcgtgatcgagctgtacaagaagcccaccgacttcaagagaaagaagctgcagctgctgaccaagaagcccctgtacctgcacctgcaccagaccctgcacaaggagtag

SEQ ID NO: 213425 - DNA, 849 bp, Artificial Sequence
  derived and/or modified sequence
atgatcgccaccgaggccgtggtgagagccgcccagggcctggccagacacctgcagaaggaggcccaggcccagcacaacaacagcgagttcaccgaggagcagaagaagaccatcggcaagatcgccacctgcctggagctgagaagcgccgccctgcagagcacccagagccaggaggagttcaagctggaggacctgaagaagctggagcccatcctgaagaacatcctgacctacaacaaggagttccccttcgacgtgcagcccgtgcccctgagaagaatcctggcccccggcgaggaggagaacctggagttcgaggaggacgaggaggagggcggcgccggcgccggcagccccgacagcttccccgccagagtgcccggcaccctgctgcccagactgcccagcgagcccggcatgaccctgctgaccatcagaatcgagaagatcggcctgaaggacgccggccagtgcatcgacccctacatcaccgtgagcgtgaaggacctgaacggcatcgacctgacccccgtgcaggacacccccgtggccagcagaaaggaggacacctacgtgcacttcaacgtggacatcgagctgcagaagcacgtggagaagctgaccaagggcgccgccatcttcttcgagttcaagcactacaagcccaagaagagattcaccagcaccaagtgcttcgccttcatggagatggacgagatcaagcccggccccatcgtgatcgagctgtacaagaagcccaccgacttcaagagaaagaagctgcagctgctgaccaagaagcccctgtacctgcacctgcaccagaccctgcacaaggagtag

SEQ ID NO: 213426 - protein, 366 aa, Artificial Sequence
  derived and/or modified sequence
MTVRNIASICNMGTNASALEKDIGPEQFPINEHYFGLVNFGNTCYCNSVLQALYFCRPFRENVLAYKAQQKKKENLLTCLADLFHSIATQKKKVGVIPPKKFISRLRKENDLFDNYMQQDAHEFLNYLLNTIADILQEEKKQEKQNGKLKNGNMNEPAENNKPELTWVHEIFQGTLTNETRCLNCETVSSKDEDFLDLSVDVEQNTSITHCLRDFSNTETLCSEQKYYCETCCSKQEAQKRMRVKKLPMILALHLKRFKYMEQLHRYTKLSYRVVFPLELRLFNTSSDAVNLDRMYDLVAVVVHCGSGPNRGHYITIVKSHGFWLLFDDDIVEKIDAQAIEEFYGLTSDISKNSESGYILFYQSRE

SEQ ID NO: 213427 - DNA, 1101 bp, Artificial Sequence
  derived and/or modified sequence
atgaccgtgagaaacatcgccagcatctgcaacatgggcaccaacgccagcgccctggagaaggacatcggccccgagcagttccccatcaacgagcactacttcggcctggtgaacttcggcaacacctgctactgcaacagcgtgctgcaggccctgtacttctgcagacccttcagagagaacgtgctggcctacaaggcccagcagaagaagaaggagaacctgctgacctgcctggccgacctgttccacagcatcgccacccagaagaagaaggtgggcgtgatcccccccaagaagttcatcagcagactgagaaaggagaacgacctgttcgacaactacatgcagcaggacgcccacgagttcctgaactacctgctgaacaccatcgccgacatcctgcaggaggagaagaagcaggagaagcagaacggcaagctgaagaacggcaacatgaacgagcccgccgagaacaacaagcccgagctgacctgggtgcacgagatcttccagggcaccctgaccaacgagaccagatgcctgaactgcgagaccgtgagcagcaaggacgaggacttcctggacctgagcgtggacgtggagcagaacaccagcatcacccactgcctgagagacttcagcaacaccgagaccctgtgcagcgagcagaagtactactgcgagacctgctgcagcaagcaggaggcccagaagagaatgagagtgaagaagctgcccatgatcctggccctgcacctgaagagattcaagtacatggagcagctgcacagatacaccaagctgagctacagagtggtgttccccctggagctgagactgttcaacaccagcagcgacgccgtgaacctggacagaatgtacgacctggtggccgtggtggtgcactgcggcagcggccccaacagaggccactacatcaccatcgtgaagagccacggcttctggctgctgttcgacgacgacatcgtggagaagatcgacgcccaggccatcgaggagttctacggcctgaccagcgacatcagcaagaacagcgagagcggctacatcctgttctaccagagcagagagtag

SEQ ID NO: 213428 - DNA, 1101 bp, Artificial Sequence
  derived and/or modified sequence
atgaccgtacgcaatatcgcttcaatctgcaatatggggacaaatgctagtgccctcgagaaggacattggcccagaacaattccctatcaatgagcattatttcggtctagtgaacttcggtaacacttgctattgcaattccgtgctccaggccctatacttctgcagaccctttagagagaacgtcctggcttataaggcccagcagaaaaagaaggaaaatttattgacttgcttagccgacctgtttcactccatcgctacccagaaaaaaaaggtgggcgtaattccccccaaaaagtttattagcagattaaggaaggaaaatgacctgttcgacaactacatgcagcaggatgcacacgaatttctgaactatctgctgaacactatcgctgacatcttacaggaggaaaagaagcaggagaagcagaacggcaaactaaaaaacggcaatatgaacgagcccgcggagaacaacaagccagaactgacatgggtccatgagatctttcagggcactctgaccaacgagactaggtgcctaaactgtgagacagtgagcagtaaggatgaagacttcctcgacctgtctgtggacgtcgagcagaatacctctattacgcattgcttgcgggatttcagcaatactgaaaccctatgctcggagcagaaatattactgcgagacctgctgctccaagcaggaggcccagaagcgcatgcgcgtgaagaaactcccaatgatcctcgccctgcatttgaagcggtttaagtacatggaacagttacatcggtacaccaagctatcttacagagtagtgtttccacttgaacttcggctattcaatacctctagcgacgctgtgaatctggaccgcatgtacgacctcgtggcagtcgtcgttcactgtggtagtggccccaatagaggtcactacattacaatcgttaagtcccatggcttctggctgctgtttgacgacgacatagtggagaagatcgatgcgcaggcaattgaggagttctacggcctgacaagtgatatatccaaaaactccgaatccggatacatactcttctatcagtcacgggaatag

SEQ ID NO: 213429 - DNA, 1101 bp, Artificial Sequence
  derived and/or modified sequence
atgacagtgaggaacatcgccagcatctgcaacatgggcaccaatgccagcgccctggagaaggacatcggccctgagcagttccccatcaatgagcactacttcggcctggtgaactttggaaacacctgctactgcaacagcgtgctgcaggccctgtacttctgccggcccttcagagaaaatgtgctggcctacaaggcccagcagaagaagaaggagaacctgctgacctgcctggccgacctcttccacagcatcgccacccagaagaagaaggtgggcgtcatcccccccaagaagttcatcagccggctgaggaaagaaaatgacctgtttgacaactacatgcagcaggatgcccacgagttcctgaactacctgctgaacaccatcgctgacatcctgcaggaggagaagaagcaggagaagcagaatggcaagctgaagaatggaaacatgaatgaacctgctgagaacaacaagccagagctgacctgggtgcatgagatcttccagggcaccctgaccaatgagacccgctgcctgaactgtgaaacagtgagcagcaaggatgaggacttcctggacctgtctgtggatgtggagcagaacaccagcatcacccactgcctgcgggacttcagcaacacagagaccctgtgcagcgagcagaagtactactgtgagacctgctgcagcaagcaggaggcccagaagaggatgagggtgaagaagctgcccatgatcctggccctgcacctgaagcgcttcaagtacatggagcagctgcaccgctacaccaagctgagctacagagtggtgttccccctggagctgcggctcttcaacaccagcagtgatgctgtgaacctggacaggatgtatgacctggtggccgtggtggtgcactgcggcagcggccccaacagaggccactacatcaccatcgtgaagagccacggcttctggctgctgtttgatgatgacatcgtggagaagattgatgcccaggccatcgaggagttctacggcctgaccagtgacatcagcaagaacagcgagagcggctacatcctcttctaccagagccgggagtag

SEQ ID NO: 213430 - DNA, 1101 bp, Artificial Sequence
  derived and/or modified sequence
atgaccgtgcggaacatcgccagcatctgcaacatgggcaccaacgcaagtgccctggaaaaagatatcgggccagaacaatttcctatcaacgaacattacttcgggctggtgaattttggaaatacctgttattgcaattccgtgcttcaagctttgtatttttgcaggccattccgagaaaacgtgcttgcgtataaagcacaacaaaaaaaaaaggagaacctcctgacctgtcttgccgacctcttccatagcatagcgactcagaagaagaaagtgggcgtaattccaccaaagaagtttatctctcgtctgcgcaaagaaaatgatttgttcgataactacatgcagcaagatgctcacgaatttctaaattatttgttgaatactatcgcggatatcctccaggaagaaaagaaacaggagaagcaaaatggaaaactgaagaacgggaatatgaatgaacctgccgagaacaacaaacccgaactcacctgggttcatgaaattttccaaggcaccctcaccaatgaaacccgatgcctcaattgtgaaacagtctccagcaaggacgaagatttccttgatctcagtgtggatgtggagcagaatactagtataacccattgtttgagagatttttctaacaccgagaccctatgtagtgaacagaagtactactgcgaaacctgttgcagtaagcaggaggcacaaaaacgcatgagagtcaagaagctacctatgattctggctctgcacttgaagcggtttaagtatatggaacagctgcatcggtataccaagcttagctatcgcgtggtcttccccctggaactgaggttgttcaacaccagttcggacgccgtcaacctggaccgcatgtatgatctggtggccgtggtagtacattgcggttctggacctaatcgcggccattacattaccatcgtgaaaagccacggattctggcttctgtttgacgacgatatagtggaaaaaattgacgctcaagccatcgaagaattctacggccttaccagcgatatctccaagaattccgagtcaggttacatactgttctatcagtcgagggagtag

SEQ ID NO: 213431 - DNA, 1101 bp, Artificial Sequence
  derived and/or modified sequence
atgactgtgagaaatatcgcatcgatttgcaacatgggaaccaacgccagcgccctcgagaaagacatcggcccagaacagtttccaataaacgagcattacttcgggcttgtgaacttcggaaacacatgttactgtaatagcgtcttgcaggctttatacttttgcagacctttcagggagaacgttctggcatacaaagctcagcagaaaaagaaggaaaatctgctaacctgtttagccgaccttttccatagcatagccactcagaaaaaaaaagtgggggtgatcccgccaaagaaattcatcagcagactgaggaaggagaacgatctgttcgacaactacatgcaacaggatgcccacgagttcctgaattatctgctgaatacaattgccgatatactacaggaggaaaagaagcaggagaaacagaacggaaagctgaagaacggaaatatgaacgagccagctgagaacaacaagcctgaattaacatgggtgcacgagatctttcagggaacgttgactaacgagacaaggtgcctgaactgcgagacagtgtctagcaaggatgaggacttccttgatctctccgttgacgttgagcagaatacatccataacgcactgccttcgcgactttagtaataccgaaaccctatgttccgagcagaagtattattgcgagacctgttgcagcaaacaggaagcgcagaaaagaatgcgcgtgaagaagctgcccatgatccttgctctccacctcaaacgcttcaaatacatggagcagctccatcgctataccaagctcagctacagggttgtattcccactggagttgaggctattcaacacctcaagtgacgcggtcaatttggaccgcatgtatgacctcgttgcagtggtagttcactgtgggtctggcccaaatagaggccactacataactatcgtaaaatcacatggattctggctgctcttcgacgacgacatcgttgaaaagattgatgcccaggccattgaagaattttacgggctgacctctgatattagtaagaattccgagagtggctacatactgttctaccagagtagggagtag

SEQ ID NO: 213432 - DNA, 4752 bp, Artificial Sequence
  derived and/or modified sequence
cgctccctccccgccctccccgcgccgccgcctcctcctcccggcctccctctcccagccaaactgaaagccggaccccaggccgccgcgctgccgcccggcctccccgccagcgcgccaccatgggcagtcccggtttccccttgtaaagatggcggtgagggatcgctgcaacctttagactaatgactgtccgaaacatcgcctccatctgtaatatgggcaccaatgcctctgctctggaaaaagacattggtccagagcagtttccaatcaatgaacactatttcggattggtcaattttggaaacacatgctactgtaactccgtgcttcaggcattgtacttctgccgtccattccgggagaatgtgttggcatacaaggcccagcaaaagaagaaggaaaacttgctgacgtgcctggcggaccttttccacagcattgccacacagaagaagaaggttggcgtcatcccaccaaagaagttcatttcaaggctgagaaaagagaatgatctctttgataactacatgcagcaggatgctcatgaatttttaaattatttgctaaacactattgcggacatccttcaggaggagaagaaacaggaaaaacaaaatggaaaattaaaaaatggcaacatgaacgaacctgcggaaaataataaaccagaactcacctgggtccatgagatttttcagggaacgcttaccaatgaaactcgatgcttgaactgtgaaactgttagtagcaaagatgaagattttcttgacctttctgttgatgtggagcagaatacatccattacccactgtctaagagacttcagcaacacagaaacactgtgtagtgaacaaaaatattattgtgaaacatgctgcagcaaacaagaagcccagaaaaggatgagggtaaaaaagctgcccatgatcttggccctgcacctaaagcggttcaagtacatggagcagctgcacagatacaccaagctgtcttaccgtgtggtcttccctctggaactccggctcttcaacacctccagtgatgcagtgaacctggaccgcatgtatgacttggttgcggtggtcgttcactgtggcagtggtcctaatcgtgggcattatatcactattgtgaaaagtcacggcttctggcttttgtttgatgatgacattgtagagaaaatagatgctcaagctattgaagaattctatggcctgacgtcagatatatcaaaaaattcagaatctggatatattttattctatcagtcaagagagtaactgaaagacctgcgggactgattcacgtggggagaatgttcacagcactgtcacccggcttctccgcaggctttcctcttccccagtggcccactaatggtatcactccgagtctcaatggtctggctgtgttagactctctccttttgtgtttttacatgcagcactactcttggttttatttcagtctgacatagagttaactgcaatcagattgtagtctgatttatatgaataacggttgctaattttaggactgggtgaaagctatgccattcattatgtctggctgtattagaatgacatttcctatgaatgtctacggtctgttttaggtgtttgctaaacttctatggcttccagggtcttcttacaatgcattcctttaacttgtccctggaagcattgctacccattttcagcttctctgcctctcttctgatacaaggacagaagaattgggtagatattcaccttttaggggtgcaagtatagctttaagtttgtgcaagtgaaaatgttgaaaagtgagtaacctcgatattaaaatcatccttgacatgaaacagggtgaagagaagctgtccgtggcggctggtgttggctggcattggcactgggctgtgctgacctagccattacaattccaggggctaagaaggctcagggcagacaaagtcaagaggaggaagtttttgtggacaatgaaaagttattttcgtacctttctaccaaaaccaagtttcaggaaaataactctatgttgtttattttcagtgacacttatgtaaggccctgtgagttgtatttatcctgtatccggcactgctaagcttttcaaggtatctttccaatcctgctgatgtggcagtcaatggctgcagggctggcaaacctccccttagccagtcagcacggcattgttccttatcaggaataacaaaggtactacatctttccagccatcagcacgttgtacaacttaactttttaacatagtccgtctgtttactgaggcactggcgagtcccagggctgatacagaaccttccctagagggaataccagagttagctgggtatagaggtggctcaaaggaagtgtccgtgggcagggggaggaatgaacaaaatggcgctgtttctttggctcagactcctagaatgcttgacaagacagaatttttttggaagaacctcatctcactatagttacttttttcacttttgttatatatgtatttattagagcatttgaatattggtacctttaaaagggtcatttggtgttttgctgttgagctggtttttgagtcatagatcttggcttcctttagaagccacttaacttccatacactataataaactgtgaacatatttttgttacctaatgcatccactgatgaacatgcaaactttgggcataatgtgaactaaaattgaaatggaaaatgttagtggccattttgcaacaatgaagaggatagcactttatctagatgaaaactggatttcttatctttgaaatatcttgaactgtttattgctcagaacttaagtaagcatgccaacatttcgtttgtttatgcttgaagtgaaatgttttacttttcactggagaagacaaaacagggtgatcttcatgttattgttttatacaagtgatggaaatgtaccttgccttgtttagaggcaatttcacatttataaatatttttttttcctccatgaaacttacgcagtaatcactacctggaaggtgagttttgatctctttttaaggagaggcactttccaactgaaggtgattgatgtagggaaatgtttgtactatatagaatccatatatttgactgcaagttacaaagttttaagaacatgatggttggtctctaatatatttggaactgattcataagaaaagttattaaaattatctttgaaacacctcttgaagctaatttattagaaaaaatatttcagttggaaggctgtagaagtaatgtttaaatgctaagtcataagttcaggatatttcttttctatttggttgtgcaaaatgtttttcccagttatttaatcgaagtaattccttttaatagaaagagtcagttaaaattcagcattcatggatagatttttggaacgaaaaagggtaagtataagaaaatattgcaaacacattaaaacagttgtatggtgcaggaaaagaagattggaaaaagaccaaaacacacttctccagcaacactccatcagctttttaaaatttagagctatctgctaattttttccctcttccttctcaataaatgaaacaaacactgggcagctgcaggtttctcccaatcatgtctctttatgtaaagacagtaacatgcaaacacttttagtttacatccctcattcacagtgtaaagcaggaaatggtgtgggagatgtgagaccattctgaggtcagcgatagcccaaaggctctgcagtattccctccaatggccaaggattccgtgtgtcatctgcaggagtgagtaggcctgctgtatttcttgtaactgctgggtgttacaaaataagttacaatgttttacactttaaaaaaaaaacagaaggaacatttgctttattggttacttactagtttagcctctaggttatggcacagcatgctaaaaaatcatgtgtttaaaagtaaatgttggtaaaatgctggcatctggtcctattgtgttgatgcattttcacttctgtggtcataggaaatggactggtctaaagagagtgaggcacaacacaagcagggcattagtttgaataggaagtcaatcatatttggttttatggcctggtgtattttgggtttaagataaaatagggaaaaatgtcagaaatgatccctatgcatttattttcatggatacccttaatttcatgggcatgcctaataatgatctatgttctaactggagcttagggcttattttagatattggagtgtagctttattacagatggattttatctttcaacattgcattttgatcaactttgtatattcacgtgtattaaaatattgtgcactaaatgttttgcccttgtttgctattatatggtcaaggcatttatcagcactattgtaatgaactcatgtaagtggcatgggtcagggaaaattatttcctacttttctgcctaattaaatttctgttttccagtattacattaatttatttttggcttccatttctgtataaccaaaatagttactgtatttgtgtggcattcctattattttgttgctaaaaatattgtagtttttatttaaaataatctgtaccttaattttttaaaatgtaaccaattcaagcactttaagcaataatgtcaatcttgtgaaattttaatcagtttaacaccctgcctctaaaattgtttgcaaaaaataaataaatgaataaaatgggaa

SEQ ID NO: 213433 - protein, 746 aa, Artificial Sequence
  derived and/or modified sequence
MGDVLSTHLDDARRQHIAEKTGKILTEFLQFYEDQYGVALFNSMRHEIEGTGLPQAQLLWRKVPLDERIVFSGNLFQHQEDSKKWRNRFSLVPHNYGLVLYENKAAYERQVPPRAVINSAGYKILTSVDQYLELIGNSLPGTTAKSGSAPILKCPTQFPLILWHPYARHYYFCMMTEAEQDKWQAVLQDCIRHCNNGIPEDSKVEGPAFTDAIRMYRQSKELYGTWEMLCGNEVQILSNLVMEELGPELKAELGPRLKGKPQERQRQWIQISDAVYHMVYEQAKARFEEVLSKVQQVQPAMQAVIRTDMDQIITSKEHLASKIRAFILPKAEVCVRNHVQPYIPSILEALMVPTSQGFTEVRDVFFKEVTDMNLNVINEGGIDKLGEYMEKLSRLAYHPLKMQSCYEKMESLRLDGLQQRFDVSSTSVFKQRAQIHMREQMDNAVYTFETLLHQELGKGPTKEELCKSIQRVLERVLKKYDYDSSSVRKRFFREALLQISIPFLLKKLAPTCKSELPRFQELIFEDFARFILVENTYEEVVLQTVMKDILQAVKEAAVQRKHNLYRDSMVMHNSDPNLHLLAEGAPIDWGEEYSNSGGGGSPSPSTPESATLSEKRRRAKQVVSVVQDEEVGLPFEASPESPPPASPDGVTEIRGLLAQGLRPESPPPAGPLLNGAPAGESPQPKAAPEASSPPASPLQHLLPGKAVDLGPPKPSDQETGEQVSSPSSHPALHTTTEDSAGVQTEF

SEQ ID NO: 213434 - DNA, 3957 bp, Artificial Sequence
  derived and/or modified sequence
ggcagggagggggccaaggcggccggctggagggacggggcccgaccgggagcggagccggagcggaagccgcagccgggcggcgggagcggcgggagcggcgggagcgggggaagcagggcgggccgggctccatggcgccagcggcgtccgcctgagcagcgcgggcaacagcggcggcgtcggccggatcgggccgcgacacctcctggccatgggggacgtgctgtccacgcacctggacgacgcccggcgccagcacatcgcagaaaaaaccgggaagatcctgacggagttcctccagttctatgaagaccagtatggcgtggctctcttcaacagcatgcgccatgagattgagggcacggggctgccgcaggcccagctgctctggcgcaaggtgccactggacgagcgcatcgtcttctcggggaacctcttccagcaccaggaggacagcaagaagtggagaaaccgcttcagcctcgtgccccacaactacgggctggtgctctacgaaaacaaagcggcctatgagcggcaggtcccaccacgagccgtcatcaacagtgcaggctacaaaatcctcacgtccgtggaccaatacctggagctcattggcaactccttaccagggaccacggcaaagtcgggcagtgcccccatcctcaagtgccccacacagttcccgctcatcctctggcatccttatgcgcgtcactactacttctgcatgatgacagaagccgagcaggacaagtggcaggctgtgctgcaggactgcatccggcactgcaacaatggaatccctgaggactccaaggtagagggccctgcgttcacagatgccatccgcatgtaccgacagtccaaggagctgtacggcacctgggagatgctgtgtgggaacgaggtgcagatcctgagcaacctggtgatggaggagctgggccctgagctgaaggcagagctcggcccgcggctgaaggggaaaccgcaggagcggcagcggcagtggatccagatctcggacgccgtgtaccacatggtgtacgagcaggccaaggcgcgcttcgaggaggtgctgtccaaggtgcagcaggtgcagccggccatgcaggccgtcatccgaactgacatggaccaaattatcacctccaaggagcaccttgccagcaagatccgagccttcatcctccccaaggcagaggtgtgcgtgcggaaccatgtccagccctacatcccatccatcctggaggccctgatggtccccaccagccagggcttcactgaggtgcgagatgtcttcttcaaggaggtcacggacatgaacctgaacgtcatcaacgagggcggcattgacaagctgggcgagtacatggagaagctgtcccggctggcgtaccaccccctgaagatgcagagctgctatgagaagatggagtcgctgcgactggacgggctgcagcagcgatttgatgtgtccagcacgtccgtgttcaagcagcgagcccagatccacatgcgggagcaaatggacaatgccgtgtatacgttcgagaccctcctgcaccaggagctggggaaggggcccaccaaggaggagctgtgcaagtccatccagcgggtcctggagcgggtgctgaagaaatacgactacgacagcagctctgtgcggaagaggttcttccgggaggcgctgctgcagatcagcatcccgttcctgctcaagaagctggcccctacctgcaagtcggagctgccccggttccaggagctgatcttcgaggactttgccaggttcatcctggtggaaaacacgtacgaggaggtggtgctgcagaccgtcatgaaggacatcctgcaggctgtgaaggaggccgcggtgcagaggaagcacaacctctaccgggacagcatggtcatgcacaacagcgaccccaacctgcacctgctggccgagggcgcccccatcgactggggcgaggagtacagcaacagcggcgggggcggcagccccagccccagcaccccggagtcagccaccctctcggaaaagcgacggcgcgccaagcaggtggtctctgtggtccaggatgaggaggtggggctgccctttgaggctagccctgagtcaccaccacctgcgtccccggacggtgtcactgagatccgaggcctgctggcccaaggtctgcggcctgagagccccccaccagccggccccctgctcaacggggcccccgctggggagagtccccagcctaaggccgcccccgaggcctcctcgccgcctgcctcacccctccagcatctcctgcctggaaaggctgtggaccttgggccccccaagcccagcgaccaggagactggagagcaggtgtccagccccagcagccaccccgccctccacaccaccaccgaggacagtgcaggggtgcagactgagttctaggccagtgggtccctgactgctgcacatggcacaggccgttcccttccggacccaggcaggctcagctctggggagggcaccctggtctgtgccttgtgggtggaggcggggcagggctgtgtggcaccgccagggagcgggcccacctgagtcactttattgggttcagtcaacactttcttgctccctgttttctcttctgtgggatgatctcagatgcaggggctggttttggggttttcctgcttgtgccaagggctggacactgctggggggctggaaagcccctcccttcctgtccttctgtggcctccatcccctcatgggtgctgccatccttcctggagagagggaggtgaaagctggtgtgagcccagtgggttcccgcccactcacccaggagctggctgggccaggaccgggagagggagcactgctgccctcctggccctgctccttccgcagttaggggtggaccgagcctcgctttccccactgttctggagggaaggggaaggagggggtcttcaggctggagccaggctgggggtgctgggtggagagatgagatttagggggtgcctcatggggtgggcaggcctggggtgaaatgagaaaggcccagaacgtgcaggtctgcggaggggaagtgtcctgagtgaaggaggggacccccatcctgggggatgctgggagtgagtgagtgagatggctgagtgagggttatggggagcctgaggttttatgggcctgtgtatccccttctcccggccccagcctgcctccctcctgcccgcctggcccacaggtctccctctggtccctgtccctctggtggttggggatggagcggcagcaaggggtgtaatggggctgggttctgtcttctacaggccaccccgaggtcctcagtggttgcctggggagccggacggggctcctgaggggtacaggttgggtgggccctccctgagggtctggggtcaggctttggcctctgctgcctctcagtcaccaagtcacctccctctgaaaatccagtcccttctttggatgtccttgtgagtcactctgggcctggctgtcgtccctcctcagcttcttgttcctgggacaagggtcaagccaggatgggcccaggcctgggatcccccaccccaggacccccaggccccctcccctgctgctttgcggggggcagggcagaaatggactccttttgggtccccgaggtggggtcccctcccagccctgcatcctccgtgccctagacctgctccccagaggaggggccttgacccacaggacgtgtggtggcgcctggcactcagggacccccagctgccgcagccctggtctctggcgcatctcttccctcttgtcccgaagatctgcgcctctagtgccttttgaggggttcccatcatccctccctgatattgtattgaaaatattatgcacactgttcatgcttctactaatcaataaacgctttatttaaa

SEQ ID NO: 213435 - DNA, 2241 bp, Artificial Sequence
  derived and/or modified sequence
atgggtgacgtcctatcaacgcaccttgatgacgcccggcggcagcacatcgccgaaaagacaggcaagattctgacggagttcctgcagttctacgaagaccaatacggcgtggccttatttaacagtatgcgtcacgaaatagagggaacaggcctcccgcaggcccagctcctctggagaaaagtgccgctggacgagcgtattgtattttcaggtaacttgtttcagcatcaagaggactctaagaaatggcggaaccgtttcagcctggttccccacaactacggcttagtgctgtatgaaaacaaagcagcctacgagcggcaggtgccacctcgggctgtgatcaacagcgctggttataagatcctgacatcagttgaccagtacctggagctcatcgggaacagtcttccaggcacaactgctaagtcaggctccgcacctatcttgaagtgtcccacacagtttccgctgatactatggcacccatatgccagacattactatttttgtatgatgacagaggcagaacaggataagtggcaggctgtgctgcaagattgtatccgtcattgtaataatggaattccagaagattctaaagtggaagggccagcgttcaccgatgcaattcggatgtataggcagtcaaaggagctgtacggaacctgggaaatgctctgtgggaacgaagtgcaaatcctcagcaacctggtcatggaggagcttggccccgaactcaaagccgagctgggccctagactgaaggggaagccccaggaacgtcagagacagtggatccagataagtgacgccgtctatcacatggtctacgagcaggccaaagcccgcttcgaagaagtactttctaaggttcagcaagtgcagccagcgatgcaagccgttataagaactgatatggatcagattataacttcaaaagagcatttagcatctaaaatccgagcctttattctcccaaaggcagaggtttgcgtcagaaaccacgtacagccatacattcctagtattctggaagccttgatggtgcctacaagccagggctttaccgaagtcagggatgtgttttttaaagaagttaccgatatgaacctcaacgtgatcaatgagggaggaatagacaagctgggcgaatatatggagaagctttctcggctggcttaccatccactcaaaatgcagagttgttatgagaagatggaatccctgcgattagacgggctgcagcagaggtttgatgtgtccagcacctctgtgtttaaacaaagagctcaaatccacatgcgagagcagatggataatgccgtatatactttcgaaactcttctccaccaggaactgggtaagggccccacgaaggaagagctgtgcaaatcaatccagcgcgtcctagagagggtgcttaaaaagtacgactacgatagctcctctgtgagaaagcgattcttccgagaagctctccttcagatttccatccccttcctacttaagaaactggcaccgacctgcaagtccgaattacctcgtttccaagaactgatctttgaagactttgcccgtttcattctggtggaaaacacttacgaagaggtggtccttcagaccgtcatgaaagatattcttcaggccgttaaggaagcggcagtgcagcgcaagcataacctgtaccgtgattcaatggtcatgcacaactccgatccaaacctgcacctgctggctgaaggtgctcctatagattggggtgaggagtattcaaactccggtggaggcggttccccttcccctagtacacctgagtctgccacattatccgaaaagcggcgacgggcgaaacaggtggtgagcgttgtacaggatgaggaggtagggctgccatttgaagcctcaccagagtcgccaccgccagcttcacctgacggagtcacagagatccgcggattgctcgcccagggcctccgacctgaatcacctccgcccgcggggccccttctgaatggcgctccggctggcgagtcaccccagcccaaggctgcccccgaagcctctagccctccagcaagtccccttcaacatcttttaccaggaaaggccgtggatctagggccacccaagcctagtgatcaggagacaggagagcaggtgtcatccccctcgtcccacccggcgttacatactactacagaagatagcgccggtgtgcagactgagttttag

SEQ ID NO: 213436 - DNA, 2241 bp, Artificial Sequence
  derived and/or modified sequence
atgggagatgtgctgagcacccacctggatgatgcccggcggcagcacatcgccgagaagacaggcaagatcctgacagagttcctgcagttctatgaggaccagtatggagtggccctcttcaacagcatgagacatgaaattgagggcaccggcctgccccaggcccagctgctgtggaggaaggtgcccctggatgaaagaattgtgttcagcggcaacctcttccagcaccaggaggacagcaagaagtggaggaaccgcttcagcctggtgccccacaactacggcctggtgctgtatgagaacaaggccgcctatgagcggcaggtgccccccagggctgtgatcaacagcgctggctacaagatcctgacctctgtggaccagtacctggagctgattggcaacagcctgcccggcaccacagccaagagcggcagcgcccccatcctgaagtgccccacccagttccccctcatcctgtggcacccctatgcccggcactactacttctgcatgatgacagaggccgagcaggacaagtggcaggccgtgctgcaggactgcatccgccactgcaacaacggcatccctgaggacagcaaggtggagggccctgccttcacagatgccatccgcatgtaccggcagagcaaggagctgtatggcacctgggagatgctgtgtggaaatgaggtgcagatcctgagcaacctggtgatggaggagctgggccctgagctgaaggccgagctgggcccccggctgaagggcaagccccaggagcggcagaggcagtggatccagatcagtgatgctgtgtaccacatggtgtatgagcaggccaaggccaggtttgaggaggtgctgagcaaggtgcagcaggtgcagcctgccatgcaggccgtcatcagaacagacatggaccagatcatcaccagcaaggagcacctggccagcaagatccgggccttcatcctgcccaaggccgaggtgtgtgtgaggaaccacgtgcagccctacatccccagcatcctggaggccctgatggtgcccaccagccagggcttcacagaggtgagagatgtgttcttcaaggaggtgacagacatgaacctgaatgtcatcaatgaaggaggcatcgacaagctgggggagtacatggagaagctgagccggctggcctaccaccccctgaagatgcagagctgctatgagaagatggagagcctgcggctggatggcctgcagcagagatttgatgtgagcagcacctctgtgttcaagcagagggcccagatccacatgagggagcagatggacaatgctgtgtacacctttgagaccctgctgcaccaggagctgggcaagggccccaccaaggaggagctgtgcaagagcatccagagggtgctggagcgggtgctgaagaagtatgactatgacagcagctctgtgaggaagcgcttcttccgggaggccctgctgcagatcagcatccccttcctgctgaagaagctggcccccacctgcaagtctgagctgccccgcttccaggagctgatctttgaagattttgcccgcttcatcctggtggagaacacctatgaggaggtggtgctgcagacagtgatgaaggacatcctgcaggccgtgaaggaggccgctgtgcagaggaagcacaacctgtacagagacagcatggtgatgcacaacagcgaccccaacctgcacctgctggccgagggcgcccccatcgactggggcgaggagtacagcaacagcggcggcggcggcagccccagccccagcaccccagagagcgccaccctgtctgagaagagaagaagagccaagcaggtggtgtctgtggtgcaggatgaggaggtgggcctgccctttgaggccagccctgagagccccccaccagccagcccagatggagtgacagagatccggggcctgctggcccagggcctgcggcctgagagccccccacctgctggccccctgctgaatggagccccagctggggagagcccccagcccaaggccgcccctgaggccagcagccccccagccagccccctgcagcacctgctgcccgggaaggctgtggacctgggcccccccaagcccagcgaccaggagactggagagcaggtgagcagccccagcagccacccagccctgcacaccaccacagaagattctgctggggtgcagacagagttctag

SEQ ID NO: 213437 - DNA, 2241 bp, Artificial Sequence
  derived and/or modified sequence
atgggcgacgtgctgagcacccacctggacgacgcccggcggcagcatatcgcggaaaaaacagggaaaatcttgaccgaatttctacagttctacgaggaccagtacggcgtcgctttattcaactccatgcggcatgaaattgaagggacagggctgccccaagctcagctcctctggaggaaggtaccactcgacgagcgcattgtctttagcgggaatctgttccagcaccaagaagattctaaaaaatggcggaaccgcttctcactcgtgcctcacaactatggtctggtgctatatgaaaataaggcggcatatgagcgccaggtgccgccgcgggctgtgatcaactctgccggttataaaatattaacttccgtcgatcagtacctggagctgattgggaacagtctgcctggcaccactgcaaagtccgggtctgcgccaatcctaaagtgtccaacacagtttccgcttatcctgtggcacccatatgcgaggcattattacttctgtatgatgactgaagccgaacaggataagtggcaagctgtgctccaggattgtattaggcactgcaacaatggaataccagaagatagcaaggttgaagggcccgccttcaccgacgctattcgtatgtatcgccagtcaaaagaactgtatggcacctgggaaatgctctgcggtaatgaggtgcagatcctttctaacctggtcatggaagaactaggcccagaactgaaagcagaactgggcccacgcctgaaaggaaaaccccaggagcgccagcgtcagtggattcagattagcgacgcggtctaccacatggtttacgaacaggccaaggcgcgcttcgaggaagtgttaagtaaggttcaacaggttcagcctgcaatgcaagccgtgataaggacggacatggatcagatcattacatccaaggaacatctggccagcaaaatcagggcgttcattctgccaaaggccgaagtttgcgtccgaaaccacgtgcagccctatatcccctcaatcctcgaggcactgatggtgcctacctctcagggcttcacagaggtaagggacgttttttttaaggaggtcactgatatgaacctgaacgttataaatgaaggggggatcgataagctaggtgaatatatggagaagctgagcagattagcctaccatcccctcaagatgcagagctgttatgaaaagatggaatccttaagactcgacggcctgcagcagaggtttgacgtgagttcgacttctgtgtttaagcagcgtgcacagatccacatgagagaacagatggacaacgccgtatacaccttcgagaccctgctccaccaagaactgggcaaggggcccaccaaggaggagctatgtaagagcatccagagggtacttgaaagggtgttaaagaaatacgactatgattccagtagcgtgcgtaaacgattttttcgggaggccctgcttcagatttccatcccattccttctgaaaaagctggctcctacctgtaagtcggaacttccccgatttcaggagctgatttttgaagactttgccagatttattcttgttgaaaatacctacgaagaggtggtgctccaaacggtgatgaaggacattctgcaggccgttaaggaggccgctgtacagcggaaacataacctctatcgcgacagcatggtgatgcataatagcgaccccaatctgcacctcctcgcggagggggctccaatcgattggggcgaggagtactcaaactctggagggggaggcagcccctcaccatccactccagaaagcgccacactgtctgagaaaaggcgccgtgctaagcaggtagttagtgtggtccaggacgaggaggttggacttccatttgaagcctcacccgagtctcccccgccggcatcacctgatggtgttactgagattcggggactacttgcacagggcctacgacctgagtctccgccacctgccggccccctcctgaacggcgcccccgcaggcgagagcccacagccaaaagcggctccagaagctagtagccctcctgccagtccattacaacacctacttcccgggaaggccgtggacctggggccacctaaaccttcagatcaggaaaccggcgagcaggttagctccccttctagccaccccgctttgcatactaccaccgaggatagtgctggcgtgcagactgagttttag

SEQ ID NO: 213438 - DNA, 2241 bp, Artificial Sequence
  derived and/or modified sequence
atgggcgacgtgctgtccacacacctggacgatgctcggaggcagcacatcgcagagaagactggcaaaatccttaccgagtttctacagttttatgaagatcagtacggcgtggccttgttcaacagcatgagacatgagattgaagggacaggactaccccaggcccaattgctgtggagaaaggtgcctcttgatgagagaatcgtattctccggtaatctgtttcagcatcaggaagattctaagaaatggagaaacagattcagcctggtcccccataattatgggttagtcctgtatgagaacaaagcagcctacgaacgccaggtcccacccagggcagttatcaacagtgctggttataagatcctaacatctgtggatcagtacctggagttgattgggaacagcttacccggaaccacggccaaaagtgggtcggctcctatactcaagtgcccgacccagtttcctctcattctgtggcatccctacgctcgacattactacttttgcatgatgaccgaagctgagcaggacaagtggcaagccgtgttgcaagattgtatcaggcattgcaataacggcatccctgaagactcgaaggtcgaaggaccggcatttacagacgcaatacgcatgtatagacagagcaaagaactctacggaacatgggagatgctgtgtggaaatgaggtgcagattctgtccaacctggtgatggaagagttgggaccagagctgaaggccgagctcggaccacgcctgaaggggaaaccacaggagcgtcagagacagtggatccaaatcagcgacgccgtgtatcacatggtgtatgagcaagccaaggccaggttcgaggaggtcttaagcaaggtgcaacaggtgcagccagctatgcaagccgtgattcggacagatatggaccagattatcaccagcaaagaacatctggctagcaagattcgggcatttattctgccaaaggcggaggtgtgtgtacggaaccatgtccaaccttatatcccctccattcttgaggcactcatggtccccacgagccagggcttcacggaagtcagggacgtctttttcaaagaggtgaccgatatgaacctgaatgtgattaatgagggaggcattgacaagctcggcgaatatatggagaagctgtcccgtctggcataccatcccctgaagatgcagtcctgttatgaaaagatggaaagcctccgactcgacggattacagcagaggttcgatgtgtcctctacttccgtatttaagcagagagcccagattcacatgcgcgaacagatggacaacgctgtgtatacgttcgagacattacttcaccaggagctgggcaaaggacctacaaaagaagagctctgcaaatccatacagcgagtactggaacgggtcctcaagaaatatgattatgactcgtcaagcgttcggaagcgtttctttagggaggccctgttacagatctccatcccatttctgttgaagaaactggcgccaacgtgtaagtctgagctccctcggtttcaggaattaatatttgaagactttgcccgattcatcttggtggaaaatacttatgaggaggtcgtcctgcagactgtcatgaaggatattcttcaggcggtgaaagaagcagcagttcagcggaaacataacctgtatcgggattcaatggtgatgcataattccgatcctaacctccacctgctagcagaaggggctccaatcgactggggagaagaatactccaattcaggcggaggaggatccccttcaccatcgaccccggagtctgccactctaagcgagaagaggcgccgagccaaacaggtcgtatccgtggtccaggatgaggaagtggggttgccctttgaggctagcccagagtcacctcccccagccagccctgatggcgtgactgagattaggggattgctggcgcaaggcctccgcccagagtctccccctccagcaggaccattgctaaacggagcgcctgccggagagtctccgcagccaaaggctgctcccgaagcctccagtccgccagcctccccgctgcagcacctgctccctgggaaagccgttgatctcgggcctcccaaaccatcagatcaagaaacgggcgaacaagtcagctccccgtctagccaccccgcactccataccaccacagaagattcagctggagtgcaaactgaattttag

SEQ ID NO: 213439 - DNA, 2241 bp, Artificial Sequence
  derived and/or modified sequence
atgggcgacgtgctgagcacccacctggacgacgccagaagacagcacatcgccgagaagaccggcaagatcctgaccgagttcctgcagttctacgaggaccagtacggcgtggccctgttcaacagcatgagacacgagatcgagggcaccggcctgccccaggcccagctgctgtggagaaaggtgcccctggacgagagaatcgtgttcagcggcaacctgttccagcaccaggaggacagcaagaagtggagaaacagattcagcctggtgccccacaactacggcctggtgctgtacgagaacaaggccgcctacgagagacaggtgccccccagagccgtgatcaacagcgccggctacaagatcctgaccagcgtggaccagtacctggagctgatcggcaacagcctgcccggcaccaccgccaagagcggcagcgcccccatcctgaagtgccccacccagttccccctgatcctgtggcacccctacgccagacactactacttctgcatgatgaccgaggccgagcaggacaagtggcaggccgtgctgcaggactgcatcagacactgcaacaacggcatccccgaggacagcaaggtggagggccccgccttcaccgacgccatcagaatgtacagacagagcaaggagctgtacggcacctgggagatgctgtgcggcaacgaggtgcagatcctgagcaacctggtgatggaggagctgggccccgagctgaaggccgagctgggccccagactgaagggcaagccccaggagagacagagacagtggatccagatcagcgacgccgtgtaccacatggtgtacgagcaggccaaggccagattcgaggaggtgctgagcaaggtgcagcaggtgcagcccgccatgcaggccgtgatcagaaccgacatggaccagatcatcaccagcaaggagcacctggccagcaagatcagagccttcatcctgcccaaggccgaggtgtgcgtgagaaaccacgtgcagccctacatccccagcatcctggaggccctgatggtgcccaccagccagggcttcaccgaggtgagagacgtgttcttcaaggaggtgaccgacatgaacctgaacgtgatcaacgagggcggcatcgacaagctgggcgagtacatggagaagctgagcagactggcctaccaccccctgaagatgcagagctgctacgagaagatggagagcctgagactggacggcctgcagcagagattcgacgtgagcagcaccagcgtgttcaagcagagagcccagatccacatgagagagcagatggacaacgccgtgtacaccttcgagaccctgctgcaccaggagctgggcaagggccccaccaaggaggagctgtgcaagagcatccagagagtgctggagagagtgctgaagaagtacgactacgacagcagcagcgtgagaaagagattcttcagagaggccctgctgcagatcagcatccccttcctgctgaagaagctggcccccacctgcaagagcgagctgcccagattccaggagctgatcttcgaggacttcgccagattcatcctggtggagaacacctacgaggaggtggtgctgcagaccgtgatgaaggacatcctgcaggccgtgaaggaggccgccgtgcagagaaagcacaacctgtacagagacagcatggtgatgcacaacagcgaccccaacctgcacctgctggccgagggcgcccccatcgactggggcgaggagtacagcaacagcggcggcggcggcagccccagccccagcacccccgagagcgccaccctgagcgagaagagaagaagagccaagcaggtggtgagcgtggtgcaggacgaggaggtgggcctgcccttcgaggccagccccgagagccccccccccgccagccccgacggcgtgaccgagatcagaggcctgctggcccagggcctgagacccgagagccccccccccgccggccccctgctgaacggcgcccccgccggcgagagcccccagcccaaggccgcccccgaggccagcagcccccccgccagccccctgcagcacctgctgcccggcaaggccgtggacctgggcccccccaagcccagcgaccaggagaccggcgagcaggtgagcagccccagcagccaccccgccctgcacaccaccaccgaggacagcgccggcgtgcagaccgagttctag

SEQ ID NO: 213440 - protein, 577 aa, Artificial Sequence
  derived and/or modified sequence
MPEGAQGLSLSKPSPSLGCGRRGEVCDCGTVCETRTAPAAPTMASPRGSGSSTSLSTVGSEGDPAPGPTPACSASRPEPLPGPPIRLHLSPVGIPGSARPSRLERVAREIVETERAYVRDLRSIVEDYLGPLLDGGVLGLSVEQVGTLFANIEDIYEFSSELLEDLENSSSAGGIAECFVQRSEDFDIYTLYCMNYPSSLALLRELSLSPPAALWLQERQAQLRHSLPLQSFLLKPVQRILKYHLLLQELGKHWAEGPGTGGREMVEEAIVSMTAVAWYINDMKRKQEHAARLQEVQRRLGGWTGPELSAFGELVLEGAFRGGGGGGPRLRGGERLLFLFSRMLLVAKRRGLEYTYKGHIFCCNLSVSESPRDPLGFKVSDLTIPKHRHLLQAKNQEEKRLWIHCLQRLFFENHPASIPAKAKQVLLENSLHCAPKSKPVLEPLTPPLGSPRPRDARSFTPGRRNTAPSPGPSVIRRGRRQSEPVKDPYVMFPQNAKPGFKHAGSEGELYPPESQPPVSGSAPPEDLEDAGPPTLDPSGTSITEEILELLNQRGLRDPGESMGLHRAQGAPDAPFHM

SEQ ID NO: 213441 - protein, 1386 aa, Artificial Sequence
  derived and/or modified sequence
MPEGAQGLSLSKPSPSLGCGRRGEVCDCGTVCETRTAPAAPTMASPRGSGSSTSLSTVGSEGDPAPGPTPACSASRPEPLPGPPIRLHLSPVGIPGSARPSRLERVAREIVETERAYVRDLRSIVEDYLGPLLDGGVLGLSVEQVGTLFANIEDIYEFSSELLEDLENSSSAGGIAECFVQRSEDFDIYTLYCMNYPSSLALLRELSLSPPAALWLQERQAQLRHSLPLQSFLLKPVQRILKYHLLLQELGKHWAEGPGTGGREMVEEAIVSMTAVAWYINDMKRKQEHAARLQEVQRRLGGWTGPELSAFGELVLEGAFRGGGGGGPRLRGGERLLFLFSRMLLVAKRRGLEYTYKGHIFCCNLSVSESPRDPLGFKVSDLTIPKHRHLLQAKNQEEKRLWIHCLQRLFFENHPASIPAKAKQVLLENSLHCAPKSKPVLEPLTPPLGSPRPRDARSFTPGRRNTAPSPGPSVIRRGRRQSEPVKDPYVMFPQNAKPGFKHAGSEGELYPPESQPPVSGSAPPEDLEDAGPPTLDPSGTSITEEILELLNQRGLRDPGPSTHDIPKFPGDSQVPGDSETLTFQALPSRDSSEEEEEEEEGLEMDERGPSPLHVLEGLESSIAAEMPSIPCLTKIPDVPNLPEIPSRCEIPEGSRLPSLSDISDVFEMPCLPAIPSVPNTPSLSSTPTLSCDSWLQGPLQEPAEAPATRRELFSGSNPGKLGEPPSGGKAGPEEDEEGVSFTDFQPQDVTQHQGFPDELAFRSCSEIRSAWQALEQGQLARPGFPEPLLILEDSDLGGDSGSGKAGAPSSERTASRVRELARLYSERIQQMQRAETRASANAPRRRPRVLAQPQPSPCLPQEQAEPGLLPAFGHVLVCELAFPLTCAQESVPLGPAVWVQAAIPLSKQGGSPDGQGLHVSNLPKQDLPGIHVSAATLLPEQGGSRHVQAPAATPLPKQEGPLHLQVPALTTFSDQGHPEIQVPATTPLPEHRSHMVIPAPSTAFCPEQGHCADIHVPTTPALPKEICSDFTVSVTTPVPKQEGHLDSESPTNIPLTKQGGSRDVQGPDPVCSQPIQPLSWHGSSLDPQGPGDTLPPLPCHLPDLQIPGTSPLPAHGSHLDHRIPANAPLSLSQELPDTQVPATTPLPLPQVLTDIWVQALPTSPKQGSLPDIQGPAAAPPLPEPSLTDTQVQKLTPSLEQKSLIDAHVPAATPLPERGGSLDIQGLSPTPVQTTMVLSKPGGSLASHVARLESSDLTPPHSPPPSSRQLLGPNAAALSRYLAASYISQSLARRQGPGGGAPAASRGSWSSAPTSRASSPPPQPQPPPPPARRLSYATTVNIHVGGGGRLRPAKAQVRLNHPALLASTQESMGLHRAQGAPDAPFHM

SEQ ID NO: 213442 - protein, 1357 aa, Artificial Sequence
  derived and/or modified sequence
MPEGAQGLSLSKPSPSLGCGRRGEVCDCGTVCETRTAPAAPTMASPRGSGSSTSLSTVGSEGDPAPGPTPACSASRPEPLPGPPIRLHLSPVGIPGSARPSRLERVAREIVETERAYVRDLRSIVEDYLGPLLDGGVLGLSVEQVGTLFANIEDIYEFSSELLEDLENSSSAGGIAECFVQRSEDFDIYTLYCMNYPSSLALLRELSLSPPAALWLQERQAQLRHSLPLQSFLLKPVQRILKYHLLLQELGKHWAEGPGTGGREMVEEAIVSMTAVAWYINDMKRKQEHAARLQEVQRRLGGWTGPELSAFGELVLEGAFRGGGGGGPRLRGGERLLFLFSRMLLVAKRRGLEYTYKGHIFCCNLSVSESPRDPLGFKVSDLTIPKHRHLLQAKNQEEKRLWIHCLQRLFFENHPASIPAKAKQVLLENSLHCAPKSKPVLEPLTPPLGSPRPRDARSFTPGRRNTAKPGFKHAGSEGELYPPESQPPVSGSAPPEDLEDAGPPTLDPSGTSITEEILELLNQRGLRDPGPSTHDIPKFPGDSQVPGDSETLTFQALPSRDSSEEEEEEEEGLEMDERGPSPLHVLEGLESSIAAEMPSIPCLTKIPDVPNLPEIPSRCEIPEGSRLPSLSDISDVFEMPCLPAIPSVPNTPSLSSTPTLSCDSWLQGPLQEPAEAPATRRELFSGSNPGKLGEPPSGGKAGPEEDEEGVSFTDFQPQDVTQHQGFPDELAFRSCSEIRSAWQALEQGQLARPGFPEPLLILEDSDLGGDSGSGKAGAPSSERTASRVRELARLYSERIQQMQRAETRASANAPRRRPRVLAQPQPSPCLPQEQAEPGLLPAFGHVLVCELAFPLTCAQESVPLGPAVWVQAAIPLSKQGGSPDGQGLHVSNLPKQDLPGIHVSAATLLPEQGGSRHVQAPAATPLPKQEGPLHLQVPALTTFSDQGHPEIQVPATTPLPEHRSHMVIPAPSTAFCPEQGHCADIHVPTTPALPKEICSDFTVSVTTPVPKQEGHLDSESPTNIPLTKQGGSRDVQGPDPVCSQPIQPLSWHGSSLDPQGPGDTLPPLPCHLPDLQIPGTSPLPAHGSHLDHRIPANAPLSLSQELPDTQVPATTPLPLPQVLTDIWVQALPTSPKQGSLPDIQGPAAAPPLPEPSLTDTQVQKLTPSLEQKSLIDAHVPAATPLPERGGSLDIQGLSPTPVQTTMVLSKPGGSLASHVARLESSDLTPPHSPPPSSRQLLGPNAAALSRYLAASYISQSLARRQGPGGGAPAASRGSWSSAPTSRASSPPPQPQPPPPPARRLSYATTVNIHVGGGGRLRPAKAQVRLNHPALLASTQESMGLHRAQGAPDAPFHM

SEQ ID NO: 213443 - DNA, 1734 bp, Artificial Sequence
  derived and/or modified sequence
atgcccgagggcgcccagggcctgagcctgagcaagcccagccccagcctgggctgcggcagaagaggcgaggtgtgcgactgcggcaccgtgtgcgagaccagaaccgcccccgccgcccccaccatggccagccccagaggcagcggcagcagcaccagcctgagcaccgtgggcagcgagggcgaccccgcccccggccccacccccgcctgcagcgccagcagacccgagcccctgcccggcccccccatcagactgcacctgagccccgtgggcatccccggcagcgccagacccagcagactggagagagtggccagagagatcgtggagaccgagagagcctacgtgagagacctgagaagcatcgtggaggactacctgggccccctgctggacggcggcgtgctgggcctgagcgtggagcaggtgggcaccctgttcgccaacatcgaggacatctacgagttcagcagcgagctgctggaggacctggagaacagcagcagcgccggcggcatcgccgagtgcttcgtgcagagaagcgaggacttcgacatctacaccctgtactgcatgaactaccccagcagcctggccctgctgagagagctgagcctgagcccccccgccgccctgtggctgcaggagagacaggcccagctgagacacagcctgcccctgcagagcttcctgctgaagcccgtgcagagaatcctgaagtaccacctgctgctgcaggagctgggcaagcactgggccgagggccccggcaccggcggcagagagatggtggaggaggccatcgtgagcatgaccgccgtggcctggtacatcaacgacatgaagagaaagcaggagcacgccgccagactgcaggaggtgcagagaagactgggcggctggaccggccccgagctgagcgccttcggcgagctggtgctggagggcgccttcagaggcggcggcggcggcggccccagactgagaggcggcgagagactgctgttcctgttcagcagaatgctgctggtggccaagagaagaggcctggagtacacctacaagggccacatcttctgctgcaacctgagcgtgagcgagagccccagagaccccctgggcttcaaggtgagcgacctgaccatccccaagcacagacacctgctgcaggccaagaaccaggaggagaagagactgtggatccactgcctgcagagactgttcttcgagaaccaccccgccagcatccccgccaaggccaagcaggtgctgctggagaacagcctgcactgcgcccccaagagcaagcccgtgctggagcccctgaccccccccctgggcagccccagacccagagacgccagaagcttcacccccggcagaagaaacaccgcccccagccccggccccagcgtgatcagaagaggcagaagacagagcgagcccgtgaaggacccctacgtgatgttcccccagaacgccaagcccggcttcaagcacgccggcagcgagggcgagctgtacccccccgagagccagccccccgtgagcggcagcgccccccccgaggacctggaggacgccggcccccccaccctggaccccagcggcaccagcatcaccgaggagatcctggagctgctgaaccagagaggcctgagagaccccggcgagagcatgggcctgcacagagcccagggcgcccccgacgcccccttccacatgtag

SEQ ID NO: 213444 - DNA, 4161 bp, Artificial Sequence
  derived and/or modified sequence
atgcccgagggcgcccagggcctgagcctgagcaagcccagccccagcctgggctgcggcagaagaggcgaggtgtgcgactgcggcaccgtgtgcgagaccagaaccgcccccgccgcccccaccatggccagccccagaggcagcggcagcagcaccagcctgagcaccgtgggcagcgagggcgaccccgcccccggccccacccccgcctgcagcgccagcagacccgagcccctgcccggcccccccatcagactgcacctgagccccgtgggcatccccggcagcgccagacccagcagactggagagagtggccagagagatcgtggagaccgagagagcctacgtgagagacctgagaagcatcgtggaggactacctgggccccctgctggacggcggcgtgctgggcctgagcgtggagcaggtgggcaccctgttcgccaacatcgaggacatctacgagttcagcagcgagctgctggaggacctggagaacagcagcagcgccggcggcatcgccgagtgcttcgtgcagagaagcgaggacttcgacatctacaccctgtactgcatgaactaccccagcagcctggccctgctgagagagctgagcctgagcccccccgccgccctgtggctgcaggagagacaggcccagctgagacacagcctgcccctgcagagcttcctgctgaagcccgtgcagagaatcctgaagtaccacctgctgctgcaggagctgggcaagcactgggccgagggccccggcaccggcggcagagagatggtggaggaggccatcgtgagcatgaccgccgtggcctggtacatcaacgacatgaagagaaagcaggagcacgccgccagactgcaggaggtgcagagaagactgggcggctggaccggccccgagctgagcgccttcggcgagctggtgctggagggcgccttcagaggcggcggcggcggcggccccagactgagaggcggcgagagactgctgttcctgttcagcagaatgctgctggtggccaagagaagaggcctggagtacacctacaagggccacatcttctgctgcaacctgagcgtgagcgagagccccagagaccccctgggcttcaaggtgagcgacctgaccatccccaagcacagacacctgctgcaggccaagaaccaggaggagaagagactgtggatccactgcctgcagagactgttcttcgagaaccaccccgccagcatccccgccaaggccaagcaggtgctgctggagaacagcctgcactgcgcccccaagagcaagcccgtgctggagcccctgaccccccccctgggcagccccagacccagagacgccagaagcttcacccccggcagaagaaacaccgcccccagccccggccccagcgtgatcagaagaggcagaagacagagcgagcccgtgaaggacccctacgtgatgttcccccagaacgccaagcccggcttcaagcacgccggcagcgagggcgagctgtacccccccgagagccagccccccgtgagcggcagcgccccccccgaggacctggaggacgccggcccccccaccctggaccccagcggcaccagcatcaccgaggagatcctggagctgctgaaccagagaggcctgagagaccccggccccagcacccacgacatccccaagttccccggcgacagccaggtgcccggcgacagcgagaccctgaccttccaggccctgcccagcagagacagcagcgaggaggaggaggaggaggaggagggcctggagatggacgagagaggccccagccccctgcacgtgctggagggcctggagagcagcatcgccgccgagatgcccagcatcccctgcctgaccaagatccccgacgtgcccaacctgcccgagatccccagcagatgcgagatccccgagggcagcagactgcccagcctgagcgacatcagcgacgtgttcgagatgccctgcctgcccgccatccccagcgtgcccaacacccccagcctgagcagcacccccaccctgagctgcgacagctggctgcagggccccctgcaggagcccgccgaggcccccgccaccagaagagagctgttcagcggcagcaaccccggcaagctgggcgagccccccagcggcggcaaggccggccccgaggaggacgaggagggcgtgagcttcaccgacttccagccccaggacgtgacccagcaccagggcttccccgacgagctggccttcagaagctgcagcgagatcagaagcgcctggcaggccctggagcagggccagctggccagacccggcttccccgagcccctgctgatcctggaggacagcgacctgggcggcgacagcggcagcggcaaggccggcgcccccagcagcgagagaaccgccagcagagtgagagagctggccagactgtacagcgagagaatccagcagatgcagagagccgagaccagagccagcgccaacgcccccagaagaagacccagagtgctggcccagccccagcccagcccctgcctgccccaggagcaggccgagcccggcctgctgcccgccttcggccacgtgctggtgtgcgagctggccttccccctgacctgcgcccaggagagcgtgcccctgggccccgccgtgtgggtgcaggccgccatccccctgagcaagcagggcggcagccccgacggccagggcctgcacgtgagcaacctgcccaagcaggacctgcccggcatccacgtgagcgccgccaccctgctgcccgagcagggcggcagcagacacgtgcaggcccccgccgccacccccctgcccaagcaggagggccccctgcacctgcaggtgcccgccctgaccaccttcagcgaccagggccaccccgagatccaggtgcccgccaccacccccctgcccgagcacagaagccacatggtgatccccgcccccagcaccgccttctgccccgagcagggccactgcgccgacatccacgtgcccaccacccccgccctgcccaaggagatctgcagcgacttcaccgtgagcgtgaccacccccgtgcccaagcaggagggccacctggacagcgagagccccaccaacatccccctgaccaagcagggcggcagcagagacgtgcagggccccgaccccgtgtgcagccagcccatccagcccctgagctggcacggcagcagcctggacccccagggccccggcgacaccctgccccccctgccctgccacctgcccgacctgcagatccccggcaccagccccctgcccgcccacggcagccacctggaccacagaatccccgccaacgcccccctgagcctgagccaggagctgcccgacacccaggtgcccgccaccacccccctgcccctgccccaggtgctgaccgacatctgggtgcaggccctgcccaccagccccaagcagggcagcctgcccgacatccagggccccgccgccgccccccccctgcccgagcccagcctgaccgacacccaggtgcagaagctgacccccagcctggagcagaagagcctgatcgacgcccacgtgcccgccgccacccccctgcccgagagaggcggcagcctggacatccagggcctgagccccacccccgtgcagaccaccatggtgctgagcaagcccggcggcagcctggccagccacgtggccagactggagagcagcgacctgacccccccccacagccccccccccagcagcagacagctgctgggccccaacgccgccgccctgagcagatacctggccgccagctacatcagccagagcctggccagaagacagggccccggcggcggcgcccccgccgccagcagaggcagctggagcagcgcccccaccagcagagccagcagcccccccccccagccccagcccccccccccccccgccagaagactgagctacgccaccaccgtgaacatccacgtgggcggcggcggcagactgagacccgccaaggcccaggtgagactgaaccaccccgccctgctggccagcacccaggagagcatgggcctgcacagagcccagggcgcccccgacgcccccttccacatgtag

SEQ ID NO: 213445 - DNA, 1734 bp, Artificial Sequence
  derived and/or modified sequence
atgcccgagggcgcccaggggctctcattatccaagccctccccttcgttagggtgcggacggcggggtgaggtctgcgactgtggtactgtttgtgagacccgaaccgctcccgccgcccctactatggccagtcctcgcggaagcgggtctagcacctctctcagcaccgttggctcagagggcgatcccgctcccggcccgacgcccgcctgttcggcctcgcgacccgagcctcttcccggaccccccattcggcttcatttatcacctgtcggcatcccaggctcagcccggccatcacgtctcgagagagtcgctcgagagatcgtggagaccgagagggcctacgttagggacctcagatcaatcgtggaagattatttgggtcccctactcgacggcggcgtgctgggcctttccgtcgaacaggtggggacacttttcgcgaatattgaggatatttacgaattttcatccgagctgttagaggacctggaaaattcctccagcgcgggaggcatagccgaatgtttcgtgcagagatccgaggattttgatatctacacactgtattgtatgaattaccccagctctctggccctgcttcgtgaactgagcctgtcacctccagccgctctgtggctgcaggagcgacaggcccaactgcggcactctttacctctccaaagctttcttcttaaaccggtccagcgcattctgaaatatcatctgctcctccaggaactcggcaagcattgggccgagggcccgggaactgggggacgggaaatggtggaggaagccattgtttcaatgacagcagtcgcctggtatattaatgacatgaaaagaaagcaggagcacgcagctcggctccaggaagttcagcggagactcgggggctggacaggtcctgaactaagtgctttcggggaactcgtgttagagggtgcattccgtgggggtggaggcggggggccacgcctgagagggggcgaaaggttactgttcttattttctcggatgctactagtcgccaaacggcgggggctggagtacacgtacaagggacacatcttttgctgtaacctctctgtatccgagagtccacgcgaccccctgggcttcaaggtgagtgacctcaccatcccaaagcacagacacctgctgcaggctaagaatcaagaggaaaaacgtctatggattcattgcctgcagcgactgtttttcgagaaccatccagcatctattccagccaaggcaaagcaagtgttgcttgagaactctctgcattgtgccccaaagagtaaacctgttttggagccactcacgcctccgctcggtagtccacgcccccgggatgctcgttccttcactccgggtcggcgtaatacagcaccctctcccggcccttctgtgattagacgagggcggaggcagtctgagcctgtgaaagacccgtacgtgatgtttcctcagaatgcaaagcccggattcaaacatgctggttccgagggggagctatatcctccagaaagccagccacctgtttcaggctccgccccccctgaagacctggaagatgcaggcccaccgactctggacccgagtggcaccagcatcaccgaggagatcttggagctgctcaatcagcgggggctgcgagaccctggagaatccatgggtttgcaccgcgcgcaaggcgctcctgacgcccccttccacatgtag

SEQ ID NO: 213446 - DNA, 4161 bp, Artificial Sequence
  derived and/or modified sequence
atgcctgaaggcgcccagggcctatccctgtcaaaacccagcccttctcttggatgtggacgccggggtgaggtttgtgactgtggtacggtgtgcgaaactaggactgcgcccgccgcccccactatggcctcgccaaggggctccggctccagcacttcactaagcacagttggtagcgagggcgacccggctccaggccccaccccagcttgctctgccagccgccctgagccattaccaggacctcccatccgcttacacttgagccccgtaggcattccgggtagcgcaagaccctccaggctggagcgcgtggcacgggagatcgtagagaccgaaagagcttacgttagggatctgcggtcaatagtggaagattacttaggacccctcttagacggcggcgtgttgggcctatcggtggagcaggtgggcactctgtttgcaaacatcgaagacatctacgaattttctagtgagctactcgaagatctggaaaattcgagtagcgccgggggcatcgcagaatgctttgtgcagcggtctgaagatttcgatatatacaccctgtattgtatgaattatccttcctccctcgctctgctgcgcgagctctcacttagtcccccagctgctctgtggctccaggagaggcaggcacagttgcggcatagcttaccactgcagtcattcctgctcaagcctgttcagaggatcctaaagtaccacctgctgttgcaggagctaggcaaacattgggccgaggggcccgggaccggcggtcgggagatggtggaagaggcgattgtgagcatgactgccgtggcatggtacattaacgacatgaagcgcaaacaggaacacgctgccaggttacaggaggtgcaacgtcgattgggcgggtggactggccccgagctctcagcttttggcgagcttgttttagagggggcctttcggggagggggcggaggcggacccagactccggggaggtgagcgactgctcttcctatttagcagaatgcttctcgtggctaagcggagggggctggagtacacatataaaggccacatcttctgctgcaacctgagtgtgtctgagtcaccaagagacccactgggctttaaagtgagtgacctgacaatccctaagcacagacatctgctacaggctaagaatcaagaggagaaacggctctggatccactgcctccagaggctgttctttgagaatcacccggctagtatcccagccaaggcaaagcaagtcttactggagaatagtttacattgcgccccaaagtctaaaccagtgttggagcccctcaccccgcccttgggcagcccaagacccagggacgcccggagcttcacgcctggacgccgcaacaccgcaccctcacccggcccctccgtgatccggagaggtcgcaggcagtccgagccggtgaaagacccatatgtcatgttcccccagaatgcgaaacctggtttcaagcacgccgggtctgagggggagctttacccccctgagtctcagcccccagtctctggaagtgctccacctgaggatctggaggatgcaggcccgcccacactggacccatccgggacctctataacagaggaaattctggagcttctcaatcagcggggcctgcgggatcctggtccatcaacccacgacattccaaagtttcctggggacagccaagtccccggagactccgagacactgacattccaagcactaccctctcgtgattctagcgaagaggaagaagaagaagaagagggcctagaaatggatgagcggggtcccagccctctgcatgtcctggaaggccttgagtccagcatcgccgcagaaatgccgagtatcccatgccttactaaaatcccagacgtccccaacttgcccgagataccatcaagatgcgagatacctgagggcagtcgattgccaagtctttcggatatttctgatgtattcgagatgccttgcttacctgcaatcccctccgttcccaatactccaagtttgtcatctacaccaaccctctcctgcgacagctggctgcagggccctctgcaggaaccagctgaggctcctgctaccagacgtgaactgttttcaggtagtaaccctggtaagctgggtgaacctccatccgggggcaaggcaggacccgaggaggacgaagagggtgtgtccttcaccgactttcaacctcaggatgttacgcaacatcagggcttcccagatgaactggcttttcgatcgtgcagcgaaattcggtctgcctggcaggccctggaacagggacaattagcccgcccagggttccccgaaccactgcttatcttagaagactctgacctggggggcgactcagggtctggaaaggcgggcgctccctctagtgaacgtacggcaagcagagttagggaactggctaggctctacagcgagcgcattcagcaaatgcagagggccgaaactcgcgcaagcgctaacgcacctcgtagaagacctagagtcttggcgcaaccacaaccctccccctgcctccctcaggaacaggccgagcctgggctcttacccgcttttggtcatgttttggtctgcgagctagcttttcccctgacgtgcgcgcaggaatcagttcctctggggccagcagtgtgggtccaggccgctattcccctctctaaacaggggggatcgcccgatggccagggtttgcatgtgtcaaacttgcctaaacaagatctgcctggtattcacgtgtccgcagcgacactcctgcccgaacagggggggtcccgccatgtccaagctccagcagccactcctcttccaaagcaagagggtcctctccaccttcaggttcccgccctgactactttctccgatcaagggcacccagaaattcaggtgccagcaactaccccgctacctgagcatagatcgcatatggtgatcccagctcccagcaccgcattttgtcccgagcaggggcactgcgcggacatccacgttcccacaacccctgcccttcccaaggaaatctgcagcgacttcacagtgtctgtaaccacccctgtgcctaagcaggagggccatttagattcagagagtccgaccaatatcccacttactaaacagggggggtcccgggatgtgcaggggcccgatcctgtttgtagtcagcctattcagccactaagttggcatggaagctccctggaccctcaggggcctggagatactctgccccccctgccatgtcatctgcccgatctacagatacctggtacatctccactgcccgctcatgggtcccacctcgaccatcgcatcccagctaatgcgccactaagtctgagccaggaattgccagatacacaagttcctgcgactacacccctccccctccctcaggtactaaccgatatttgggtgcaggctcttcctacgagcccgaaacagggcagcttgcccgacatccaaggacccgccgcagctcccccactccccgagcccagtctaacagatacccaagtccagaaacttacccctagcctggagcagaagtcattaatcgacgctcatgtgcctgctgcaacccccctacctgaaagagggggctccctagacatccaagggctgtcaccaactccagttcagacaactatggtgctaagtaaacccggtggatctctcgcctcacacgtagcaagattagaaagcagtgatctcacgccccctcactcacctcctccatcttctcgccagcttctcggacccaacgccgccgcattgtcccgctatctggccgcctcctacatctcacagtccctggccagacgacagggccccggcgggggcgcgccagctgccagccgcggctcttggtcctcagctccaacctcccgggcttctagtccacctcctcagccacagcctccaccacctcccgctagacggctttcttatgctactacagtcaatatccacgtgggcggcggggggaggttgcggcccgcaaaggcccaggtaaggctcaaccaccctgctttgctcgcttcgacccaggagtccatggggctccaccgggctcagggcgcacctgacgctccattccatatgtag

SEQ ID NO: 213447 - DNA, 1734 bp, Artificial Sequence
  derived and/or modified sequence
atgcccgaaggagcccaggggttatctctttcaaaaccctctccttcccttggttgtgggcggcgcggagaagtttgtgactgcggtacggtttgtgagacacgcaccgcgcccgccgcccccacaatggctagccctaggggatcaggatctagtacatccctgagtaccgtggggagcgagggagatccagccccaggccccacacctgcctgttccgcttcccggcctgagccgctgcctggcccccctataaggctccacctttcacccgtgggaatacccggctccgcccggccgagccgacttgaaagggtggcacgggaaattgtggaaactgaacgagcctacgttcgcgatctccggtccatcgtcgaggattaccttgggcccctacttgatggcggagtcctgggattatctgttgaacaggtaggaaccctgtttgcaaatattgaggacatatatgagttttcttctgagctcttagaagaccttgaaaactcttcttctgccggaggtattgcagagtgctttgtgcaacgtagtgaagactttgacatctacacgctctattgtatgaactatccctccagcctggccttgctgcgtgagttatcactgagtcctccggctgctctctggctccaggaacggcaggcccaactgcgacacagcctccctctgcagagcttcctgctcaagccagtgcaacgtatcctcaagtatcatctgttgctgcaggaactcgggaagcattgggctgaggggcccggaaccggtggacgtgagatggtagaggaggctatagtctccatgaccgccgttgcctggtacatcaacgatatgaaacgaaaacaggaacacgcggcaagactgcaagaagtacagagaaggctgggaggatggacgggtccagaattgtctgctttcggggaattagtgttagaaggcgctttccggggtggcggcggcggtggccccaggctgagagggggagaaaggcttttattcctcttttcgcggatgttgctcgtggctaagcgcaggggtttggagtacacttataaaggccatattttttgttgcaacctgtcggtctctgaatccccccgtgaccctctgggcttcaaggtgagcgatctcaccatccccaagcatcgccacttactccaggcaaagaatcaagaggagaagcgcctgtggatacattgccttcagcggctctttttcgagaaccatccggccagcatccctgctaaggctaaacaggttcttttagaaaatagcttgcactgcgcacccaagtcgaagccggttctggagccgttgactccccctttaggctcccctcgcccacgtgatgctaggagcttcacacctgggcgacggaatacagccccaagcccaggtccttcggtcatacggcgggggcgccgccagtcggagcccgtcaaagacccgtacgtaatgttccctcagaatgccaaaccgggattcaagcacgctggatctgagggagaactctaccctcccgaatcgcagccccctgtgagcggatctgcacctcctgaagatctggaagacgccggaccacctaccctagatccttcaggaacctcgattacagaagagatcctcgaactactcaaccagcgcggcctgcgcgatcccggtgagtccatgggcctccatcgagcacagggtgctcctgatgcaccattccacatgtag

SEQ ID NO: 213448 - DNA, 1734 bp, Artificial Sequence
  derived and/or modified sequence
atgcctgagggcgcccagggcctgagcctgagcaagcccagccccagcctgggctgcggcagaagaggagaggtgtgtgactgtggcaccgtgtgtgagaccaggacagccccagctgcccccaccatggccagcccccggggcagcggcagcagcaccagcctgagcacagtgggcagcgagggggaccctgcccctggccccaccccagcctgcagcgccagcaggcctgagcccctgcccggcccccccatccggctgcacctgagccctgtgggcatccctggcagcgcccggcccagccggctggagcgggtggcccgggagatcgtggagacagagcgggcctacgtgcgggacctgcggagcatcgtggaggactacctgggccccctgctggatggcggcgtgctgggcctgtctgtggagcaggtgggcaccctgtttgccaacatcgaggacatctatgagttcagcagcgagctgctggaggacctggagaacagcagcagcgctgggggcattgctgaatgttttgtgcagaggtctgaggactttgacatctacaccctgtactgcatgaactaccccagcagcctggccctgctgcgggagctgagcctgagccccccagctgccctgtggctgcaggagcggcaggcccagctgcggcacagcctgcccctgcagagcttcctgctgaagcctgtgcagaggatcctgaagtaccacctgctgctgcaggagctgggcaagcactgggccgagggccctggcaccggcggccgggagatggtggaggaggccatcgtgtccatgacagctgtggcctggtacatcaatgacatgaagaggaagcaggagcacgccgcccggctgcaggaggtgcagaggcggctgggcggctggacaggccctgagctgagcgcctttggagagctggtgctggagggcgccttccggggcggcggcggcggcggcccccggctgcggggcggggagcggctgctcttcctgttcagcaggatgctgctggtggccaagagaagaggcctggagtacacctacaagggccacatcttctgctgcaacctgtctgtgtctgagagcccccgggaccccctgggcttcaaggtgtctgacctgaccatccccaagcaccgccacctgctgcaggccaagaaccaggaggagaagaggctgtggatccactgcctgcagaggctcttctttgagaaccacccagccagcatcccagccaaggccaagcaggtgctgctggagaacagcctgcactgtgcccccaagagcaagcctgtgctggagcccctgaccccacccctgggcagcccccggcccagagatgcccggagcttcaccccaggaagaagaaacacagcccccagccctggccccagcgtcatccggcggggccggcggcagagcgagcctgtgaaggacccctacgtgatgttcccccagaatgccaagccaggcttcaagcatgctggcagcgagggggagctgtacccacctgagagccagccccctgtgtctggcagcgcccccccagaggacctggaggatgctggcccccccaccctggaccccagcggcaccagcatcacagaggagatcctggagctgctgaaccagaggggcctgcgggaccccggggagagcatgggcctgcaccgggcccagggcgccccagatgcccccttccacatgtag

SEQ ID NO: 213449 - DNA, 4161 bp, Artificial Sequence
  derived and/or modified sequence
atgcctgagggcgcccagggcctgagcctgagcaagcccagccccagcctgggctgcggcagaagaggagaggtgtgtgactgtggcaccgtgtgtgagaccaggacagccccagctgcccccaccatggccagcccccggggcagcggcagcagcaccagcctgagcacagtgggcagcgagggggaccctgcccctggccccaccccagcctgcagcgccagcaggcctgagcccctgcccggcccccccatccggctgcacctgagccctgtgggcatccctggcagcgcccggcccagccggctggagcgggtggcccgggagatcgtggagacagagcgggcctacgtgcgggacctgcggagcatcgtggaggactacctgggccccctgctggatggcggcgtgctgggcctgtctgtggagcaggtgggcaccctgtttgccaacatcgaggacatctatgagttcagcagcgagctgctggaggacctggagaacagcagcagcgctgggggcattgctgaatgttttgtgcagaggtctgaggactttgacatctacaccctgtactgcatgaactaccccagcagcctggccctgctgcgggagctgagcctgagccccccagctgccctgtggctgcaggagcggcaggcccagctgcggcacagcctgcccctgcagagcttcctgctgaagcctgtgcagaggatcctgaagtaccacctgctgctgcaggagctgggcaagcactgggccgagggccctggcaccggcggccgggagatggtggaggaggccatcgtgtccatgacagctgtggcctggtacatcaatgacatgaagaggaagcaggagcacgccgcccggctgcaggaggtgcagaggcggctgggcggctggacaggccctgagctgagcgcctttggagagctggtgctggagggcgccttccggggcggcggcggcggcggcccccggctgcggggcggggagcggctgctcttcctgttcagcaggatgctgctggtggccaagagaagaggcctggagtacacctacaagggccacatcttctgctgcaacctgtctgtgtctgagagcccccgggaccccctgggcttcaaggtgtctgacctgaccatccccaagcaccgccacctgctgcaggccaagaaccaggaggagaagaggctgtggatccactgcctgcagaggctcttctttgagaaccacccagccagcatcccagccaaggccaagcaggtgctgctggagaacagcctgcactgtgcccccaagagcaagcctgtgctggagcccctgaccccacccctgggcagcccccggcccagagatgcccggagcttcaccccaggaagaagaaacacagcccccagccctggccccagcgtcatccggcggggccggcggcagagcgagcctgtgaaggacccctacgtgatgttcccccagaatgccaagccaggcttcaagcatgctggcagcgagggggagctgtacccacctgagagccagccccctgtgtctggcagcgcccccccagaggacctggaggatgctggcccccccaccctggaccccagcggcaccagcatcacagaggagatcctggagctgctgaaccagaggggcctgcgggaccccggccccagcacccatgacatccccaagtttcctggggacagccaggtgcctggggacagcgagaccctgaccttccaggccctgcccagccgggacagcagcgaggaggaggaggaggaggaggagggcctggagatggatgagcggggccccagccccctgcacgtgctggagggcctggagagcagcattgctgctgagatgcccagcatcccctgcctgaccaagatcccagatgtgcccaacctgcctgagatccccagccgctgtgagatccctgagggcagccggctgcccagcctgagtgacatcagtgatgtgtttgagatgccctgcctgcctgccatccccagcgtgcccaacacccccagcctgagcagcacccccaccctgagctgtgacagctggctgcagggccccctgcaggagcctgctgaggccccagccacccggcgggagctgttcagcggcagcaaccctgggaagctgggggagccccccagcggcggcaaggccggccctgaggaggatgaggagggcgtgtccttcacagacttccagccccaggatgtgacccagcaccagggcttcccagatgagctggccttccgcagctgcagcgagatccgcagcgcctggcaggccctggagcagggccagctggcccggcccggcttccctgagcccctgctgatcctggaggacagcgacctgggcggggacagcggcagcggcaaggccggggcccccagcagcgagaggacagccagccgggtgcgggagctggcccggctgtacagcgagcgcatccagcagatgcagagagctgagacccgggccagcgccaatgcccccaggagaagaccccgggtgctggcccagccccagcccagcccctgcctgccccaggagcaggccgagcccggcctgctgcctgccttcggccacgtgctggtgtgtgagctggccttccccctgacctgtgcccaggagagcgtgcccctgggccctgctgtgtgggtgcaggccgccatccccctgagcaagcagggcggcagcccagatggccagggcctgcacgtgagcaacctgcccaagcaggacctgcccggcatccacgtgtctgctgccaccctgctgcctgagcagggcggcagccgccacgtgcaggccccagctgccacccccctgcccaagcaggagggccccctgcacctgcaggtgcctgccctgaccaccttcagtgaccagggccaccctgagatccaggtgcctgccaccacccccctgcctgagcacaggagccacatggtgatcccagcccccagcacagccttctgcccagagcagggccactgtgccgacatccacgtgcccaccaccccagccctgcccaaggagatctgcagcgacttcaccgtgtctgtgaccacccctgtgcccaagcaggagggccacctggacagcgagagccccaccaacatccccctgaccaagcagggcggcagcagagatgtgcagggccctgaccctgtgtgcagccagcccatccagcccctgtcctggcacggcagcagcctggacccccagggccctggggacaccctgccccccctgccctgccacctgcctgacctgcagatccctggcaccagccccctgcctgcccacggcagccacctggaccaccgcatcccagccaatgcccccctgagcctgagccaggagctgcctgacacccaggtgcctgccaccacccccctgcccctgccccaggtgctgacagacatctgggtgcaggccctgcccaccagccccaagcagggcagcctgcctgacatccagggccctgctgctgccccacccctgcctgagcccagcctgacagacacccaggtgcagaagctgacccccagcctggagcagaagagcctgattgatgcccacgtgcctgctgccacccccctgcctgagcggggcggcagcctggacatccagggcctgagccccacccctgtgcagaccaccatggtgctgagcaagccaggcggcagcctggccagccacgtggcccggctggagagcagtgacctgaccccaccccacagccccccacccagcagccggcagctgctgggccccaatgctgctgccctgagccgctacctggccgccagctacatcagccagagcctggcccggcggcagggccctgggggcggggccccagctgccagccggggctcctggagcagcgcccccaccagccgggccagcagccccccaccccagccccagcccccacctcctccagcccggcggctgtcctatgccaccaccgtgaacatccacgtgggcggcggcggccgcctgcggcctgccaaggcccaggtgcggctgaaccacccagccctgctggccagcacccaggagagcatgggcctgcaccgggcccagggcgccccagatgcccccttccacatgtag

SEQ ID NO: 213450 - DNA, 1734 bp, Artificial Sequence
  derived and/or modified sequence
atgcccgagggcgcccagggcctgagcctgagcaagcccagcccctcactcggctgcggacggagaggagaagtgtgtgattgcgggaccgtttgcgagacacggacagctcctgctgctccgactatggccagtccgcggggtagcggatccagtacgagcctttccaccgtcgggagcgagggcgatcccgcacctggtcctacccccgcttgttctgcatcacgacctgaacctctgccggggccccctattagactgcatctctcacccgtaggcattcccggcagcgctcgcccaagccgcctggaaagggtagccagagaaatagttgagaccgagagggcatatgtgcgcgatctccgatcaatagtcgaggattacctgggacccctgctggacggtggggtgctaggtcttagtgtcgagcaagttggaactttgtttgccaacatcgaggacatttatgaatttagttcagaacttttggaagatctggaaaattcttcgagcgcgggcggaatcgctgaatgttttgtccagaggagtgaggatttcgacatttacaccctctactgtatgaattacccatctagcctcgccctgctgcgcgagctttccctgtctccaccagccgctctgtggctgcaggagcgacaggcgcagttgcggcactcactgcccctccaatcgtttcttttgaagcccgtccagagaatactcaagtaccatttactgctgcaagaactgggcaagcactgggcagaaggcccaggaaccggaggccgagagatggtcgaagaagctatcgtatcaatgacggctgtggcctggtacattaatgatatgaaacgcaagcaggagcacgccgcacgccttcaggaagtgcagcggcgtctaggcgggtggacgggccccgaactgtctgccttcggcgaactcgtgctcgagggagccttccggggcggggggggaggcggcccacgtttgagggggggtgaacgtctgctgtttcttttttcccgcatgttgctggtggccaagaggcgtggcctggaatacacatataaggggcatattttttgctgtaatctcagtgtgtcggagagccctagggatcctctcggcttcaaggtgtccgacttgacaattcctaaacaccgtcacctcctgcaggcaaagaaccaggaggagaagagactctggatccactgcctgcagcgcctcttcttcgagaatcaccctgcatcgattccagctaaggctaagcaagttctgctggaaaattctctgcattgcgctccgaagtctaaaccggtgctcgagccactgaccccccccctaggctcccctagaccacgcgacgctcggtcatttactcccggtcgccgcaacacggctccctctccaggtcccagtgttatccgcaggggccgccggcagtcagagcctgtgaaagatccctacgttatgtttccgcaaaacgccaaacctggttttaagcacgccggaagtgaaggtgaactgtacccccctgagtcccagcctcctgtgtccgggtcagcccctccggaggacttagaagacgcggggccccctactttagatccaagcggcacaagcatcaccgaggagatccttgaattgctgaaccagcggggcctccgcgaccccggggagagcatgggactacatagggcccagggcgcccctgatgcaccctttcacatgtag

SEQ ID NO: 213451 - DNA, 4161 bp, Artificial Sequence
  derived and/or modified sequence
atgcccgagggcgcccagggcctgagcctgagcaagcccagcccctcacttggatgtggcaggcggggcgaagtgtgcgattgtgggactgtgtgcgaaaccagaacagctcctgcggctcccaccatggccagcccgcggggttctggttcttcgacatctctgagtaccgttgggagcgaaggcgatccagcacccggtccaacacccgcatgttccgccagtcggcccgagcctctccccgggccccccattcggctccacttgagccctgtgggcatccccggatccgcaaggccctctcgattggaacgggtagctagagagattgtcgagacagaacgggcatatgtgagggacttgcggagtattgtggaggactatttaggaccacttctcgacggcggcgttctgggacttagtgtggagcaggtcggcacactgtttgcaaacatcgaagacatctatgaattctcctccgaactgctggaggacctggaaaattcttcctccgcagggggcattgctgaatgttttgttcagaggtctgaagattttgacatctacaccttatactgtatgaactaccccagcagtcttgccctgctgcgcgaactctctctcagccctccggcagctctttggctgcaggagagacaagctcaactacggcatagtctgcctttgcagtcattcctgctgaagccagtgcagagaatcctaaaataccacctcctactccaggagctcgggaagcactgggcagaaggccctgggactggcggacgcgagatggtggaggaagccatagtaagtatgaccgcagtggcttggtatattaacgatatgaagagaaagcaggaacatgccgctcgacttcaggaggtccaacggcgcctaggcggatggacagggccggaactgtcggcttttggagaactggtgctcgagggagcgttccgaggaggaggaggtggtggacctagattgcgaggaggagaacgcctgctgtttctgttcagcaggatgctgttggtcgcaaagcgcagagggctggagtacacctacaaaggccacatcttctgctgcaatttgagcgtttccgaaagtcctcgcgaccctctgggcttcaaagtctctgatcttacaatccccaagcatcgccacttattgcaggctaaaaaccaggaggaaaagcgcctgtggattcactgtttgcagcggctattcttcgagaatcaccccgctagcattccggcaaaggccaagcaagtcctgttggaaaactctctccattgtgcccctaagagcaaaccagttctggaacccctgacccccccgctcggctcacctcgccctagggacgctaggagctttacccctggacgacgtaacactgcgccttcacctggacccagcgtgatacgaagggggcgccgccagtcagagccagtgaaggacccctacgtgatgtttccccagaacgcgaagcccggattcaaacacgccgggtctgagggcgagctgtatcctccagaatcacaacctcccgtgtccggcagcgctccccctgaagaccttgaggatgccggaccgcccacccttgacccgagcgggacatcgatcacggaggagatcctcgagttgctcaaccagagaggcctgagagatccgggccccagtacacatgatatccctaagttccccggcgactcccaagtgccgggcgatagtgagactctcacctttcaggctctgcccagcagagattccagcgaggaagaagaggaggaagaggaggggttagagatggacgaaaggggcccaagtccactgcacgtgctcgagggcctcgaatcctctatagctgctgagatgccatcgatcccctgtttgacgaagatcccggatgtgcctaatctaccggagatcccctcccggtgcgaaattccagagggatcccgcctaccaagcctcagtgacatttcagacgtcttcgagatgccttgcctacccgctatcccctccgtccccaacacccccagcctgagctcaacacctaccctctcttgcgactcgtggctccaggggcctctccaagagccagccgaggcacccgctacacgacgggagcttttttctggatcaaaccccggcaagcttggagaaccccccagtggagggaaggccggtcctgaggaggacgaagagggcgtctctttcacagacttccagccacaagacgttactcagcatcagggtttcccagatgagcttgcctttaggagctgtagtgagattcgctccgcctggcaggctctcgagcaaggtcaactagcacgccctgggtttccagagcctctgctgatcctggaggattctgacttgggcggtgatagtggttcgggtaaggccggggcgccctcaagcgagaggaccgcaagtagggtgagagagttggctcggctctattctgaacggatacaacagatgcagcgggctgaaaccagagcttctgccaacgcccccaggcggaggccccgcgttctggcccagccgcaaccttcaccctgcctgccacaggaacaggctgaacccggcctgctgccggctttcggacacgtgttggtttgcgagctggctttccctctgacgtgcgcgcaggaatctgttccattgggtccagctgtctgggtgcaggctgccataccgctgtccaagcaaggaggatcccccgacggacaggggctgcacgtatctaacttaccaaaacaagatctaccagggatccacgtgagcgcagctacactattgccagaacaggggggctctaggcatgtgcaggcccctgctgccaccccgctgccaaaacaggaaggacctttgcacctgcaagtgcctgccttaactacttttagcgaccagggccacccagaaatccaggtgcccgccaccacccccttaccagagcatcggtcacatatggtgatacctgcaccaagcacggctttttgccccgaacaaggacactgcgctgatatacacgttccgactacccccgcactcccgaaagagatttgtagcgactttactgtgagtgtgaccacacctgttcccaaacaagaaggtcatttagactcagagagccctacaaatatccccctcaccaagcaagggggaagccgggacgtccaagggcccgaccccgtctgctctcagcccatccagcctttgagttggcacggttcatcactggacccccagggaccaggggatacactgccgcctttaccatgtcacttgccagacctgcagattcccggaacttcaccattgcctgcccatggaagtcatctggatcaccgcattcctgctaacgcccctctgagcctctcccaggagttgcctgatacgcaggtgccagcgacaactcctctacccctacctcaggtgttgaccgacatatgggtacaggccttgcctacatctcctaagcagggctctcttcccgatatccagggtcccgcagccgctccccccctgcctgagcccagcctaactgacactcaggtgcagaagctgactccatctctcgaacagaaaagtctcattgatgcccacgttcccgccgcaacccccctgcctgagcgcggtggctctctcgatatacagggcctgagccccacccccgtgcagactacgatggttctgtccaagccggggggttcactggcatcgcatgttgcacgcctcgagtcaagcgatctgactccccctcactccccccccccctccagcagacaactgctcgggcccaacgccgccgccctttcaagatatttggctgccagctacatctctcaatccctcgccaggagacaggggcccggaggtggggctcccgctgcgtcacgtggatcctggtcctccgcccctacgtccagggcttcctctccccccccacagccacagcctcctccaccccctgcccggcggctatcctatgccactaccgtgaacatccatgtagggggcggcggccgtctgcgccctgccaaggctcaggtgaggctcaatcaccccgccctgttggcgagcactcaggagtctatgggcctgcatcgtgcccagggagccccagacgcgccgtttcatatgtag

SEQ ID NO: 213452 - DNA, 1734 bp, Artificial Sequence
  derived and/or modified sequence
atgcccgagggcgcccagggcctgagcctgagcaagcccagccccagtcttggctgcggccggcgtggagaggtgtgcgattgtggcacggtatgtgagacaaggacagctcctgccgcacctactatggcttctccccggggatctgggagcagcacatctctgagtaccgttggatccgagggagaccctgcacccggccctacccctgcctgctcagcttcccgccctgagcctttacccgggcctcccatccgcctccatttgtccccagttggaattcccggctccgccagaccatcaagactggagagagtagctagggagatcgttgaaaccgaaagggcctacgtgcgggatctgcggagtatcgtcgaggactatcttgggccactactggacggaggcgtccttggtctgtctgtagagcaggtgggtactctgtttgcaaacatagaagatatctacgaattctcctccgagctgctggaggacttggagaattctagctcagccggcggaatagcagagtgctttgtgcagcggagcgaggatttcgacatttataccctgtactgcatgaattacccgagctccttggccctcctgcgggaacttagcctttctccccctgcagccttatggctccaagagagacaggcccaactacgacattcactccctctccaatccttcctgctcaaacccgtgcagagaatcctaaaatatcacctgcttctgcaggagctcgggaagcattgggccgaaggcccaggtaccgggggacgagaaatggtggaggaagctatagttagcatgaccgccgtagcctggtacatcaatgatatgaagcggaaacaggaacacgccgctcggctgcaggaagtgcagaggaggctgggaggctggaccgggcccgaactatccgcattcggcgagcttgtactggagggagctttcagagggggcggggggggtggtcctagattacgaggtggggagaggctactgtttctgttttctcggatgctgttggtggcgaaacggagaggattagaatacacttacaagggtcacattttctgctgtaacctgagcgtctcagaaagcccacgagacccacttggttttaaggtgtccgacctcacaattcctaagcatcggcatcttctgcaggccaaaaaccaagaagagaagcgcctctggattcattgcctacaaaggctcttctttgagaaccaccctgcaagtatacccgcaaaggctaagcaggtcctgctcgaaaattctctgcattgtgctcccaaatctaaacccgtactggagcctctcacgcctccactaggttcaccgaggccaagagacgcaagatcattcacacctggtagaaggaacactgcaccgagtcccggaccgtcagtcattcgcaggggacgcagacagtctgagccggtgaaagacccatacgtgatgtttccgcagaatgccaagcccggcttcaaacatgcaggctctgaaggcgagctgtacccaccggaatctcagcctcctgttagtggttccgcaccgccagaagacctcgaggacgccggtcctcctacactagacccctccggcacaagcattactgaagaaatcctcgaattactaaatcagaggggattgcgggatcccggtgagtcaatgggactccatagagcgcagggcgcccctgatgccccattccatatgtag

SEQ ID NO: 213453 - DNA, 1734 bp, Artificial Sequence
  derived and/or modified sequence
atgcctgagggggcacaggggctgtcacttagcaaaccttcacccagtctgggatgtggccgaagaggagaagtctgcgactgtggcaccgtatgtgaaacccggacggctcccgctgcgcctaccatggcatcaccccgagggtctggtagctccacaagcctgagtacagtaggcagtgagggggacccagcgcctggaccgaccccagcatgctctgccagccgccctgagcccctacccggaccccctattcgactgcatctgtcacccgttggcattcctggctcggcccgacccagcagattggaaagagttgcacgcgaaatcgtggagactgaacgcgcttatgtaagggatctgcgctctatcgtggaagattatctcggtcctctgctggacggcggagtgctgggcttgagtgtggaacaggtgggaactctgttcgcgaacattgaggacatctacgagttctccagcgaactcctcgaagatctggagaatagcagctcggcaggcggaattgccgagtgcttcgtgcagagatctgaggatttcgacatctacaccttgtactgcatgaattatccttcgtccctggctctgttgcgagagctgagtctaagtcccccagccgcactgtggttgcaggaacgccaggcccaactgcgccacagcctgcctctccaaagctttctgttgaaaccagtgcaacgaatcctgaagtaccatctgctgctgcaagaattaggcaagcactgggccgagggcccagggactgggggacgcgaaatggtggaggaggccatcgtgagtatgactgccgttgcttggtacataaacgatatgaaacggaaacaggagcatgcagcccgtctccaggaagtgcagaggcgcttaggtggctggaccggccctgagctctccgccttcggggagctggtgttggaaggagcctttcgcggtgggggagggggaggacccaggctgaggggcggagagaggttactgtttctcttttcacggatgcttttggtcgccaagcgaaggggactggaatacacctacaaagggcacatattctgttgtaacctgtccgtatcggagtcgcccagagaccctctgggctttaaggtatcagatctgactattcctaaacatcggcacttgctgcaggccaagaatcaggaagaaaaaagattgtggatccactgtctccagcggttgttcttcgaaaaccacccagcctcaatcccagctaaagcaaaacaggtcctgctggaaaacagtctgcactgtgccccaaaaagtaagccagtgctggagcccctcacacccccactgggttctccacgcccacgggacgcacgctcttttacccccggaaggagaaatacagcgccatctccaggcccatcggtgataaggcgcggaagaaggcaaagcgaaccagtgaaggacccttatgtgatgttcccgcaaaatgccaaacccggttttaagcacgcaggctctgagggcgagttatacccgcctgaaagccagccccctgtcagcggatccgcccctcctgaggatctcgaagacgcgggaccccctactctcgacccttcgggcacatcaatcacggaagaaatattagaacttctgaatcaaaggggcctacgggatcccggagaatctatgggcctgcaccgggcacagggcgctcctgatgcgccattccatatgtag

SEQ ID NO: 213454 - DNA, 4161 bp, Artificial Sequence
  derived and/or modified sequence
atgcctgagggtgcacagggcctcagtttatctaagccaagtcccagcttgggttgcggaaggcgtggcgaagtgtgcgattgtgggaccgtttgcgaaaccaggactgctcctgctgcccctacaatggctagccctagggggtctggctccagcacctccttgtctacagttggaagtgaaggggaccccgcacctggcccaactccagcctgcagtgcgtcaagaccggaaccactcccgggaccacccattcgacttcatctgtcgcccgtgggcatccccggaagcgcgagacccagtaggcttgagcgagttgcaagggaaatcgttgaaaccgaacgcgcatatgtgcgcgacctgcggtctatagtggaggactacttgggaccactgttagacggaggagtgctaggcctgagtgtggagcaggtgggcaccctctttgccaatatcgaggacatttatgagttcagcagtgagctgctggaggacttggagaatagctcctccgctggcggaatcgcagagtgtttcgttcaacgatcagaggattttgacatctatacactctactgtatgaattacccttcctccctggccctcttaagggagctgtcactgtctcccccagcagccctgtggctccaagagcggcaggctcagttacgacactcattgccactccagagtttcttacttaagcctgtacagcggattctcaagtatcacctgctgcttcaagagctgggaaaacattgggccgagggtcccggtacggggggtcgcgagatggtggaagaggctatcgtatctatgaccgccgttgcgtggtatatcaacgatatgaaaagaaagcaggagcacgccgctcggctccaggaggtgcagcgtagacttggaggttggacaggccctgaactctccgctttcggggaactcgttctcgaaggcgctttcagaggaggtggtgggggtgggccaaggctgcgcggtggggaacgactactgtttttattcagccgcatgctcctggtggccaagaggagaggccttgagtatacatacaaagggcacattttttgttgtaatctctcggtgtccgagagcccaagggacccgcttggttttaaggtgagcgatttaaccataccaaaacacaggcacctgttacaggccaaaaatcaggaggaaaagcggctttggatccattgcctccaacggttgttcttcgaaaatcatccggcaagcatccccgcaaaagccaagcaagtcctgctggagaactcactgcattgcgcaccaaagagcaagccagtgttggaacctctgacaccaccactggggagccctcggcctagagatgccaggtctttcacccccggacggagaaatacggccccaagccccggaccttctgtgattagacgcggaaggcggcagtctgagcccgtgaaggatccttacgtaatgttccctcagaacgcaaagcctggcttcaagcatgccggaagtgagggggagctgtatccacctgagagccagccccctgtatcgggttccgcccctccagaggatctggaagacgccggaccccctaccttggacccaagcggaaccagtattacagaggagatcctagaactgctgaatcaaaggggtctgcgcgaccctggtccttccacccacgatattcccaagttcccaggcgattcccaggtgcctggggacagcgagacattgacatttcaggcacttccctcacgcgatagctccgaggaggaggaggaggaggaggagggactggaaatggatgagaggggaccttctccactccacgtcctggaaggcctggaatcatcaattgccgcagagatgccatccattccttgcctgacaaagatccccgacgtgcctaatcttcctgaaattccctctagatgtgagatccctgaagggtcccgcctccccagcctgagcgacataagcgacgttttcgaaatgccgtgtctacctgcaatcccatcagtcccaaacacaccgtctttgtccagcacacctactctgtcatgtgatagctggctacaggggccattacaagaaccggcagaagcccctgcgacccgccgagagcttttttcagggagcaatcctgggaagcttggtgagccaccgtcggggggaaaggccggtcctgaggaggacgaggagggtgtctcttttacagattttcagccccaagacgtcacccaacaccaagggtttcccgacgagctggcgttcaggtcttgctcggagatccggtcagcctggcaggccctggagcagggccagttggcacgcccaggcttccccgagccactgctcatcctcgaggattctgatctgggcggtgacagcgggtccgggaaggcaggcgcacctagctcagaaaggactgccagccgtgtgagggagttggccaggctctattcagagcggatccaacagatgcaacgagctgaaaccagggcctccgctaacgcacccagaaggaggcccagagttctcgcgcaaccgcagccctccccttgccttccgcaggagcaggcagagcccggtctgctgcctgccttcggccatgtgctggtatgcgagctggcattccccctcacgtgcgctcaggagtctgtgcccctgggtcccgcagtttgggttcaagccgctatcccactgtccaaacagggcggatcacctgacggccagggtttgcacgtgtcaaacctgcccaaacaggatctgcccggaatccacgtgagcgccgcaactctgttgcctgagcaaggtggatctagacacgtgcaggccccagccgctacccccctacctaaacaagagggacccctgcatctgcaagtgcctgctttgacaaccttctctgatcaagggcacccagagatccaagtgccagctactacccccctgcctgagcaccgctcccacatggtgataccggctcccagcactgcattctgtccagaacagggccactgtgccgacatccacgttcctactacccccgctctgcctaaagaaatatgctccgactttaccgtctccgtcacaacacccgtgcccaagcaggaggggcacctggatagcgagtctccaacgaatatacccctgacaaagcagggtggttcccgagacgttcaagggccagacccagtgtgtagccaaccaatacagccgctgtcttggcacggcagctccctggaccctcaagggcctggagatacactgcctccgctaccctgccacctgccagacttgcagattccaggaacctccccgctgcccgcacacggctcccacttagaccacagaattcctgccaacgcccctctctccttatcccaggaactgccagatactcaggttcctgccaccacgcctctgccattaccccaggtgttgactgacatctgggttcaggcactccctacttccccaaaacaggggagcttgcccgacatacagggcccagcagccgcacctcctctgcctgagccctcactgactgacacccaggtgcaaaaactcacaccatctctggaacagaagtccctcatagatgctcacgtacctgccgctacccccctccccgagcgcggaggaagtttagatatccaggggctgtccccaactcctgtgcaaactacaatggttctttccaaaccgggaggctccctggcctcacatgtggccaggctcgagtcctctgatctgacaccccctcactccccacctccctcctctagacagctcctagggcctaacgcagctgcactgagcaggtatctggccgcatcatacatcagccaaagcctcgctcgacgccagggacccggtggcggagcacctgccgcatctagagggagttggtcgagtgcccctaccagtcgagcttcctcaccaccccctcaacctcaaccccctcctccgcctgcgaggcgcctgtcctacgcaacaactgtcaatatccatgtcggcggtggcggtaggctgcgccctgccaaggcacaagtcagactcaatcaccccgctctgctggcatccacccaggaaagtatgggcctgcacagagcacagggcgcaccagacgcgcctttccacatgtag

SEQ ID NO: 213455 - DNA, 1734 bp, Artificial Sequence
  derived and/or modified sequence
atgcccgagggtgcacagggcctgagcctgagcaaaccatctccgtcgcttggatgcggcaggagaggcgaggtttgcgattgtggaactgtctgcgaaacccgcaccgcccctgctgccccaacaatggctagcccaagagggtccggatcatcgacctctctaagcactgtggggtcagagggcgatcctgcccctggccctacaccagcctgttcagctagcaggcctgaaccactgcccggacctccgatccgtctccatctgtcacctgtggggattccaggctccgcaagacccagccggctggagcgcgtggctcgtgaaatcgtggagacggagcgcgcatacgtgcgcgacctgcgaagcatagtcgaagactaccttgggcctctcctcgatggcggagtgctgggcctcagcgtggaacaggtaggaactctctttgcaaatatcgaagacatctacgaattttcaagtgaacttttggaggaccttgagaatagcagttctgccggtggcatcgcagaatgctttgtacagcggtctgaagattttgatatctatactctgtactgtatgaactacccatcatcactggcccttctgcgggagctgagcctttccccacccgcagcactgtggctgcaagagcgccaggcacagttacgccatagtctcccacttcagtcctttttgcttaaaccagtgcaaagaattcttaagtaccacttgctcttacaggagttgggcaaacactgggccgagggaccgggtaccggcggtagagaaatggtcgaggaggccattgtatccatgactgccgttgcttggtatattaacgacatgaagcggaaacaggagcatgctgcgagactccaggaggtacagagaaggctaggaggatggaccggaccggagctttcagctttcggggagctggtgctggaaggcgcattccggggagggggagggggtggccctaggctgaggggtggcgagcgtctgctgtttctttttagtcgcatgcttctggtggccaagaggagggggcttgagtatacatataaaggacatatattctgttgtaacctctctgtgagtgaaagcccacgggaccccctcggctttaaggtgagtgacctaaccatacccaaacacaggcatctactgcaagccaaaaatcaggaggaaaaacgtctgtggatccattgtcttcagcggctgttctttgagaaccacccagcatctatcccagccaaagcgaaacaggtactcctcgagaatagtctacactgcgcacccaagtccaagcccgtgcttgagcccctcacacctcctctcggcagtcctagaccacgggacgcgaggtcgttcacccctggacggaggaacaccgccccatccccagggccttcagttatccgcaggggtagaagacagagtgaaccagtcaaagacccttatgtaatgtttccacagaacgcaaaacccggattcaaacatgctgggtctgagggagagctgtacccgccagaaagtcagcctcccgtatctgggtctgcccctcccgaggacctggaagacgccggaccgccaacactggacccatcaggtaccagcataactgaagaaatcctggagcttctgaaccaaagaggcctgagagatcccggtgaaagtatgggcttacaccgggctcagggagcccctgacgcgccatttcatatgtag

SEQ ID NO: 213456 - DNA, 2059 bp, Artificial Sequence
  derived and/or modified sequence
gaattaggggaactcagaaatccatcccccaccccacggccctacctagaagacttaggaatgtgggtccccagcgccgccatctgagactccagagtcgaggctcctagcatcccctacgtagaacactgagaaattccgactgcgggaccccagtctccgagagaccccagattctattcctggagcctgagagcccgaagttcacgcccctgagtctgggctccgcacctccctggggaccgcgtcggggtcgcgcaggagccgggctgcctcgagccggggctggaggctccccgggaggactctgctgggccgctcagccatgcctgagggagcccaaggactgagcctctccaaacctagcccaagcctcgggtgtggccgaagaggtgaagtgtgtgactgtggcaccgtgtgtgagactcggacagctcctgcagcccccaccatggcctccccccgaggttctgggagctccacatccctgagcacagtgggctctgagggggatccagcccctgggcccactccagcctgctcagcctccaggccagagccccttccagggcctcccatccgcctacatctctctccggtggggatcccaggttcagccagaccctcaaggctggagcgtgtggcccgggagatcgtggagacagaacgggcctatgtcagggacctccgcagcatcgtggaggactacctgggccctctgctggacggcggggtcctggggctgagcgtggagcaggtgggcacgctgtttgccaacattgaggacatctacgagttcagcagcgagctcctggaggacttggagaacagcagcagcgccgggggtattgccgagtgcttcgtgcagaggagcgaggattttgacatctacacattgtactgcatgaactacccgagctccctggccctgctccgggagctgtcgttgtctccgccagcagccctgtggctgcaggagcgccaggcccagcttcgccactcgctgcccctgcagagcttcctgctgaaacctgtccagcgcattctcaagtaccatctgctgctgcaggaactagggaagcactgggcggagggcccaggcactgggggtcgcgagatggtggaggaagctattgtgtccatgacagcggttgcctggtacatcaacgacatgaagcgcaagcaggagcatgcagcgcgcctccaggaagtgcagcggcggctgggtggctggaccggaccagagctcagtgcttttggggaactggtgttggagggcgcgttccgaggaggcggagggggtggcccccggctacgagggggtgagcggctgctcttcctgttctctcggatgctgctggtggccaagcgcagggggctggagtacacctacaaaggccacatcttctgctgcaacctgagcgtgagcgagagtccccgagaccctctagggttcaaggtgtctgatctgaccattcccaagcacagacacctgctccaggccaagaaccaagaagagaagaggctgtggattcactgtctccagcgcctcttctttgagaaccaccctgcctccatccctgccaaggcaaagcaagttctccttgaaaacagcctgcattgtgcccccaaaagtaagcctgtcctagagcccctgacacccccacttgggtctcctcgacctcgagatgctagaagttttacccctgggcgaaggaacacagctccatctcctgggccctctgtgattcgccgaggccgcaggcagtctgagccggtgaaggacccttatgtcatgttcccacagaacgctaagcctggattcaagcacgctggcagcgaaggggaactctaccctccagaatctcagccaccagtttcaggctctgcaccccctgaggacctggaggatgctggacccccaacactggacccctctgggacctcaatcactgaagaaatcctggaactgctgaatcagcgaggccttcgagatccaggggaatctatgggccttcacagggcccagggggctcctgatgcccccttccacatgtga

SEQ ID NO: 213457 - DNA, 5231 bp, Artificial Sequence
  derived and/or modified sequence
atgtgagccccggcgacagcgggggaggggaagccccgggcgaccgccccccgcctcacagctgggatcggactctcccgccccagatgtggcgccgccgccgtcacacgagccccgtgacacccagccgggagcccgaggggtccagaggctcggacccgggcgtccggaatttctgcaccgcatcctgagagaccccgaggtccagaccccggcgcccaggctggaggacttgagccatccaggtgcgcagcgccccctcctggagcagccgggagcccggacgtcaccccgcgagaccctggaggccgagcgccccgtatccccgtttcaagaactcaggatccaggaccgcagactccctccagggctccgatcccaagaccccgcgttggaggaacttgagatccggacttctaagcgccccaaccagtttcgggctgcagcggccatcgcttcaaggggacccaggactttgggacccccctgtgctcccacctggagggagtttcattcctgcccctagaattaggggaactcagaaatccatcccccaccccacggccctacctagaagacttaggaatgtgggtccccagcgccgccatctgagactccagagtcgaggctcctagcatcccctacgtagaacactgagaaattccgactgcgggaccccagtctccgagagaccccagattctattcctggagcctgagagcccgaagttcacgcccctgagtctgggctccgcacctccctggggaccgcgtcggggtcgcgcaggagccgggctgcctcgagccggggctggaggctccccgggaggactctgctgggccgctcagccatgcctgagggagcccaaggactgagcctctccaaacctagcccaagcctcgggtgtggccgaagaggtgaagtgtgtgactgtggcaccgtgtgtgagactcggacagctcctgcagcccccaccatggcctccccccgaggttctgggagctccacatccctgagcacagtgggctctgagggggatccagcccctgggcccactccagcctgctcagcctccaggccagagccccttccagggcctcccatccgcctacatctctctccggtggggatcccaggttcagccagaccctcaaggctggagcgtgtggcccgggagatcgtggagacagaacgggcctatgtcagggacctccgcagcatcgtggaggactacctgggccctctgctggacggcggggtcctggggctgagcgtggagcaggtgggcacgctgtttgccaacattgaggacatctacgagttcagcagcgagctcctggaggacttggagaacagcagcagcgccgggggtattgccgagtgcttcgtgcagaggagcgaggattttgacatctacacattgtactgcatgaactacccgagctccctggccctgctccgggagctgtcgttgtctccgccagcagccctgtggctgcaggagcgccaggcccagcttcgccactcgctgcccctgcagagcttcctgctgaaacctgtccagcgcattctcaagtaccatctgctgctgcaggaactagggaagcactgggcggagggcccaggcactgggggtcgcgagatggtggaggaagctattgtgtccatgacagcggttgcctggtacatcaacgacatgaagcgcaagcaggagcatgcagcgcgcctccaggaagtgcagcggcggctgggtggctggaccggaccagagctcagtgcttttggggaactggtgttggagggcgcgttccgaggaggcggagggggtggcccccggctacgagggggtgagcggctgctcttcctgttctctcggatgctgctggtggccaagcgcagggggctggagtacacctacaaaggccacatcttctgctgcaacctgagcgtgagcgagagtccccgagaccctctagggttcaaggtgtctgatctgaccattcccaagcacagacacctgctccaggccaagaaccaagaagagaagaggctgtggattcactgtctccagcgcctcttctttgagaaccaccctgcctccatccctgccaaggcaaagcaagttctccttgaaaacagcctgcattgtgcccccaaaagtaagcctgtcctagagcccctgacacccccacttgggtctcctcgacctcgagatgctagaagttttacccctgggcgaaggaacacagctccatctcctgggccctctgtgattcgccgaggccgcaggcagtctgagccggtgaaggacccttatgtcatgttcccacagaacgctaagcctggattcaagcacgctggcagcgaaggggaactctaccctccagaatctcagccaccagtttcaggctctgcaccccctgaggacctggaggatgctggacccccaacactggacccctctgggacctcaatcactgaagaaatcctggaactgctgaatcagcgaggccttcgagatccagggccgtccacccatgacattcccaagttccccggagactcccaggtgcctggcgacagcgaaaccctcacattccaagccctgcccagccgggactcttcagaagaggaggaggaggaagaggaagggctggagatggatgaacgggggccttccccactccacgtcctggaagggctcgaaagttccattgcagctgaaatgcccagcattccctgccttaccaaaattcctgacgtgcccaaccttcctgaaattcccagccgctgtgaaattcccgaaggttctcgccttcctagtctctctgacatttccgatgtttttgagatgccctgccttccagccatacctagtgtccccaacacccccagtctgtctagcactcccaccctctcctgtgactcctggctccaagggcctctgcaggaaccagctgaggctccagccaccaggagagaactgttttctgggagcaatcctgggaaactgggagagccgccttcaggaggcaaggcagggccagaggaggatgaagaaggggtatcattcacagacttccagccccaggatgtcacccaacatcagggattcccagatgagctggcattccgctcttgctcagaaatccggagcgcctggcaggcattggaacagggacagctggcccggccaggcttcccagagccactgctgatcctggaggattcggatctgggtggagacagcgggagcgggaaggcaggagccccgagttcagaaaggacggcgtcccgagtgcgagagctggcccggctttacagcgagcggatccagcagatgcagcgggcggagactcgggcatcagccaatgccccgcgccgccggcctcgggttctggcccaaccccagccatccccctgtctgccccaggagcaggcagagccagggctcctgcctgcctttggacacgtgctggtatgtgagctggccttcccactgacatgtgcccaggagtctgtccccctgggtcctgctgtctgggttcaagctgccatacctttgtcaaagcagggaggcagcccggatggccagggtctacatgtttccaatttgcctaagcaagaccttccgggcatccacgtttcagctgctacccttttgcctgagcaaggaggttcccggcatgtccaggctccagccgccacacctttgcccaagcaagaaggccccctgcacctccaggtgccggctcttacaactttctctgatcaaggccacccagaaatccaagttccagccaccactcctttgcctgagcatagaagtcacatggttataccagctccatccaccgccttttgtcctgagcagggacactgtgcggacatccacgttcccaccactccagctttgcccaaggagatttgttctgatttcacagtttcagtcaccacccctgtgcccaagcaagaaggtcacctagacagcgagagcccaaccaatatcccactgacaaagcaaggaggttccagggatgttcagggcccagaccctgtctgcagtcaacccatccagcctttgtcttggcatggaagcagcctggatccccagggcccaggcgacaccctaccacccttgccatgtcacctcccagaccttcagattccaggtacctcacctttgcctgcacatggaagccacctggaccatcggatcccagccaacgccccactgtctttgtcccaggagctcccagacactcaggttccagctaccacacctttgcccctgccacaagtcctcacagacatctgggtccaagccctcccaacttcacccaagcagggaagcctcccagacatccagggtccagcggctgcacctccacttccggagccaagccttacagatacacaggtccaaaaactcacaccttcgttggagcagaagagcctcatagatgcccatgttccagctgccacacctttacctgagagaggaggctctctagacattcagggcctctcacccaccccagttcagaccaccatggttttgtccaaaccaggaggctccttagcctctcacgttgccaggttggagtcttcagacttgacgccacctcatagtcccccaccttccagccgtcagctcctgggccccaatgcagctgccctctccagatacctggcagcctcatatatcagccagagcctggctcggcggcaggggcctgggggaggggcccccgcagcctcccggggctcctggtcctctgctcccacgtcacgggcatcttcgccgcccccccagccccagccaccacctcccccagccaggcggctcagctatgccacgacggttaacatccacgtgggcgggggtgggcggctgcggccagccaaggcccaggtccggttgaaccaccctgctctcttggcctccacacaggaatctatgggccttcacagggcccagggggctcctgatgcccccttccacatgtgagccaggacatgaggcttccctgaagcaaggatttcagccagatgccatagaccctcagaacttgacctggaagtccagacactgaacgcaggcctcaaaactgctgcggccttccaactcctggtatctgcatcggcgaatggcccttcttgccttgatccacagggatggggaagggaggaatgtcattaatgttttgttaatactgattctttcatgc

SEQ ID NO: 213458 - DNA, 2102 bp, Artificial Sequence
  derived and/or modified sequence
agctggagcccaaacgttcccaggatccctaagcctccggccccagacaaacgggactcgcagcttctgcgcctcctgctccgctcactcttctttgtctcagcctttccatctttttcgccaggactctgctgggccgctcagccatgcctgagggagcccaaggactgagcctctccaaacctagcccaagcctcgggtgtggccgaagaggtgaagtgtgtgactgtggcaccgtgtgtgagactcggacagctcctgcagcccccaccatggcctccccccgaggttctgggagctccacatccctgagcacagtgggctctgagggggatccagcccctgggcccactccagcctgctcagcctccaggccagagccccttccagggcctcccatccgcctacatctctctccggtggggatcccaggttcagccagaccctcaaggctggagcgtgtggcccgggagatcgtggagacagaacgggcctatgtcagggacctccgcagcatcgtggaggactacctgggccctctgctggacggcggggtcctggggctgagcgtggagcaggtgggcacgctgtttgccaacattgaggacatctacgagttcagcagcgagctcctggaggacttggagaacagcagcagcgccgggggtattgccgagtgcttcgtgcagaggagcgaggattttgacatctacacattgtactgcatgaactacccgagctccctggccctgctccgggagctgtcgttgtctccgccagcagccctgtggctgcaggagcgccaggcccagcttcgccactcgctgcccctgcagagcttcctgctgaaacctgtccagcgcattctcaagtaccatctgctgctgcaggaactagggaagcactgggcggagggcccaggcactgggggtcgcgagatggtggaggaagctattgtgtccatgacagcggttgcctggtacatcaacgacatgaagcgcaagcaggagcatgcagcgcgcctccaggaagtgcagcggcggctgggtggctggaccggaccagagctcagtgcttttggggaactggtgttggagggcgcgttccgaggaggcggagggggtggcccccggctacgagggggtgagcggctgctcttcctgttctctcggatgctgctggtggccaagcgcagggggctggagtacacctacaaaggccacatcttctgctgcaacctgagcgtgagcgagagtccccgagaccctctagggttcaaggtgtctgatctgaccattcccaagcacagacacctgctccaggccaagaaccaagaagagaagaggctgtggattcactgtctccagcgcctcttctttgagaaccaccctgcctccatccctgccaaggcaaagcaagttctccttgaaaacagcctgcattgtgcccccaaaagtaagcctgtcctagagcccctgacacccccacttgggtctcctcgacctcgagatgctagaagttttacccctgggcgaaggaacacagctccatctcctgggccctctgtgattcgccgaggccgcaggcagtctgagccggtgaaggacccttatgtcatgttcccacagaacgctaagcctggattcaagcacgctggcagcgaaggggaactctaccctccagaatctcagccaccagtttcaggctctgcaccccctgaggacctggaggatgctggacccccaacactggacccctctgggacctcaatcactgaagaaatcctggaactgctgaatcagcgaggccttcgagatccaggggaatctatgggccttcacagggcccagggggctcctgatgcccccttccacatgtgagccaggacatgaggcttccctgaagcaaggatttcagccagatgccatagaccctcagaacttgacctggaagtccagacactgaacgcaggcctcaaaactgctgcggccttccaactcctggtatctgcatcggcgaatggcccttcttgccttgatccacagggatggggaagggaggaatgtcattaatgttttgttaatactgattctttcatgcaa

SEQ ID NO: 213459 - protein, 194 aa, Artificial Sequence
  derived and/or modified sequence
MQAVRNAGSRFLRSWTWPQTAGRVVARTPAGTICTGARQLQDAAAKQKVEQNAAPSHTKFSIYPPIPGEESSLRWAGKKFEEIPIAHIKASHNNTQIQVVSASNEPLAFASCGTEGFRNAKKGTGIAAQTAGIAAAARAKQKGVIHIRVVVKGLGPGRLSAMHGLIMGGLEVISITDNTPIPHNGCRPRKARKL

SEQ ID NO: 213460 - DNA, 585 bp, Artificial Sequence
  derived and/or modified sequence
atgcaggccgtaagaaacgccggctctagattcctgcggtcttggacgtggcctcagactgcaggccgtgtcgtggctcgcacaccagcaggaaccatatgtaccggagctcggcagctccaggatgctgcagctaagcagaaggtagagcaaaacgctgcccctagccacaccaaattttccatctatcccccaatccccggagaggagtcaagccttagatgggctgggaagaaatttgaggagatacctattgctcatatcaaggcaagccataacaatactcaaatccaagtggtttccgcttctaacgaacccttagccttcgcgagttgtggtactgaaggattccgcaatgctaaaaaagggacgggaatcgccgctcagaccgcaggcatagccgcagcagctagagccaagcagaagggtgtcatccatattcgggtggtggtgaagggacttgggcctggacggctgtccgctatgcatggacttataatgggtggtctggaggtcatctccatcacggacaatactcctataccgcataacgggtgcaggcctaggaaggcaagaaaactttag

SEQ ID NO: 213461 - DNA, 585 bp, Artificial Sequence
  derived and/or modified sequence
atgcaggccgtgagaaatgccggcagccgcttcctgcgctcctggacctggccccagacagctggccgggtggtggcccggaccccagctggcaccatctgcacaggagcccggcagctgcaggatgctgctgccaagcagaaggtggagcagaatgctgcccccagccacaccaagttcagcatctacccacccatccctggagaggagagcagcctgcgctgggccggcaagaagtttgaggagatccccatcgcccacatcaaggccagccacaacaacacccagatccaggtggtgtctgccagcaatgagcccctggcctttgccagctgtggcacagagggcttcagaaatgccaagaagggcaccggcattgctgcccagacagctggcattgctgctgctgcccgggccaagcagaagggcgtcatccacatccgggtggtggtgaagggcctgggccctggccgcctgagcgccatgcacggcctcatcatgggcggcctggaggtgatcagcatcacagacaacacccccatcccccacaacggctgccggcccaggaaggccaggaagctgtag

SEQ ID NO: 213462 - DNA, 1862 bp, Artificial Sequence
  derived and/or modified sequence
agtcccggaactgctagaacgaaccattcgcatatggagggggtgacccaccatctcagaacattaaaaaagggaaagaatcccctggtgaactacagtgaaagtcttattgagcatttaaatggaaataaaaatattcagtggacctaatgaagagtagatgactttcccttctgtcccctccccgacaggcactcatggtaccggcgccggcgcagctgtgactgtcgctgcagacggaaactgactggggtcaattcaagtcatgcaggctgtgagaaacgcggggtcgcggttcctgcggtcctggacttggccccagacagccggcagggtcgtggccagaacgccggccgggaccatctgcacaggcgctcgacagctccaagacgctgcggccaagcagaaagttgaacagaacgcggctcccagccacaccaagttcagcatttaccctcccattccaggagaggagagctctctgaggtgggcaggaaagaaatttgaggagatcccaattgcacacattaaagcatcccacaacaacacacagatccaggtagtctctgctagtaatgagccccttgcctttgcttcctgtggcacagagggatttcggaatgccaagaagggcacaggcatcgcagcacagacagcaggcatagccgcagcggcgagagctaaacaaaagggcgtgatccacatccgagttgtggtgaaaggcctggggccaggacgcttgtctgccatgcacggactgatcatgggcggcctggaagtgatctcaatcacagacaacaccccaatcccacacaacggctgccgccccaggaaggctcggaagctgtgatgggaaggaggcctgcacttggacctgacctcaagcctcagctccagtgggaccttgtaaaatgctccctgtcagagctctccagaatatgcttgttggagatccttcaggcagtaagggagagttttgcctccttacacagtggcctttgcttgcacctccagctggagatgggtgtgccccagaagtaagctttgcatctcttacaagaggggagctacaggggcagccgtggcctaggcccaaactctgctctgagaaaataaatatctgtaccacctgtcataattttgagattttttgctttcagagttacgtaattcctaattcctcttgaaaaagagagtgtgaaatgaggtgaggcctcagatgaaagtaaaatataaatgtgagttgctatttaccagacacttctggtttcagatatttcttttctagccccttacccaagatttctagagctaatcctagtaacttttcttattaatgacttataatttggccccaaattggagctttttgccacctacctctggattctgatggatttcgccattatgggcatgtttaaagttagccctaaacacaggattttctacaagtggacagtcaaactccccacactaaagtggcagtcatcgtttacactccatgggcttcagcagtcccagcactaacgagagagtgccctaaaagcggggagggtagagttgtacaaaacatgattcttggccaggcacggtggctcacacctgtaaccctggcactttgggaggccaaggcgggtggatcacttgagtccagttagagaccagcctgggcaacatggtgaaaccccctctctactaaaaatacaaaaattaaccaggcatggtggtgtgcgcctgtaatcccagctactctggaggctgaggcatgaaaatcgcttgaacccaggaggtggaggctgcagtgagctgagatcatcctactgcactccagcccaggtgacagcgagactgtctcaaaaaaa

SEQ ID NO: 213463 - DNA, 585 bp, Artificial Sequence
  derived and/or modified sequence
atgcaggccgtgcggaacgccggcagccggttcctgcggagctggacctggccacaaactgccggccgcgtcgtggcgaggaccccggccggcaccatttgcacaggtgctagacagctgcaggatgcggcagctaagcagaaagtggagcaaaatgctgccccatcacatacgaagttctctatttacccccccatcccaggcgaagaatccagcctgagatgggccgggaaaaagttcgaggagatccccatcgcacatattaaggcctcccataataatacccagatacaggtggtgtctgcatccaacgaaccgctggcattcgcatcatgcgggactgaagggttcaggaacgccaagaaagggacaggaatcgcagctcagaccgctgggatcgccgcagcagcacgtgccaaacagaagggtgtgatccacatcagagtcgtggtgaagggtctgggtccaggccgattgtccgctatgcacggcctgattatgggaggactcgaagtgataagtatcaccgataatactcccataccacacaacggatgtagaccccggaaagctaggaagctgtag

SEQ ID NO: 213464 - DNA, 585 bp, Artificial Sequence
  derived and/or modified sequence
atgcaggctgtgcggaacgccggttcgaggttccttaggagttggacatggccacagacagcaggcagagtggtcgccaggactcctgctggaaccatctgcactggggcacggcagctgcaggacgcagccgctaagcagaaggttgaacagaatgcggcaccatcccatactaagttcagcatctatccccctattccaggagaggagagctctctgcggtgggccggaaagaagtttgaagaaatacctatagcacacatcaaagcctcgcacaacaacacccaaatccaagttgtgtcagctagtaacgagccattagcatttgcaagctgtggcaccgaaggattcaggaacgccaaaaagggcactggtatcgccgcacaaaccgctgggatcgcagctgccgcacgggctaaacaaaagggagtgattcacatccgagtcgtggtgaaaggtctgggacccggtagattatcggccatgcatgggctaatcatgggaggactggaggtgattagcatcactgataacactcccataccccataacggctgccgcccaagaaaagcaagaaagctgtag

SEQ ID NO: 213465 - DNA, 585 bp, Artificial Sequence
  derived and/or modified sequence
atgcaggccgtgagaaacgccggcagcagattcctgagaagctggacctggccccagaccgccggcagagtggtggccagaacccccgccggcaccatctgcaccggcgccagacagctgcaggacgccgccgccaagcagaaggtggagcagaacgccgcccccagccacaccaagttcagcatctacccccccatccccggcgaggagagcagcctgagatgggccggcaagaagttcgaggagatccccatcgcccacatcaaggccagccacaacaacacccagatccaggtggtgagcgccagcaacgagcccctggccttcgccagctgcggcaccgagggcttcagaaacgccaagaagggcaccggcatcgccgcccagaccgccggcatcgccgccgccgccagagccaagcagaagggcgtgatccacatcagagtggtggtgaagggcctgggccccggcagactgagcgccatgcacggcctgatcatgggcggcctggaggtgatcagcatcaccgacaacacccccatcccccacaacggctgcagacccagaaaggccagaaagctgtag

SEQ ID NO: 213466 - protein, 836 aa, Artificial Sequence
  derived and/or modified sequence
MAGLNCGVSIALLGVLLLGAARLPRGAEAFEIALPRESNITVLIKLGTPTLLAKPCYIVISKRHITMLSIKSGERIVFTFSCQSPENHFVIEIQKNIDCMSGPCPFGEVQLQPSTSLLPTLNRTFIWDVKAHKSIGLELQFSIPRLRQIGPGESCPDGVTHSISGRIDATVVRIGTFCSNGTVSRIKMQEGVKMALHLPWFHPRNVSGFSIANRSSIKRLCIIESVFEGEGSATLMSANYPEGFPEDELMTWQFVVPAHLRASVSFLNFNLSNCERKEERVEYYIPGSTTNPEVFKLEDKQPGNMAGNFNLSLQGCDQDAQSPGILRLQFQVLVQHPQNESNKIYVVDLSNERAMSLTIEPRPVKQSRKFVPGCFVCLESRTCSSNLTLTSGSKHKISFLCDDLTRLWMNVEKTISCTDHRYCQRKSYSLQVPSDILHLPVELHDFSWKLLVPKDRLSLVLVPAQKLQQHTHEKPCNTSFSYLVASAIPSQDLYFGSFCPGGSIKQIQVKQNISVTLRTFAPSFQQEASRQGLTVSFIPYFKEEGVFTVTPDTKSKVYLRTPNWDRGLPSLTSVSWNISVPRDQVACLTFFKERSGVVCQTGRAFMIIQEQRTRAEEIFSLDEDVLPKPSFHHHSFWVNISNCSPTSGKQLDLLFSVTLTPRTVDLTVILIAAVGGGVLLLSALGLIICCVKKKKKKTNKGPAVGIYNDNINTEMPRQPKKFQKGRKDNDSHVYAVIEDTMVYGHLLQDSSGSFLQPEVDTYRPFQGTMGVCPPSPPTICSRAPTAKLATEEPPPRSPPESESEPYTFSHPNNGDVSSKDTDIPLLNTQEPMEPAE

SEQ ID NO: 213467 - DNA, 2511 bp, Artificial Sequence
  derived and/or modified sequence
atggcaggtctcaattgtggcgtctcgatagccctgctcggcgttttactgctcggggcagcccgactgccacggggggccgaagccttcgaaattgcactacctcgggaaagcaacatcaccgtcctcatcaagctcgggacgcccaccctgctggccaagccgtgttacatagtcatcagcaagcgacatataactatgctgtccatcaagagtggcgagagaatagtgtttaccttttcttgccagtctcctgagaaccatttcgtgattgaaatccagaaaaatattgattgcatgtcaggtccttgtccattcggggaggtgcaactgcagccatctacatctttacttcctaccctgaatagaaccttcatctgggacgttaaggcgcataaatcaattggcctcgagctgcagtttagcataccccgcctgcgacagatcggccctggagagtcgtgtccagacggcgtcacccactccatcagtggtagaattgacgccactgtagtgcggattggcacgttctgttcaaatgggacagtgagccgaattaagatgcaggagggggtcaagatggcacttcatctgccttggttccatccgcgaaacgtgtctggcttttcgattgcgaatcggtctagcatcaaacgtctctgtattatcgaatctgtctttgaaggcgaaggctcggccactctgatgagtgctaactatcctgaaggattcccggaagatgagctgatgacctggcaattcgtagtgcccgctcacttgcgtgcatcagtgtcattcctgaacttcaatctaagtaactgtgagcggaaggaggaaagggtcgaatattatattcctggcagcaccactaaccccgaggtttttaaacttgaggacaagcagccaggcaacatggcgggtaacttcaatctgagtctccaaggatgcgatcaggacgctcaaagccccggaattctccggttacagtttcaggtgttggtgcagcatccacagaacgaatctaacaaaatttatgtcgtggacctgagtaatgagcgggccatgtccttaactatcgaaccacgacccgtgaaacagtctcgcaaatttgttccgggatgctttgtttgcctcgaaagcagaacgtgctcgagtaatctcaccctgaccagcggaagcaaacataaaattagtttcctatgtgatgacctgactaggttgtggatgaacgtcgaaaagaccatttcctgtacagatcatcgatattgccagagaaagtcgtatagcctacaagtgccgagcgatatcctccacctcccagttgagctccatgatttttcctggaagctgctcgtaccaaaggatcggctgtcactggtattggtccccgcgcagaaactacagcagcacactcatgagaaaccatgtaatacgtccttttcttacctggtggcatctgcaatacctagtcaggatctgtacttcgggtctttctgtcccggtggaagtataaagcaaatccaggttaaacagaatatcagtgtcaccttgcgcacattcgctccaagcttccaacaggaggcatcacgtcagggccttacggtcagcttcataccatactttaaggaagaaggcgttttcaccgtaaccccagacaccaaatcaaaggtctatcttagaaccccgaattgggatagaggtttgccgagtctgacgagtgtatcctggaatataagtgtcccccgtgatcaagtcgcttgcttgaccttttttaaggaacgcagcggagtggtgtgtcagactggccgggctttcatgataattcaagagcaacggacgagagcagaggagattttttctcttgacgaagatgtcctgcccaaaccttcgttccatcatcactcgttctgggttaacatttcaaactgtagtcctacatcaggcaaacagctcgacctacttttttccgtcacccttacaccgaggacggtagacctcactgtgatcctgatcgccgctgtgggcggcggcgttcttctactgagcgcacttggcctcatcatatgctgtgtgaaaaaaaagaagaaaaaaaccaataagggtcccgccgtgggaatctacaacgacaacattaatactgaaatgccacggcagcccaagaagttccagaagggcagaaaagacaacgacagtcatgtgtacgccgtgatcgaagatacgatggtctacggacatctcctccaggattcctctggatcatttctgcagcctgaagttgacacatatagaccttttcaggggaccatgggggtgtgccccccctccccacctactatatgtagccgtgccccaaccgcaaagctcgcaaccgaggaaccaccacccaggtcccctcccgagtccgaatcagaaccctacactttttctcaccccaacaacggtgacgtatcaagcaaggacaccgacattccacttctcaatactcaggaacccatggagcccgccgagtag

SEQ ID NO: 213468 - DNA, 2511 bp, Artificial Sequence
  derived and/or modified sequence
atggccggcctgaactgtggggtgtccatcgccctgctgggcgtgctgctgctgggcgccgcccggctgcccagaggagctgaggcctttgagatcgccctgccccgggagagcaacatcaccgtgctgatcaagctgggcacccccaccctgctggccaagccctgctacatcgtcatcagcaagaggcacatcaccatgctgagcatcaagagcggggagcgcatcgtgttcaccttcagctgccagagccctgagaaccactttgtgattgagatccagaagaacatcgactgcatgagcggcccctgcccctttggagaggtgcagctgcagcccagcaccagcctgctgcccaccctgaacagaaccttcatctgggatgtgaaggcccacaagagcatcggcctggagctgcagttcagcatcccccggctgcggcagatcggccctggagagagctgcccagatggagtgacccacagcatcagcggcagaattgatgccaccgtggtgcgcatcggcaccttctgcagcaatggcaccgtgagccgcatcaagatgcaggagggcgtgaagatggccctgcacctgccctggttccaccccagaaatgtgtctggcttcagcatcgccaacagaagcagcatcaagaggctgtgcatcattgaatctgtgtttgaaggagagggcagcgccaccctgatgtctgccaactacccagagggcttcccagaagatgagctgatgacctggcagtttgtggtgcctgcccacctgcgggcctctgtgtccttcctgaacttcaacctgagcaactgtgagaggaaggaggagcgggtggagtactacatccctggcagcaccaccaaccctgaggtgttcaagctggaggacaagcagcccggcaacatggccggcaacttcaacctgagcctgcagggctgtgaccaggatgcccagagccctggcatcctgcggctgcagttccaggtgctggtgcagcacccccagaatgaaagcaacaagatctacgtggtggacctgagcaatgaaagagccatgagcctgaccatcgagcccaggcctgtgaagcagagcaggaagtttgtgcccggctgctttgtgtgcctggagagcaggacctgcagcagcaacctgaccctgaccagcggcagcaagcacaagatctccttcctgtgtgatgacctgacccggctgtggatgaatgtggagaagaccatcagctgcacagaccaccgctactgccagaggaagagctacagcctgcaggtgcccagcgacatcctgcacctgcctgtggagctgcatgacttctcctggaagctgctggtgcccaaggaccggctgagcctggtgctggtgcctgcccagaagctgcagcagcacacccatgagaagccctgcaacaccagcttctcctacctggtggccagcgccatccccagccaggacctgtacttcggcagcttctgccctgggggcagcatcaagcagatccaggtgaagcagaacatctctgtgaccctgcggacctttgcccccagcttccagcaggaggccagccggcagggcctgactgtgtccttcatcccctacttcaaggaggagggcgtcttcaccgtgaccccagacaccaagagcaaggtgtacctgcggacccccaactgggaccggggcctgcccagcctgacctctgtgtcctggaacatctctgtgccccgggaccaggtggcctgcctgaccttcttcaaggagaggtctggagtggtgtgccagacaggccgggccttcatgatcatccaggagcagaggaccagggctgaggagatcttcagcctggatgaagatgtgctgcccaagcccagcttccaccaccacagcttctgggtgaacatcagcaactgcagccccaccagcggcaagcagctggacctgctcttctctgtgaccctgacccccaggacagtggacctgaccgtcatcctgattgctgctgtgggcggcggcgtgctgctgctgagcgccctgggcctcatcatctgctgcgtgaagaagaagaagaagaagaccaacaagggccctgctgtgggcatctacaatgacaacatcaacacagagatgccccggcagcccaagaagttccagaagggcaggaaggacaatgacagccacgtgtatgctgtgattgaggacaccatggtgtatggccacctgctgcaggacagcagcggcagcttcctgcagcctgaggtggacacctaccggcccttccagggcaccatgggcgtgtgcccccccagcccccccaccatctgcagccgggcccccacagccaagctggccacagaggagcccccacccaggagccccccagagagcgagagcgagccctacaccttcagccaccccaacaatggagatgtgagcagcaaggacacagacatccccctgctgaacacccaggagcccatggagcctgctgagtag

SEQ ID NO: 213469 - DNA, 2511 bp, Artificial Sequence
  derived and/or modified sequence
atggccggcctgaactgcggcgtgagcatcgccctgctgggcgtgctgctcttaggggctgcccggctcccaaggggggcagaggctttcgagatcgcactgccacgggaatctaatataactgtgttgatcaagctcggtaccccgacattgctggccaaaccctgctatatagtgatcagcaagagacacattacgatgctgtccataaagagtggggagagaatcgttttcacattttcatgtcagagccccgagaatcacttcgttatcgagatccagaaaaacattgattgtatgtccggcccatgtccattcggtgaggtccagctgcagccttctacttcccttctccccactctgaaccgtacgtttatttgggatgtgaaagcccacaaatccatcgggctggagctgcagttttcaatccccaggctgaggcaaattggaccaggtgaaagctgccccgacggcgtgactcacagtatctctggacgcatagacgctaccgttgtgcgtattgggactttctgctcaaatggcactgtgtcccggataaagatgcaggagggcgtaaaaatggccttacacctgccctggtttcatccccggaatgtgtcgggcttcagcattgctaacagatcctcaattaagcgcctttgcatcattgagagcgtgttcgagggtgagggatcagccaccttgatgtccgctaactaccccgagggatttcccgaagacgagctgatgacatggcagttcgtggtgccagctcatctgcgggcttcggtatccttcttgaactttaaccttagcaactgtgaacgcaaagaggaacgcgtcgaatattacattcccggctctacaactaatcctgaggtgtttaaattggaagacaagcagcccggaaacatggccggaaatttcaacctgtccctccagggctgcgaccaggacgcgcagagccctggcatcctccgactgcagttccaggtgctggtgcagcaccctcaaaatgaatccaacaaaatctatgtagtagatctctctaatgaacgagcaatgtctctcactattgagccccggccagttaagcaatcaaggaagttcgttccaggttgcttcgtctgtctggagagtcgaacctgttcttcaaatttaaccctcactagcggtagtaagcacaaaatcagcttcctgtgtgacgacctcacacgcctgtggatgaatgtggagaagactattagttgtaccgaccataggtattgtcaaagaaagagctattctctgcaagtaccgtccgatatcctccacctccccgttgagcttcacgacttttcctggaagctcctggtcccaaaggacagactcagcctcgtgttagtgcccgcccagaaacttcagcaacatacacacgaaaaaccctgtaatacctctttcagttatcttgtcgcctctgccattccttcacaggatctgtattttggtagcttctgtcccggaggaagcattaagcagatacaggtgaagcagaatatctctgtgacattgcgcactttcgcccccagtttccagcaggaggcttcccgacaggggctaacagtgtcctttattccatactttaaagaagagggcgtttttacggtgacccctgacaccaagtctaaagtgtatctgcgcactccaaattgggaccgaggcctcccatcattgacctccgtgtcctggaatatttccgtcccacgcgaccaagtcgcctgtctcacttttttcaaagagcgctcaggagtggtgtgtcagacaggacgcgccttcatgattattcaggaacagagaactcgcgccgaggagatcttttcattagatgaagatgtcctgcccaagcccagctttcaccaccactccttctgggtgaatatctcgaactgctcgccaacgagcggcaaacagctggacctgttgttcagtgtcaccttgacccctcggaccgtggatctgacagtgattttgatagctgccgtagggggaggggtcctgcttttgtcagccttgggactgatcatctgttgtgttaagaaaaagaagaagaagacaaataagggcccagcagtaggcatatataacgataacattaacactgaaatgccacggcagcctaagaaatttcagaaaggaaggaaggacaatgatagtcatgtctacgccgtaatcgaggacactatggtctatggacatctactacaggattcctccgggagtttcttacaaccggaggtcgacacgtaccgaccgttccagggcaccatgggtgtttgtccaccttctccgccgaccatttgcagccgcgcgccgactgctaaacttgctacagaagaaccaccaccaaggagtcccccagaatcggaaagtgaaccgtatactttctcacatcctaacaacggcgacgtatctagcaaagatacagacatccctcttttgaacactcaagagcccatggaaccagcagaatag

SEQ ID NO: 213470 - DNA, 2511 bp, Artificial Sequence
  derived and/or modified sequence
atggcaggactcaattgtggggtatccattgccctcctcggcgtcttgcttctcggtgccgcaaggctgcccaggggagcagaagccttcgagatcgcactaccgcgagaaagcaacatcacagttctgatcaaactcgggactcctaccctgctggctaaaccatgctacatcgttatatccaagcgccacattacaatgctgtcaatcaagagcggtgagcgtatcgtgttcactttttcctgtcagtccccggaaaatcactttgtaattgagatacaaaagaatatagactgcatgagcggtccctgcccatttggagaagtgcagctgcagccctccaccagtctgcttcctaccttgaataggaccttcatttgggatgtcaaagcgcacaaaagcatcgggcttgaactgcagttctccatccctcgtctccgccaaataggccctggcgagtcatgtccggatggtgtgacccattcgatttccggcagaattgacgccactgtggtccgcattgggaccttctgttcaaacggtacagtgtctcggatcaaaatgcaagagggggtgaaaatggccctacacctaccatggtttcacccaaggaacgtctccggcttttccatcgctaaccggtcgagcatcaaacggctgtgtattattgaatccgtgtttgaaggggagggctccgccactctgatgtctgcgaactacccagagggctttcccgaagacgaactcatgacatggcagtttgtggtacccgctcacctgagagcaagcgtttccttcttaaatttcaatcttagtaactgcgagcggaaggaggagcgagtcgagtactacatccctggaagtacgacaaatcctgaggtcttcaaactggaggacaagcagccagggaatatggccggaaattttaacctgtctctgcaggggtgtgaccaggatgctcagtccccagggattctcagactgcagtttcaagtcttggtgcaacatcctcaaaacgagagtaacaaaatttatgtcgtggatctgagcaatgagcgagctatgtctctcaccatagagccgagacccgtcaagcagagccggaaatttgtgcccggatgcttcgtttgtctggagagccggacttgtagttctaatctaacactcacatctggctccaaacataaaatatcatttctctgtgatgatctaaccagactttggatgaatgttgagaaaaccatttcttgcaccgaccacagatactgccagcgcaagagctatagtcttcaggtgccaagcgacattttgcaccttccggtcgagctccatgatttttcatggaaactgctggttcccaaagatcgactgtcactggtgttagtgccagctcaaaagctccagcagcacactcacgagaaaccctgcaataccagtttttcatacttggtggcatcagcgatcccctcccaagatttgtactttggtagcttctgccccggaggcagtataaagcagatacaggtcaagcagaacatctccgtgacactgaggaccttcgcaccctctttccagcaggaagcaagcagacagggattgactgtgtcctttattccttatttcaaagaggagggcgtgttcaccgtaacgccagacacaaagtccaaggtatatctgcgcacaccaaattgggataggggtctgcccagtctgacatctgtcagttggaacatttccgtcccacgagaccaagtcgcttgtctgaccttttttaaggagcggtctggcgttgtttgccagaccggtcgcgcatttatgatcatccaggaacaacgcactagagccgaggagatcttttcgctggacgaggatgtgctcccaaaacctagcttccaccaccattccttctgggtgaatataagtaattgtagtccaacatcaggcaaacagttggacctgttgttttctgtcacccttaccccccgaactgtggatctcactgtgattcttattgccgctgtcggcggtggagtgctgctactcagtgctctggggcttataatttgctgcgtgaaaaagaagaaaaaaaaaaccaataagggccctgctgtggggatatacaacgacaacatcaacaccgaaatgcctcgccagccaaagaaattccagaagggacgaaaggataatgatagccacgtgtatgccgttattgaagatacaatggtctacggacacttattacaggattcttcaggatcatttctgcaaccagaagtggatacatatagaccatttcagggcacaatgggagtttgtccgccttcccccccaaccatctgtagccgagctccaacggctaagctggccactgaagagccacctccacggagccctcctgaatcggaaagtgagccgtataccttttcccatccaaacaacggtgacgtgagcagcaaagacacagatatcccactgttaaacacccaggaaccaatggagccagctgaatag

SEQ ID NO: 213471 - DNA, 6006 bp, Artificial Sequence
  derived and/or modified sequence
gggcggggctcgggccggtccgcccgcgcgcaggtgagtgagccagggcggagcgcagctgcgccgggcttgggcgcctggggccgccgctccccaccgtcgttttccccaccgaggccgaggcgtcccggagtcatggccggcctgaactgcggggtctctatcgcactgctaggggttctgctgctgggtgcggcgcgcctgccgcgcggggcagaagcttttgagattgctctgccacgagaaagcaacattacagttctcataaagctggggaccccgactctgctggcaaaaccctgttacatcgtcatttctaaaagacatataaccatgttgtccatcaagtctggagaaagaatagtctttacctttagctgccagagtcctgagaatcactttgtcatagagatccagaaaaatattgactgtatgtcaggcccatgtccttttggggaggttcagcttcagccctcgacatcgttgttgcctaccctcaacagaactttcatctgggatgtcaaagctcataagagcatcggtttagagctgcagttttccatccctcgcctgaggcagatcggtccgggtgagagctgcccagacggagtcactcactccatcagcggccgaatcgatgccaccgtggtcaggatcggaaccttctgcagcaatggcactgtgtcccggatcaagatgcaagaaggagtgaaaatggccttacacctcccatggttccaccccagaaatgtctccggcttcagcattgcaaaccgctcatctataaaacgtctgtgcatcatcgagtctgtgtttgagggtgaaggctcagcaaccctgatgtctgccaactacccagaaggcttccctgaggatgagctcatgacgtggcagtttgtcgttcctgcacacctgcgggccagcgtctccttcctcaacttcaacctctccaactgtgagaggaaggaggagcgggttgaatactacatcccgggctccaccaccaaccccgaggtgttcaagctggaggacaagcagcctgggaacatggcggggaacttcaacctctctctgcaaggctgtgaccaagatgcccaaagtccagggatcctccggctgcagttccaagttttggtccaacatccacaaaatgaaagcaataaaatctacgtggttgacttgagtaatgagcgagccatgtcactcaccatcgagccacggcccgtcaaacagagccgcaagtttgtccctggctgtttcgtgtgtctagaatctcggacctgcagtagcaacctcaccctgacatctggctccaaacacaaaatctccttcctttgtgatgatctgacacgtctgtggatgaatgtggaaaaaaccataagctgcacagaccaccggtactgccaaaggaaatcctactcactccaggtgcccagtgacatcctccacctgcctgtggagctgcatgacttctcctggaagctgctggtgcccaaggacaggctcagcctggtgctggtgccagcccagaagctgcagcagcatacacacgagaagccctgcaacaccagcttcagctacctcgtggccagtgccatacccagccaggacctgtacttcggctccttctgcccgggaggctctatcaagcagatccaggtgaagcagaacatctcggtgacccttcgcacctttgcccccagcttccaacaagaggcctccaggcagggtctgacggtgtcctttataccttatttcaaagaggaaggcgttttcacggtgacccctgacacaaaaagcaaggtctacctgaggacccccaactgggaccggggcctgccatccctcacctctgtgtcctggaacatcagcgtgcccagagaccaggtggcctgcctgactttctttaaggagcggagcggcgtggtctgccagacagggcgcgcattcatgatcatccaggagcagcggacccgggctgaggagatcttcagcctggacgaggatgtgctccccaagccaagcttccaccatcacagcttctgggtcaacatctctaactgcagccccacgagcggcaagcagctagacctgctcttctcggtgacacttaccccaaggactgtggacttgactgtcatcctcatcgcagcggtgggaggtggagtcttactgctgtctgccctcgggctcatcatttgctgtgtgaaaaagaagaaaaagaagacaaacaagggccccgctgtgggtatctacaatgacaacatcaatactgagatgccgaggcagccaaaaaagtttcagaaagggcgaaaggacaatgactcccatgtgtatgcagtcatcgaggacaccatggtatatgggcatctgctacaggattccagcggctccttcctgcagccagaggtggacacctaccggccgttccagggcaccatgggggtctgtcctccctccccacccaccatatgctccagggccccaactgcaaagttggccactgaggagccacctcctcgctcccctcctgagtctgagagtgaaccgtacaccttctcccatcccaacaatggggatgtaagcagcaaggacacagacattcccttactgaacactcaggagcccatggagccagcagaataacttgatccattccagacgctttgctgagtttcataaagcagggcactgagacacccgtccgtgttcctaaccagaaatcctaaagaagaggaattatacagaaggaacagcaggaggttttcctggacaccgccaacttcacattgctcagtggactcattctaagggcaagacattgaaaatgatgaattccaatctggatacagtcatgacagctcatgtgctcctcaacttaggctgtgcggttagccagcctgtaatgagaggagagaggcctgagtcacctagcatagggttgcagcaagccctggattcagagtgttaaacagaggcttgccctcttcaggacaacagttccaattccaaggagcctacctgaggtccctactctcactggggtccccaggatgaaaacgacaatgtgcctttttattattatttatttggtggtcctgtgttatttaagagatcaaatgtataaccacctagctcttttcacctgacttagtaataactcatactaactggtttggatgcctgggttgtgacttctactgaccgctagataaacgtgtgcctgtcccccaggtggtgggaataatttacaatctgtccaaccagaaaagaatgtgtgtgtttgagcagcattgacacatatctgctttgataagagacttcctgattctctaggtcggttcgtggttatcccattgtggaaattcatcttgaatcccattgtcctatagtcctagcaataagagaaatttcctcaagtttccatgtgcggttctcctagctgcagcaatactttgacatttaaagagaaatttagagaatattctcatcctctaaaaatgtttaaatatataccaaacagtggccccctgcattagttttctgttgccactgcaacctattacttggtagcttaaaaacaacacattagcttatagtcctggggatcagaattccaaaatggatgtccctgaatgaaaatcaaggtgtcagcagagctgtgctccttctgaaggctctagggagaagccggttccttgccatttcaagcttctagaggctggctgcattcccaggctccagtggctggtcaagcttttctcacatggcatcactgtgacactggccctcccacttccctctttgacttacaaagcccaccaggaagatccaggataatctctccatctaaagttccttcatcatcctggaagagccttttgccatgcaagacaacatagccacaggtggggattaggaccagaacatctttggggtgctgttattctgcctaccacaccttcctgccactgactcccacaggagaggctacaaaatgatctggcgcacagggatgttttgtttagcttgcggactctaacacttaaaaaaaaacccagatcagaagatctggccatgctggggctcacattctcacctagcaacaactggctggagctgggcaccagctctgcctttagaaggggtgtccacttcaccaggtcaccacagcccacactacgccctatcacttcccacaatgaggctgagtgtttgtttctactgatcaatgcccctgcaggttgcatttattgtaatgaaaaagaaagactgggattaatctctaatcaggtgagtagaccatgagaccaatgtgtgctcacattaccctttttcttttttttctttttctttttctttttttttttaatgtgagacaggatctcattctgttgcctaggctggagtgcagtggcgcaatctcggctcactgcaacctctgcctcctgggctcaagcaattctcccacctcagcctcccaaatagctgggatcactggcacaaaccaccatgcccagctaattttgtattttttgtagagacagggtttcaccatgttgcccaggctggtctcaacctcctgggctcaagcaatcctcctgcctcggcctcccaaagtgctgggattacagatgtgagccaccgcatccagccccacaccctcatttataccaattacctgcccagtaactgtggacttttgcttcctcacccctgctctgatctggaaggagagggattatgttatagcttgtcagcacagtcccaagttcaatatttctgcggcaaaaacttccttcaaaaaataaatgtacttcattgtattcaatgaattcaccttggaaatgcaccgcctcaacttgttcacatggcataaatgaaaggaattttatagtctcctaaatggcgtgtactgcaagacctcttgaacactttccagaggataggatatttaagtcatgcccttggcgttgcctatggcacctttcccttctgaaagtctggttcctgcccagtgacccttggccttgtgagccgagatgctgaccctgcataaagggccaaaggagggctgcggcttccttccctcactgaagagcccttatttgaattcactgtgtggagccctagccctccattctcgacattccccaacctcccagccccttccaagcaggactaggtgccctgcattccacccaaggtgggattggccttccttaggctggctacttgtcaccatcaccgacatcactgttgcctgcaaggacaccacgtggccattttccttcaactgagggctcaaaactcctggacaagttgctggctcctgagaccagtatttcctggagctgtgcctcagtgaaggggcccagcctgaggaaccctggctcttttctttaaagcccaggccccacttacgtaaaacatttcagggtcactggaaacagtgaagtgccatttgttgaagcctactgcatgccagcccactgctcatccacgtggtctgccatgcctacgaggaaggccagcgcatgcaggactggtctctaatgctgtggtcattgcacagaagggaaaggtctcaaggaagagtcaactggaacaagcacaagcccaccggacatggccttggtaaaggttagcagactggtgtgtgtggatctgcagtgcttcactggaaataatttattcattgcagatactttttaggtggcattttattcatttcctgtgctttaaataaacaaatgtaccaaaaaacaagtatcaagctgtttaagtgcttcggctacttgtcccctggttcagtagaggccccggtttcccagttgttgactgtgacaggctcagcatgggctcagcagatgctgtcttaatttgtggatgatacagaaagccaggctttgggatacaagttctttcctcttcatttgatgccgtgcactgtgtgaagcagatgtttttgtccggaaataaaaataatagtcttggagtctcgcc

SEQ ID NO: 213472 - DNA, 2511 bp, Artificial Sequence
  derived and/or modified sequence
atggccggcctgaactgcggcgtgagcatcgccctgctgggcgtgctgctgctgggcgccgccagactgcccagaggcgccgaggccttcgagatcgccctgcccagagagagcaacatcaccgtgctgatcaagctgggcacccccaccctgctggccaagccctgctacatcgtgatcagcaagagacacatcaccatgctgagcatcaagagcggcgagagaatcgtgttcaccttcagctgccagagccccgagaaccacttcgtgatcgagatccagaagaacatcgactgcatgagcggcccctgccccttcggcgaggtgcagctgcagcccagcaccagcctgctgcccaccctgaacagaaccttcatctgggacgtgaaggcccacaagagcatcggcctggagctgcagttcagcatccccagactgagacagatcggccccggcgagagctgccccgacggcgtgacccacagcatcagcggcagaatcgacgccaccgtggtgagaatcggcaccttctgcagcaacggcaccgtgagcagaatcaagatgcaggagggcgtgaagatggccctgcacctgccctggttccaccccagaaacgtgagcggcttcagcatcgccaacagaagcagcatcaagagactgtgcatcatcgagagcgtgttcgagggcgagggcagcgccaccctgatgagcgccaactaccccgagggcttccccgaggacgagctgatgacctggcagttcgtggtgcccgcccacctgagagccagcgtgagcttcctgaacttcaacctgagcaactgcgagagaaaggaggagagagtggagtactacatccccggcagcaccaccaaccccgaggtgttcaagctggaggacaagcagcccggcaacatggccggcaacttcaacctgagcctgcagggctgcgaccaggacgcccagagccccggcatcctgagactgcagttccaggtgctggtgcagcacccccagaacgagagcaacaagatctacgtggtggacctgagcaacgagagagccatgagcctgaccatcgagcccagacccgtgaagcagagcagaaagttcgtgcccggctgcttcgtgtgcctggagagcagaacctgcagcagcaacctgaccctgaccagcggcagcaagcacaagatcagcttcctgtgcgacgacctgaccagactgtggatgaacgtggagaagaccatcagctgcaccgaccacagatactgccagagaaagagctacagcctgcaggtgcccagcgacatcctgcacctgcccgtggagctgcacgacttcagctggaagctgctggtgcccaaggacagactgagcctggtgctggtgcccgcccagaagctgcagcagcacacccacgagaagccctgcaacaccagcttcagctacctggtggccagcgccatccccagccaggacctgtacttcggcagcttctgccccggcggcagcatcaagcagatccaggtgaagcagaacatcagcgtgaccctgagaaccttcgcccccagcttccagcaggaggccagcagacagggcctgaccgtgagcttcatcccctacttcaaggaggagggcgtgttcaccgtgacccccgacaccaagagcaaggtgtacctgagaacccccaactgggacagaggcctgcccagcctgaccagcgtgagctggaacatcagcgtgcccagagaccaggtggcctgcctgaccttcttcaaggagagaagcggcgtggtgtgccagaccggcagagccttcatgatcatccaggagcagagaaccagagccgaggagatcttcagcctggacgaggacgtgctgcccaagcccagcttccaccaccacagcttctgggtgaacatcagcaactgcagccccaccagcggcaagcagctggacctgctgttcagcgtgaccctgacccccagaaccgtggacctgaccgtgatcctgatcgccgccgtgggcggcggcgtgctgctgctgagcgccctgggcctgatcatctgctgcgtgaagaagaagaagaagaagaccaacaagggccccgccgtgggcatctacaacgacaacatcaacaccgagatgcccagacagcccaagaagttccagaagggcagaaaggacaacgacagccacgtgtacgccgtgatcgaggacaccatggtgtacggccacctgctgcaggacagcagcggcagcttcctgcagcccgaggtggacacctacagacccttccagggcaccatgggcgtgtgcccccccagcccccccaccatctgcagcagagcccccaccgccaagctggccaccgaggagcccccccccagaagcccccccgagagcgagagcgagccctacaccttcagccaccccaacaacggcgacgtgagcagcaaggacaccgacatccccctgctgaacacccaggagcccatggagcccgccgagtag

SEQ ID NO: 213473 - protein, 697 aa, Artificial Sequence
  derived and/or modified sequence
MFTLDVEENENGERTPYLIVMGALDRETQDQYVSIIIAEDGGSPPLLGSATLTIGISDINDNCPLFTDSQINVTVYGNATVGTPIAAVQAVDKDLGTNAQITYSYSQKVPQASKDLFHLDENTGVIKLFSKIGGSVLESHKLTILANGPGCIPAVITALVSIIKVIFRPPEIVPRYIANEIDGVVYLKELEPVNTPIAFFTIRDPEGKYKVNCYLDGEGPFRLSPYKPYNNEYLLETTKPMDYELQQFYEVAVVAWNSEGFHVKRVIKVQLLDDNDNAPIFLQPLIELTIEENNSPNAFLTKLYATDADSEERGQVSYFLGPDAPSYFSLDSVTGILTVSTQLDREEKEKYRYTVRAVDCGKPPRESVATVALTVLDKNDNSPRFINKDFSFFVPENFPGYGEIGVISVTDADAGRNGWVALSVVNQSDIFVIDTGKGMLRAKVSLDREQQSSYTLWVEAVDGGEPALSSTAKITILLLDINDNPPLVLFPQSNMSYLLVLPSTLPGSPVTEVYAVDKDTGMNAVIAYSIIGRRGPRPESFRIDPKTGNITLEEALLQTDYGLHRLLVKVSDHGYPEPLHSTVMVNLFVNDTVSNESYIESLLRKEPEINIEEKEPQISIEPTHRKVESVSCMPTLVALSVISLGSITLVTGMGIYICLRKGEKHPREDENLEVQIPLKGKIDLHMRERKPMDISNI

SEQ ID NO: 213474 - protein, 951 aa, Artificial Sequence
  derived and/or modified sequence
MRGRGNARSSQALGVSWCPATWHPRLDMGRLHRPRSSTSYRNLPHLFLFFLFVGPFSCLGSYSRATELLYSLNEGLPAGVLIGSLAEDLRLLPRSAGRPDPQSQLPERTGAEWNPPLSFSLASRGLSGQYVTLDNRSGELHTSAQEIDREALCVEGGGGTAWSGSVSISSSPSDSCLLLLDVLVLPQEYFRFVKVKIAIRDINDNAPQFPVSQISVWVPENAPVNTRLAIEHPAVDPDVGINGVQTYRLLDYHGMFTLDVEENENGERTPYLIVMGALDRETQDQYVSIIIAEDGGSPPLLGSATLTIGISDINDNCPLFTDSQINVTVYGNATVGTPIAAVQAVDKDLGTNAQITYSYSQKVPQASKDLFHLDENTGVIKLFSKIGGSVLESHKLTILANGPGCIPAVITALVSIIKVIFRPPEIVPRYIANEIDGVVYLKELEPVNTPIAFFTIRDPEGKYKVNCYLDGEGPFRLSPYKPYNNEYLLETTKPMDYELQQFYEVAVVAWNSEGFHVKRVIKVQLLDDNDNAPIFLQPLIELTIEENNSPNAFLTKLYATDADSEERGQVSYFLGPDAPSYFSLDSVTGILTVSTQLDREEKEKYRYTVRAVDCGKPPRESVATVALTVLDKNDNSPRFINKDFSFFVPENFPGYGEIGVISVTDADAGRNGWVALSVVNQSDIFVIDTGKGMLRAKVSLDREQQSSYTLWVEAVDGGEPALSSTAKITILLLDINDNPPLVLFPQSNMSYLLVLPSTLPGSPVTEVYAVDKDTGMNAVIAYSIIGRRGPRPESFRIDPKTGNITLEEALLQTDYGLHRLLVKVSDHGYPEPLHSTVMVNLFVNDTVSNESYIESLLRKEPEINIEEKEPQISIEPTHRKVESVSCMPTLVALSVISLGSITLVTGMGIYICLRKGEKHPREDENLEVQIPLKGKIDLHMRERKPMDISNI

SEQ ID NO: 213475 - DNA, 2094 bp, Artificial Sequence
  derived and/or modified sequence
atgttcacgttagacgtggaggaaaacgagaacggggagcgtaccccttacttgattgtgatgggagctctggatcgagagacacaggaccagtatgtctctataattatcgcagaggatgggggctcccctccactgctagggtccgccacactgacgataggcatatctgatattaatgataattgtccgttgttcaccgacagccagataaacgtgaccgtgtacgggaatgcaaccgttgggactcctatcgctgccgttcaggccgtggataaagatctgggcaccaatgcccagatcacctacagctattcccagaaagtccctcaggcttccaaagacttgttccatttagacgaaaatacaggagtaatcaaactgttttctaaaattggaggcagtgtgctggaatcccacaagcttaccatcctcgcgaatggccccgggtgtattccagcagttatcacagcgttggtgtcaattatcaaggtgatctttcggccacctgagattgtaccccgctacattgccaacgaaatcgatggtgtggtatatctaaaggagttggagccggtgaatacccccattgcattttttaccatacgagatccagagggcaagtataaggttaactgttatctggatggagaggggccctttcgcctgtccccctacaaaccttacaacaatgagtatttgttggagaccaccaagccaatggattacgagttgcaacaattttacgaagttgctgtcgtcgcctggaacagtgaaggtttccatgtcaaaagagtgataaaagtgcagcttttggacgataacgataacgctccgattttccttcagcccctcatcgaattaacaatagaggagaataactctccaaatgcctttctgaccaagctctatgcaacagacgccgactccgaggagaggggccaggtttcatatttcctcggccctgacgcgccaagttacttctcccttgattcagtcactgggatactcacagtgtccactcagctcgacagagaagaaaaagagaagtatcggtatactgtgcgagcagtggattgcggcaaaccgccaagagaatccgtggcaaccgtggctttgactgttcttgataaaaacgacaactcaccgagatttatcaataaggatttctcatttttcgtgccggagaacttccccggttatggggaaatcggcgtgattagcgtgacagacgccgacgcaggtcgaaacggttgggtggccctctcagtcgtgaatcagagcgacattttcgtaatagacacaggtaaagggatgttgcgagccaaagttagtctcgaccgggagcagcaaagctcatacacgctctgggtggaagcagtagatggtggtgaacccgctttgtccagcaccgctaagatcacgatcctgctactggacattaacgataacccaccactagttcttttcccgcagtcaaatatgagttacctgctggtgttaccaagcactttacccggctcacctgtgaccgaggtatacgcagtcgataaggatactggtatgaatgcagttatcgcctatagcataatagggagaagaggaccgcgcccagaatcattccggattgatccaaaaacaggtaatatcaccctagaggaagcccttctgcagaccgattacggactgcataggctgctggtgaaagtttccgatcacggctatcccgagccactgcattcaactgttatggtgaaccttttcgtgaacgacactgtttctaatgaatcctatatcgagagtcttctgaggaaggagcccgagattaatatcgaggagaaggaaccacagatatccatcgaaccgacgcataggaaggtggagtcggtgtcatgtatgccaactctcgtggcactgagtgtgatctcccttggatcgattaccctggtgacaggcatgggtatttatatttgcttgagaaaaggcgagaaacaccctcgagaagatgaaaatctggaggttcagattcccctgaagggcaaaatcgatttgcacatgcgcgaaagaaaaccaatggatatttccaacatttag

SEQ ID NO: 213476 - DNA, 2856 bp, Artificial Sequence
  derived and/or modified sequence
atgaggggtcgaggcaatgcacgctcctcccaggccctcggcgtctcttggtgccccgcaacatggcacccacggttagatatgggtcgcctgcatcggccccgatcttccacaagctataggaacctgcctcatttattcctgtttttcctcttcgttggcccattctcctgccttggttcttattctcgcgctactgagctgctgtactccctgaacgaaggcctgccagctggagtactaatcgggtctctggcggaggatttaaggcttctccctcgttccgcaggcagaccagacccgcagtctcaacttcctgagcgcaccggtgctgaatggaaccctcctctgtccttctctttggcctcccgtggactgagcggacagtatgtgacacttgacaacaggtccggtgagctccataccagcgcgcaggagatcgatcgcgaggccctctgtgttgaagggggcggggggacagcatggtcagggtctgtgtccatatccagcagtccatcagattcctgcctccttctcctggacgtattggtgttgccccaggagtacttcagattcgtaaaggttaaaatcgccattcgagacataaacgacaatgctccgcaattccctgtcagccagatatcggtttgggtgcctgaaaacgcaccagttaatactcgcctagcgatcgaacaccctgctgtggatccagacgtaggaatcaacggagtgcaaacctatagactgctcgactatcatggaatgtttacattagatgtagaagagaatgaaaacggggaaagaacaccatatctcattgtaatgggcgccctggacagagagacacaagatcagtacgtgtccataatcatcgccgaggatggtgggtcgccacccctcctgggctctgccacactaactattgggatttcggacatcaatgataactgccccctgtttacagattcacagattaatgtgaccgtgtacggaaatgccacagtaggcacccctattgcggctgtccaggcagtggataaggacctcggaacgaatgcacagataacatactcctattctcagaaggtcccacaggcatcaaaggacttattccacctggacgaaaacacaggtgtgataaagctcttttctaaaattggaggatccgttctggagtcacataagctgacaatcctcgccaacggtcctggttgcattcccgctgtgattacggcactggtcagtataatcaaggtgattttccgacccccagaaatcgttccccgatatattgcaaatgagatcgatggcgtcgtctaccttaaagagctggagccggtcaatacacctattgctttcttcacaattcgcgacccagaggggaagtacaaggtgaactgctaccttgatggggaggggcccttccgcctgtccccctacaagccttataacaacgagtacctgcttgagacaaccaaacccatggattacgagcttcagcaattttacgaggtggcggtggtggcatggaatagtgaaggctttcatgtgaagcgagtcatcaaagtgcaactcctggacgacaatgacaacgcacctatattcttgcaaccactgatcgaactgactattgaagaaaataactcacccaacgcttttttgactaaactctacgccacagacgctgattccgaagaaagaggacaggttagctacttcctgggcccagatgcccctagttatttcagccttgattcagttactgggatccttaccgtatctacacaattggaccgggaagaaaaggaaaagtacagatacactgtacgcgccgtggattgcggcaagcctccacgggaaagtgtcgctaccgtggcactgactgttctcgacaaaaatgacaacagccctcgttttatcaacaaagatttttcattcttcgttccagaaaacttcccgggttatggagagatcggcgtgatctccgttaccgacgcagatgctggacggaatggctgggtcgccctaagcgtcgttaatcagagcgacatctttgtgatagacactggcaagggaatgcttagggccaaagtatcactcgacagggaacagcagtctagctacacactgtgggtcgaggctgtggacggtggcgagcccgctctctcgtccacggccaaaatcacaatcctgttgctggacatcaacgataacccccctctcgtcttgttcccacagtctaacatgagttatctgttagtgctcccctccacgttgcctgggagtcctgtcacggaagtatacgctgtggacaaggataccggaatgaatgcagtcatcgcttactccataatcggtcggcggggccctcgccctgagtcatttcgaatcgatcccaagacagggaatataaccttggaggaagccctgttgcagacagattatgggcttcatagactgctggttaaagtcagtgatcatggctacccagaaccgctccattccacagtgatggtgaacctcttcgtgaacgatactgtgagtaacgaatcttacatcgagtctttactaaggaaagaaccggagatcaacattgaggagaaggaacctcagatttctatcgaacccactcaccgaaaggtggagtctgtctcatgtatgccaactcttgtcgcgctgtctgtaattagcctcggatcgatcaccttagtgaccggtatggggatctacatttgcctgcggaaaggggagaaacacccgagggaggacgagaacttggaggtgcagatcccacttaaggggaagatagacctccacatgagggaaaggaagcctatggatatctctaacatttag

SEQ ID NO: 213477 - DNA, 2856 bp, Artificial Sequence
  derived and/or modified sequence
atgcgtggaaggggtaacgcccggagctcccaggccttgggggtcagctggtgtccagcaacttggcatcctaggctggatatggggaggcttcaccgccccaggagctcaacctcatacaggaacctgccccacctcttcctgttcttcctgttcgtggggccatttagttgcctcgggtcgtactccagggccacagagctgttgtactccctcaatgaggggctcccagccggtgttttgatcggcagccttgccgaggacctgcggttactgcccaggagtgctgggaggcccgaccctcagagccagctacctgagcgcactggcgcggagtggaatccacctctgtcattttcgcttgccagccgtggactttctggacagtacgtgacacttgacaacaggagcggcgagctgcatacaagtgctcaggagatagaccgcgaagctctgtgtgtggaaggtggaggcggtacagcttggtctggttccgtctcaatttcctctagtccttccgattcatgtctgctgctgcttgacgtccttgtcctgcctcaggagtattttagatttgtaaaggttaagatcgccatcagggatatcaatgataatgctccccaatttccagtgagtcagatctcagtctgggttcctgaaaacgccccagtaaataccagactggccattgagcatcccgccgtggaccccgatgtggggattaatggcgtgcagacgtaccgtctgctggactatcacggcatgttcacgcttgatgttgaggaaaatgagaatggagagcgtaccccatatctgattgttatgggcgcactggaccgagaaacacaagaccagtatgtgagtattattattgctgaagacggagggtcccctcccttgctgggtagcgcaaccttgacaatcggaattagtgatattaatgataattgtccactgttcacagacagtcagatcaacgtgaccgtctacggaaacgccactgtgggtaccccgatagccgcggtacaggcagtggacaaggatctggggaccaatgctcaaattacctacagctatagtcaaaaggttcctcaagcgtccaaagatcttttccatttagatgagaacacaggggtgattaaattattctcaaaaatcggtggcagtgtgctggagagccacaagcttacaattctggccaatggccctggatgcatacccgcggtgatcacagctctggtgtccatcataaaggttattttcagaccccctgagatcgtcccgagatacattgccaatgagatcgatggggtcgtgtacctcaaggagctggagccagtgaatacgcctatagctttctttacaatccgcgatccagagggaaagtacaaggtgaattgttatctcgacggcgagggccctttcaggctgagcccctacaaaccatacaacaacgaatacctgctcgaaaccaccaagcctatggactatgagctgcagcagttctacgaggtagcagtggtggcttggaatagtgaaggttttcacgttaagcgggtgatcaaggtacagcttctagatgacaacgataacgcgcccatctttctccagccacttatagagctgaccatcgaagaaaacaatagtcctaacgccttcctcacaaagctgtacgctacagatgcagactccgaggagagggggcaagtgtcctactttttaggacctgatgctccttcttacttctccttagatagtgtgactggtatcctgactgtgtccacgcagttggaccgtgaagaaaaagaaaagtatagatataccgttcgcgccgtcgactgcggcaaacctccgcgcgagagcgtagccacagtagccctcacagtgctcgataagaacgataacagcccacgtttcattaataaagacttctctttcttcgttccggagaacttccctggctacggagagatcggggtcatctcagtcactgatgctgacgccggcaggaatgggtgggtagctctgtctgttgtaaaccagtccgatatcttcgtaatagacactggcaaggggatgctccgcgcaaaggtttccctcgatagagaacaacagtcaagctacactctatgggtggaggctgtagacggaggcgagcccgccttaagcagtacggccaagattactatcctcctactggacataaatgacaaccctccactggtcctgttcccgcaatcaaacatgtcttatttactcgtactgccctctacgctgcctgggtcccccgtgactgaagtgtatgcagtcgacaaggacacgggaatgaacgccgtgattgcctactcaattatcggaagacgggggcccaggccagagtctttccggattgatcccaagactggcaacataacgctagaggaagcgctgttgcaaacggactatggtctgcaccgcctcctcgtgaaggtgtctgaccatgggtatcccgagccactgcattcgaccgtaatggttaacctatttgttaacgatactgtatctaacgaaagttacatagagtccctactacgcaaggagccagaaattaatatcgaagaaaaagaaccgcagatttctatcgagcccacacaccggaaggttgagtctgtatcctgcatgccaacattggtggcacttagcgtcatctccctgggctccatcactctagtgacagggatggggatttacatttgtctgcgtaaaggggagaaacaccctcgagaggatgaaaatttggaggtgcaaatccccttaaaaggtaaaatcgatctgcacatgagagagagaaagccaatggacatcagcaacatctag

SEQ ID NO: 213478 - DNA, 2094 bp, Artificial Sequence
  derived and/or modified sequence
atgttcaccctggatgtggaggagaatgaaaatggagagaggaccccctacctgattgtgatgggcgccctggaccgggagacccaggaccagtatgtgtccatcatcatcgcagaagatggcggcagcccccccctgctgggcagcgccaccctgaccatcggcatcagtgacatcaatgacaactgccccctcttcacagacagccagatcaacgtgacagtgtatggaaatgccaccgtgggcacccccatcgctgctgtgcaggccgtggacaaggacctgggcaccaatgcccagatcacctacagctacagccagaaggtgccccaggccagcaaggacctcttccacctggatgaaaatactggagtcatcaagctgttcagcaagattggaggctctgtgctggagagccacaagctgaccatcctggccaatggacctggctgcatcccagctgtgatcacagccctggtgtccatcatcaaggtgatcttccggcccccagagatcgtgccccgctacatcgccaatgaaattgatggagtggtgtacctgaaggagctggagcctgtgaacacccccatcgccttcttcaccatccgggaccctgagggcaagtacaaggtgaactgctacctggatggagagggccccttccggctgagcccctacaagccctacaacaatgagtacctgctggagaccaccaagcccatggactatgagctgcagcagttctatgaggtggccgtggtggcctggaacagcgagggcttccacgtgaagagggtcatcaaggtgcagctgctggatgacaatgacaatgcccccatcttcctgcagcccctcatcgagctgaccatcgaggagaacaacagccccaatgccttcctgaccaagctgtatgccacagatgctgacagcgaggagcggggccaggtgtcctacttcctgggcccagatgcccccagctacttcagcctggacagcgtgacaggcatcctgactgtgtccacccagctggaccgggaggagaaggagaagtaccgctacacagtgcgggctgtggactgtgggaagccaccccgggagagcgtggccaccgtggccctgactgtgctggacaagaatgacaacagcccccgcttcatcaacaaggacttctccttctttgtgcctgagaacttccctggctatggagaaattggagtcatctctgtgacagatgctgatgctggaagaaatggctgggtggccctgtctgtggtgaaccagagcgacatctttgtgattgacaccgggaagggcatgctgcgggccaaggtgtccctggaccgggagcagcagagcagctacaccctgtgggtggaggccgtggatggaggagagcccgccctgagcagcacagccaagatcaccatcctgctgctggacatcaatgacaacccccccctggtgctcttcccccagagcaacatgagctacctgctggtgctgcccagcaccctgcccggcagccctgtgacagaggtgtatgctgtggacaaggacaccggcatgaatgctgtgattgcctacagcatcattggaagaagaggccccaggcctgagagcttcagaattgaccccaagacaggcaacatcaccctggaggaggccctgctgcagacagattatggcctgcaccggctgctggtgaaggtgtctgaccacggctacccagagcccctgcacagcacagtgatggtgaacctgtttgtgaatgacacagtgtccaatgaaagctacatcgagagcctgctgaggaaggagcctgagatcaacatcgaggagaaggagccccagatcagcattgagcccacccacaggaaggtggagagcgtgtcctgcatgcccaccctggtggccctgagcgtcatcagcctgggcagcatcaccctggtgacaggcatgggcatctacatctgcctgaggaaaggagagaagcacccccgggaggatgagaacctggaggtgcagatccccctgaagggcaagattgacctgcacatgagggagaggaagcccatggacatcagcaacatctag

SEQ ID NO: 213479 - DNA, 2856 bp, Artificial Sequence
  derived and/or modified sequence
atgagaggaagaggaaatgcccggagcagccaggccctgggcgtgtcctggtgcccagccacctggcacccccggctggacatgggccgcctgcaccggcccaggagcagcaccagctacagaaacctgccccacctgttcctgttcttcctgtttgtgggccccttcagctgcctgggcagctacagccgggccacagagctgctgtacagcctgaatgaaggcctgcctgctggggtgctgattggcagcctggccgaggacctgcggctgctgcccaggtctgctggccgcccagacccccagagccagctgcctgagaggactggagctgagtggaacccccccctgtccttcagcctggccagccggggcctgagcggccagtatgtgaccctggacaacagaagtggagagctgcacaccagcgcccaggagattgaccgggaggccctgtgtgtggagggcggcggcggcacagcctggagcggctctgtgtccatcagcagcagccccagcgacagctgcctgctgctgctggatgtgctggtgctgccccaggagtacttccgctttgtgaaggtgaagatcgccatccgggacatcaatgacaatgccccccagtttcctgtgtcccagatctctgtgtgggtgcctgaaaatgcccctgtgaacacccggctggccatcgagcaccctgctgtggaccctgatgtgggcatcaacggggtgcagacctaccgcctgctggactaccacggcatgttcaccctggatgtggaggagaatgaaaatggagagaggaccccctacctgattgtgatgggcgccctggaccgggagacccaggaccagtatgtgtccatcatcatcgcagaagatggcggcagcccccccctgctgggcagcgccaccctgaccatcggcatcagtgacatcaatgacaactgccccctcttcacagacagccagatcaacgtgacagtgtatggaaatgccaccgtgggcacccccatcgctgctgtgcaggccgtggacaaggacctgggcaccaatgcccagatcacctacagctacagccagaaggtgccccaggccagcaaggacctcttccacctggatgaaaatactggagtcatcaagctgttcagcaagattggaggctctgtgctggagagccacaagctgaccatcctggccaatggacctggctgcatcccagctgtgatcacagccctggtgtccatcatcaaggtgatcttccggcccccagagatcgtgccccgctacatcgccaatgaaattgatggagtggtgtacctgaaggagctggagcctgtgaacacccccatcgccttcttcaccatccgggaccctgagggcaagtacaaggtgaactgctacctggatggagagggccccttccggctgagcccctacaagccctacaacaatgagtacctgctggagaccaccaagcccatggactatgagctgcagcagttctatgaggtggccgtggtggcctggaacagcgagggcttccacgtgaagagggtcatcaaggtgcagctgctggatgacaatgacaatgcccccatcttcctgcagcccctcatcgagctgaccatcgaggagaacaacagccccaatgccttcctgaccaagctgtatgccacagatgctgacagcgaggagcggggccaggtgtcctacttcctgggcccagatgcccccagctacttcagcctggacagcgtgacaggcatcctgactgtgtccacccagctggaccgggaggagaaggagaagtaccgctacacagtgcgggctgtggactgtgggaagccaccccgggagagcgtggccaccgtggccctgactgtgctggacaagaatgacaacagcccccgcttcatcaacaaggacttctccttctttgtgcctgagaacttccctggctatggagaaattggagtcatctctgtgacagatgctgatgctggaagaaatggctgggtggccctgtctgtggtgaaccagagcgacatctttgtgattgacaccgggaagggcatgctgcgggccaaggtgtccctggaccgggagcagcagagcagctacaccctgtgggtggaggccgtggatggaggagagcccgccctgagcagcacagccaagatcaccatcctgctgctggacatcaatgacaacccccccctggtgctcttcccccagagcaacatgagctacctgctggtgctgcccagcaccctgcccggcagccctgtgacagaggtgtatgctgtggacaaggacaccggcatgaatgctgtgattgcctacagcatcattggaagaagaggccccaggcctgagagcttcagaattgaccccaagacaggcaacatcaccctggaggaggccctgctgcagacagattatggcctgcaccggctgctggtgaaggtgtctgaccacggctacccagagcccctgcacagcacagtgatggtgaacctgtttgtgaatgacacagtgtccaatgaaagctacatcgagagcctgctgaggaaggagcctgagatcaacatcgaggagaaggagccccagatcagcattgagcccacccacaggaaggtggagagcgtgtcctgcatgcccaccctggtggccctgagcgtcatcagcctgggcagcatcaccctggtgacaggcatgggcatctacatctgcctgaggaaaggagagaagcacccccgggaggatgagaacctggaggtgcagatccccctgaagggcaagattgacctgcacatgagggagaggaagcccatggacatcagcaacatctag

SEQ ID NO: 213480 - DNA, 2094 bp, Artificial Sequence
  derived and/or modified sequence
atgttcaccctggacgtggaggagaacgagaacggcgagcggaccccgtatctgatcgtcatgggagccctggatagggagacgcaggaccagtacgtatcaattattatcgctgaagacggcggctcgcctccattgctcggaagcgcgacactgaccattggcattagcgatattaacgataattgtcctctttttactgattcacagatcaatgtgacagtttatggtaatgctaccgtgggcacccccattgcagccgtacaagccgtggacaaagacctgggcactaatgcgcagatcacttattcatatagccagaaggtgccccaggcttctaaagacctttttcacctggacgagaatacaggagtgattaagttattctcaaagattgggggaagtgtgcttgagagtcacaagcttacgatattggcaaatggccctggatgtattcccgctgtgatcacagcgctggtaagcatcatcaaggtgatcttccgacccccggaaatcgtgccacgctatattgccaatgagatcgatggggtcgtttatctgaaagagctggagccagtgaacacgccaatcgcattctttactatcagggatcccgagggcaagtacaaagtcaactgctaccttgatggagaagggccattcagactttccccttacaaaccttacaacaatgagtacctgcttgaaaccactaagcccatggactacgaactccaacagttttacgaagtggctgtcgtcgcatggaattctgagggctttcatgtgaagagggtcataaaagtgcagcttctcgacgataacgacaacgcccctatcttcttgcagccactgattgaactgaccatcgaagagaacaacagcccaaatgcttttttgactaaattgtacgctaccgacgcagatagcgaagaaagaggccaagtatcgtatttcctgggtccggatgcgccaagttatttcagtctagatagcgtgaccgggatactgaccgtgagtactcagcttgaccgggaggagaaggagaaatataggtacaccgttagagcagtggactgcgggaagcccccccgcgagtccgtggcaacagtggcgctgacagttttggataaaaacgataactctcctcggttcataaataaagatttctccttttttgtgcctgaaaattttcctggctacggggagattggcgtgatatctgtaacggatgctgatgccgggcgaaacggctgggtcgctttgagcgtggtgaaccagagtgatattttcgtgatcgatactggcaaaggaatgctaagggcaaaggtgtctctcgatagggagcagcagtccagctacaccctgtgggtagaagccgtggatgggggggaacccgctctatctagcacggcaaagatcactatccttttgctcgatatcaacgacaatcctcccctggtcctctttccacaatctaacatgtcttacctcctagttttgcctagcacactgcccggatctccagtgacggaagtgtacgcagtcgacaaggacactggcatgaacgcggttattgcgtactctatcatcggcagacggggtcccaggcccgagagtttcaggattgaccccaaaacaggaaatattacactggaggaagctctcctacagactgactatgggctgcaccgtctgctcgttaaagtgagtgatcatggataccctgaaccactgcacagcactgtcatggttaacctcttcgtgaatgacacagtttccaacgaaagctacatcgagagccttctcagaaaagaaccagagatcaatatcgaggagaaggaaccacaaatatccattgagcccacccacagaaaggttgagagcgttagctgcatgccaacccttgtcgcgctcagtgtgatctccttaggatctattactttggtgacaggaatgggaatctacatctgccttaggaaaggggaaaaacacccaagagaggatgaaaatctcgaagtacagattcccctcaaagggaaaattgatctgcacatgcgagaaagaaaacctatggatatttcaaatatatag

SEQ ID NO: 213481 - DNA, 2856 bp, Artificial Sequence
  derived and/or modified sequence
atgcggggccggggcaacgcccggagcagccaggccctgggcgtgtcttggtgccccgctacctggcatccccgtctcgatatgggcaggctgcatcgaccgcgatcatccacttcttacagaaatctgcctcatctgtttctctttttcttgtttgttgggccattttcttgcttgggcagttactccagggcaactgagttgctgtattctctcaacgagggactgcccgcgggggtccttattggcagtctggcagaggatttgagactcctacccaggagcgccgggagaccagaccctcaaagccagttacctgaacgcacaggcgccgaatggaatcctccattgagcttctctctagcttctaggggcctgtctgggcagtatgttacactggataatcgctccggagagctccacacgtccgctcaggaaattgacagagaggcactgtgcgtggagggcggaggcggaaccgcctggtcaggctctgtgtcaatctcttccagtccctccgattcatgtctactgctgctggacgtgttagtgctgccccaagagtacttcagattcgttaaagtcaaaatcgcgatcagggacattaacgacaatgccccacagtttccagtttctcagatctccgtctgggtccccgagaacgccccagtcaatactaggctcgcaatcgaacatcctgccgttgaccctgatgtaggcattaacggcgtgcagacttacaggctgttggattatcatggcatgtttacactagacgttgaggaaaatgaaaacggagagagaacaccctacttgatcgtgatgggcgccctcgaccgagagacccaggaccaatatgtctcgattataatcgctgaggatgggggaagccctcccctcctggggtcagccaccctcactattggaattagtgatatcaatgacaattgtccactgttcacagatagtcagattaatgtgactgtctacggtaatgctacggtcggaacccccatcgcagccgtccaagccgttgataaggatttaggaacaaatgcccagattacctactcctattcccagaaggtcccacaggcatcaaaggatctctttcacctggatgagaacactggagtaataaagctctttagcaaaatcggtgggagcgtgctagagtcgcacaagcttacaatcctagctaatgggccaggctgcattccagccgtgatcaccgctctagtatctatcatcaaggtgatatttcgacctccagaaattgtgcctaggtatattgctaatgagattgacggcgtggtctatcttaaggagcttgagccggtgaacacacctatcgccttctttacaattagagatccagagggcaaatacaaggtgaattgttatctggatggggagggaccctttcgcctgagcccttataaaccatacaacaatgagtacttactggagaccacaaagccgatggattatgaacttcagcagttctatgaagtagccgtcgttgcctggaattccgagggattccacgtcaagagggtaatcaaagtacaacttctggacgacaacgacaatgctcccatcttcctgcagccgctgatcgaattgaccattgaagagaataactccccgaatgcgtttttaaccaaactttatgctacagatgctgatagtgaagagagaggccaggtatcctacttccttggcccggacgctccttcctactttagtttagacagtgtaacaggtattctcaccgtctctacacaactggacagagaagagaaagaaaaatacagatacactgtcagggccgtggactgcggcaaacctccacgggagtcagttgcgactgtggctcttaccgttctggacaagaacgacaacagtcctcgcttcattaacaaggacttctccttcttcgtgcctgagaactttcctgggtatggtgagattggcgtgatttccgttactgacgcggacgcaggacggaacggctgggtggcactgtccgtcgtcaaccaatctgacatctttgttattgacacaggaaaaggaatgttgagggcaaaggtgtctttggaccgcgagcagcaaagttcctacactctttgggtggaagcggtcgacgggggggaacctgctctctcatctactgctaagattaccatcttgttgctggacattaacgataacccacccctggtgctttttccccaatcgaacatgtcctatctcctcgtcttgccctcaactctgccgggctctccggtgactgaggtatatgccgtagataaggacacaggaatgaacgccgtgatcgcttactccattatagggcggagaggccctagaccagaatcgttcagaatcgacccgaaaactgggaatatcactttggaagaggctcttttgcaaacagactacggactgcatagactgcttgtcaaagtaagcgaccatggctacccggaacccctgcatagtaccgtgatggttaacctgtttgtgaatgatacagttagcaacgaaagttacattgagtcactgctgcgtaaggagcccgagatcaacattgaagaaaaggaaccacagatctcgatcgagcctactcataggaaagttgaaagcgtcagctgtatgcccacactcgtggccttgtctgtgatctcactcggttcgattacacttgtcaccggtatgggaatttacatctgcctgaggaagggtgaaaagcatcctcgggaagacgaaaacctggaggtgcagatccccctgaaaggcaaaatagatctgcatatgagggaacggaagcccatggacattagtaacatttag

SEQ ID NO: 213482 - DNA, 2856 bp, Artificial Sequence
  derived and/or modified sequence
atgcggggccggggcaacgcccggagcagccaggccctgggcgtgtcttggtgcccggcgacctggcaccctagactggatatgggtagacttcaccgcccaaggagctcaacaagttacagaaacttgccacacctcttcctcttttttctgtttgtgggtcccttctcctgtctgggctcctattcgcgggctacggaactcctctattccctgaacgaaggattgcccgccggggtactgataggatcattagccgaggacttgcgcttgctgccccgcagcgcaggaagaccagacccgcagtcacagttgcccgagcgtacaggagcagagtggaacccccccctgagctttagcctggcatcccggggactgagcgggcagtatgtgaccctagacaatcgctccggcgagctccacaccagcgcccaggaaatagatcgggaagccttgtgtgtcgagggcggcggtggtacagcatggtcaggttccgtgtcaatctcaagcagccccagcgatagctgccttttgctcctggatgtccttgtcttaccacaggaatatttcagatttgttaaagtgaagatagcgattcgggacataaatgacaatgccccacagttcccggtgtctcagattagcgtgtgggtgccagagaatgctcctgtcaacaccagactggcaatagagcaccccgctgtcgaccctgatgtgggcataaacggcgtgcaaacgtacaggctgctggattaccacggaatgtttacactggatgtagaagaaaacgagaatggagaacgaacgccatacctcatcgttatgggcgctcttgatcgagagacacaggaccagtatgtgagcattatcattgctgaggacggtggcagcccccccctgctggggagtgccacactgacaattgggatttctgacatcaatgacaattgccccctgtttaccgacagtcagatcaatgtgacagtgtacggcaatgcaacagtggggactccgatcgccgctgtccaggctgtggataaggacttgggcactaatgcacaaattacttacagttattcacagaaggtgccccaggccagtaaagacctgtttcatctggatgaaaatactggcgtcataaagctgttctcaaagataggaggtagcgttctcgaatcccataaactgacaatactggccaatggtcccggttgtatccccgctgttataaccgccctggtgagtattataaaagtgatcttccgtccacccgaaatcgtccctcgttacatcgccaatgaaatcgatggggttgtctacctgaaggagctggagcccgtcaataccccaatagccttctttacaatccgcgacccggagggaaagtataaagtaaactgttatctcgatggggaggggcccttccgattatcaccatataagccctacaataacgagtatctgttggagaccaccaagccgatggattatgaactacaacagttctacgaagtggctgttgtggcctggaactctgaggggtttcatgtcaagcgtgttattaaggtgcagctgttagacgataatgataatgccccaatttttctgcaacccctgattgaactcaccatagaggagaacaatagcccaaacgcattcctcaccaagctctacgcaacagacgcagactctgaggagcgtggccaggtctcctacttcctcgggcctgacgccccaagctactttagcttggacagcgttacgggcatcctgactgtgtcaacacagctggaccgcgaggagaaagagaagtatcgctatactgtacgcgccgtggattgtggaaaacctccccgggagtcggttgcaactgttgctctgacagttcttgataaaaatgacaactctcctaggttcattaacaaggactttagcttctttgtccccgagaacttccccgggtacggtgagatcggcgtcatctctgttactgatgctgacgcgggaaggaacgggtgggtagccctgagcgtcgtcaaccagagcgatatctttgtgatagataccggtaaaggtatgttacgagcaaaagtcagccttgaccgcgagcagcagagctcatatactctgtgggtggaagcggtcgatgggggcgagcccgcactgtctagcaccgctaagattacgattctcctactagacatcaatgacaatccccccctcgtgctgttcccacagtccaacatgtcttatctgctggtgctgcccagcaccctgcccggctcgccggtgacagaggtctatgccgtggacaaggacacaggcatgaatgccgtgatcgcgtattccatcataggccgaaggggccctcgacccgaatcattccgcattgaccctaaaactggtaatattacacttgaggaggctctgctgcagactgactatgggttgcatcgcttgttagtgaaggttagcgaccacggctaccccgaaccactgcatagcactgtcatggtcaacctcttcgtgaacgacacagtctctaacgagtcttatattgagagcctgctccggaaggagccagaaatcaatattgaggagaaggagccccagatctctatagagccaacgcataggaaggttgaatccgtgtcctgcatgcccactctggtagctctgagtgtgatcagtctgggcagcatcacattggtgactgggatgggcatttacatttgcctaaggaagggagagaagcaccccagagaggacgagaatctagaagtgcaaatcccactcaaagggaagatcgacctccatatgcgggagagaaagcccatggacatttccaacatttag

SEQ ID NO: 213483 - DNA, 2094 bp, Artificial Sequence
  derived and/or modified sequence
atgttcaccctcgacgtggaggagaacgaaaacggggaaaggactccttacctgatagtgatgggggctctcgatcgtgaaacacaagatcaatacgtgtctataatcatagccgaggatgggggtagccctcctctgcttggtagcgcaaccttgactatcggcatttccgacatcaatgataactgccccctgttcacagatagtcagattaatgttacagtctatggtaacgccaccgtgggaactcccattgccgcagtgcaggctgtcgacaaggatctgggcaccaacgcccagattacatactcatactcccagaaggttcctcaggcaagtaaggatctgttccacctggatgaaaataccggcgtgatcaaactgttcagcaaaattggcggatccgtgcttgagagccataaactgaccatcttggccaatggacctggctgcattcccgctgtcatcaccgccctcgtcagtatcatcaaggtgattttcagacctcccgagatcgttcctcgctacattgctaatgaaatagacggtgtcgtttacttgaaggagctggagcccgttaatacccctattgcattctttacaattcgagaccccgaaggcaaatacaaagtgaactgttacctcgatggagaaggaccgttccgactgtctccctacaagccgtacaataatgagtacctgctggagacgactaagccaatggactacgaattgcaacaattctacgaggtggctgtagtggcctggaactcagagggttttcacgttaagagggtgataaaagttcaactattggacgacaacgataatgctcccatctttctgcagcctctgatagagctcaccattgaagagaacaattctccaaacgcctttctgacaaaactgtacgctactgacgcagattcagaggaaagaggacaggtgagttatttcttgggccctgacgctcctagctacttctccctagattcagtgacaggtattcttacagtgagcactcagttggaccgtgaggagaaggaaaagtacagatacaccgtccgcgcagttgactgcggcaagcctccccgagaaagtgtggcaaccgtcgccttgaccgtacttgacaagaatgataactccccccgtttcattaataaagacttttcattctttgtgcccgaaaacttccctggctatggagagattggagtgatcagcgtgacagatgctgacgcaggacgaaatgggtgggtggccctttctgtcgtgaatcagtctgacatcttcgttattgacaccggaaagggcatgcttcgggcaaaggtgagtcttgacagagagcaacagagctcgtacaccctgtgggtagaggctgtggatggcggtgaaccagccctgtcttctacagctaagatcacgatcctgctgctcgatataaacgacaacccccctctcgtcttatttccacagagcaacatgtcctaccttctcgtattaccctcaacactgcctggatcacctgtgactgaggtgtatgccgtggataaggacaccggtatgaatgcagtaattgcctactctattatagggaggcggggacctcggccagaatccttcagaatagaccccaagactggaaatattacattagaagaagcattgcttcagaccgactacggccttcatagactgctagtaaaagtttccgatcacggctacccggaaccactccatagcaccgtgatggtgaatctcttcgtgaacgacacagtctccaacgagtcatacatcgagagtctcctgagaaaggagcccgaaattaacatcgaggagaaagagccgcaaatctctatcgagcccactcacaggaaggttgagagcgtatcgtgcatgcctaccctggtcgcactttccgtgatctctctgggcagtatcaccctcgtgactggtatgggcatttacatttgcctgcggaaaggtgaaaaacacccgcgagaggacgagaaccttgaagtgcaaattccattaaagggtaaaatcgatctgcacatgcgtgagagaaagccaatggatatcagcaacatctag

SEQ ID NO: 213484 - DNA, 2856 bp, Artificial Sequence
  derived and/or modified sequence
atgcgtggcaggggaaatgcgaggtctagccaggcattgggcgtctcatggtgccctgccacctggcacccacgcctcgacatgggaaggcttcaccggccaaggtcttccacttcgtacagaaacctgccacacttattcctgtttttcctgtttgtgggaccgttttcctgtttggggtcctactctcgagccactgagctactctacagcttgaatgaaggattaccagccggtgttctcatcggtagtctggctgaagatttgagactcctcccacgatctgccggtcgccctgaccctcagtcgcagctccctgagcgaaccggtgccgaatggaacccacccctttccttctccctggcaagcagaggtttgtctggtcagtacgtgacactcgacaatcgatcgggagagttgcatactagtgcacaggagattgatagggaggcactctgtgtggaaggaggaggcggaactgcctggtctgggtcggtttctattagcagttcgccgtctgacagctgtctactgcttctcgacgtgctcgtgctcccgcaggaatattttcggttcgttaaggtgaagattgccatcagagacattaacgacaatgcccctcagtttcccgtgtctcagattagcgtgtgggttcctgagaatgccccagtgaatacaaggctcgcaatagaacatcctgccgttgatcctgacgtgggcatcaacggagtgcagacctatcgcctacttgactaccatgggatgttcacactggatgtggaagagaatgaaaatggcgagcgaacgccatatctgattgttatgggtgcgctggatagagagactcaggatcagtatgtgtcaataatcatcgctgaggacggcggaagcccgcctctcttaggatccgccactctgactattggcatatcggatatcaacgataactgcccattgttcactgactcccagattaacgtcaccgtctacggaaatgcaacggtcggaaccccgatcgccgcagtccaagccgtcgataaagaccttgggacaaacgcacagattacctattcctacagccagaaggttccccaggcctcaaaagacttgttccaccttgacgagaacacaggagtcattaaactgttttctaagattgggggatccgttctggagtcccataagctcaccatattggccaatggcccaggttgtattcccgctgtgatcactgcgctggtctcaatcattaaagtgatttttcgcccacccgagatcgtgccgagatatatcgcgaacgaaatagacggtgtggtgtacctaaaggaactggaacccgttaacacgcccatcgcgtttttcacaatccgcgaccctgagggaaagtacaaggtgaattgctatctcgatggcgagggcccttttcgcctgtccccttacaagccttacaataatgagtatctgctggaaactaccaaaccaatggactacgagctacagcaattctatgaggtcgctgttgtggcatggaattccgagggcttccacgtgaagcgcgtgataaaagtccaactgctcgatgataacgataacgcccctatttttctgcaaccactgattgagctcacgattgaggaaaacaactcacccaatgcattcctgacgaaactgtacgctacagacgcagactcagaggagagagggcaggtatcatacttcctcggaccagacgctcctagctatttttctctcgatagcgtgacaggaatcctcacagtgagcactcagctcgatcgagaggagaaagagaaatacaggtataccgtgagggctgtggactgcggaaagccgccaagagaatctgtggctacagttgctctgaccgtgctggataagaacgacaattcacccagatttataaataaggatttcagtttcttcgtgcctgagaactttcctggctacggcgaaattggtgtgattagcgtgacggatgccgatgcaggacggaacggatgggtggcgttgagtgtggtgaatcagtccgatatctttgtgattgatacgggcaaaggcatgttgcgggctaaggtctctctcgaccgggaacagcagagcagctatacactgtgggtagaggctgtcgacggaggggaaccagctctgtcttccaccgctaagattacaatattgctgctcgatataaacgacaatcctccactagttctctttccccagagcaacatgagttacctgctggttctcccctctactctgcctgggtctccagtgaccgaagtgtacgccgtggacaaggacacaggaatgaacgccgtaatcgcatatagcattatcgggagacgtggcccaaggcctgaaagttttcgtattgatcccaaaaccggaaatattactctcgaagaagcattattgcagacagattacggcctgcacaggcttctcgtgaaggtgagcgatcacggatatcctgagcccttacattctactgtgatggtaaatctgtttgtcaacgatacagttagcaacgagtcatatatcgagtccctgctgcgcaaagaaccagagataaacatcgaagaaaaggagcctcaaatatctatcgagccgacgcataggaaagttgagtccgtctcatgtatgccaacactggtggcccttagcgtgatctcgttaggttcaatcacattggtcacgggtatgggtatctatatctgtctcagaaagggggagaagcatccaagggaggacgaaaaccttgaagtacagatcccgctcaagggcaaaatagatctgcacatgcgtgaacggaaacctatggatatttccaatatttag

SEQ ID NO: 213485 - DNA, 2856 bp, Artificial Sequence
  derived and/or modified sequence
atgagaggcagaggcaacgctaggtccagccaggccctcggagtcagctggtgcccagcgacctggcaccccagacttgatatgggaaggcttcaccggcctagatcctctacatcctatagaaatctaccacatttatttctgttctttttgttcgtgggtccattcagctgcttgggctcatattcgcgggcaactgaactgctatactctctaaatgaagggctccctgccggagtactcattggctccttggcagaggatcttagacttctcccacggtccgccggaaggccagatcctcagagccaactgcccgaacggacaggagccgagtggaatcctcccctcagtttctctctggcatctcggggactcagtggacagtacgtgactctggacaatcggtccggtgagctgcacactagtgcccaggaaatcgatagggaggccctgtgtgtcgaaggcggtggtggaacagcctggtctggctctgtgtccattagtagttcccccagcgatagttgcctcttactcctagacgtgctcgttcttccccaagaatacttcaggtttgttaaagtaaagattgctatcagagacatcaacgataacgccccacaattccctgtcagccagatctctgtctgggtgccagagaatgcacccgtgaacacgcgactcgccatcgaacatcctgcagtagacccagatgtaggtatcaacggtgtgcaaacttatcgactactggactatcacggaatgttcaccttagacgtcgaggaaaatgagaacggtgagcggacaccctatttgatcgtcatgggcgcactggacagggagacacaagaccagtacgtgtctattatcatcgcagaagatgggggaagccctcctctgctggggagcgctacgctgaccatcggcatcagtgatattaacgacaattgcccgcttttcaccgactcccagatcaacgtgaccgtgtacggtaacgctacagtaggaacccctattgccgctgtgcaggccgtcgataaggatttgggaacgaacgcgcaaattacttatagttactcgcagaaagtgccccaggcctccaaagacctcttccacctggacgaaaatacaggcgtcatcaagctcttctccaaaatcggcggatccgtcctggagtctcacaaactcaccatcctcgcaaacgggccaggttgtatccctgccgtcatcactgccctggttagtattattaaggtgattttcaggcccccagagatcgtgcccaggtacattgcaaacgaaattgatggggtcgtgtaccttaaagagctagagcccgtaaacacccccatcgccttcttcaccataagggatcccgagggaaaatacaaggtgaattgctacttggatggggagggtccctttcgtctttcgccctataagccatataataacgaatacctgctggaaacaactaaaccaatggactacgaactgcagcaattttacgaggtagctgtggtggcttggaactcagagggttttcacgtcaaaagagtgattaaagttcagctgctggatgataatgataacgcaccaatatttctccagccattaatagagctgaccatagaagagaacaatagtcccaatgcatttctgactaagctctacgctacagacgcagactctgaagagcgtggccaagtgtcgtatttcctggggcctgacgcacctagctatttctctctagattctgtgaccggtattctcaccgtaagcactcagctggatagggaagagaaagagaaataccgttataccgtgagagcagtagattgcgggaaacctccccgtgagtctgtcgccaccgtagccttgacggtgttggacaagaatgacaactcgcctaggtttatcaataaggattttagcttctttgtcccagagaacttccctggttacggcgaaattggggtaatttccgtgacagacgcagatgccggtcgaaacggttgggtagccctgtccgtggtgaatcagagtgacatcttcgtgatcgatacgggaaagggcatgttaagggccaaggtgtctctagacagagaacagcagagttcttacaccttgtgggttgaagcagtggatggcggtgagccagccctgagctcgacagccaaaattaccatcctgcttttggacattaatgacaatccgccattagtactgtttccccaatctaacatgtcatatttactggtattaccatctacactcccaggcagccccgtgacagaagtctacgcagtagacaaggacacaggaatgaacgctgtcattgcatatagcattatcggtagaagggggcctcgacctgagagtttcagaatagatcccaaaaccggaaacatcactctggaagaggcactcctgcagaccgattacggactacatcggttattggtgaaagtgtctgatcacggctacccagaacctctgcatagtactgtgatggttaatctgttcgtgaacgataccgtgtctaacgagagttacattgagtcattgctgcgtaaggagcccgagatcaacattgaggagaaagagcctcagattagcatcgagccaacacaccggaaagtagaatccgtatcctgcatgccaaccctggttgctctgtccgtcatctcactggggtctattaccctggtgaccggaatggggatttatatctgtttgagaaaaggtgagaaacatcctagagaagatgaaaacttggaggtgcagatcccactgaagggcaaaattgacctgcatatgagagagcggaaacccatggacatttccaacatatag

SEQ ID NO: 213486 - DNA, 2942 bp, Artificial Sequence
  derived and/or modified sequence
gaatgcgcggccgagggaatgcgcgcagctcacaggccctgggagtgagctggtgcccggcgacctggcacccgcgcctggatatggggcgtctacatcgtcccaggagcagcaccagctacaggaacctgccgcatctgtttctgtttttcctcttcgtgggacccttcagctgccagagcgcaccggtgctgagtggaacccccctctctccttcagcctggcctcccggggactgagtggccagtacgtgaccctagacaaccgctctggggagctgcacacttcagctcaggagatcgacagggaggccctgtgtgttgaagggggtggagggactgcgtggagcggcagcgtttccatctcctcctctccttctgactcttgtcttttgctgctggatgtgcttgtcctgcctcaggaatacttcaggtttgtgaaggtgaagatcgccatcagagacatcaatgacaacgccccgcagttccctgtttcccagatctcggtgtgggtcccggaaaatgcacctgtaaacacccgactggccatagagcatcctgctgtggacccagatgtaggcattaatggggtacagacctatcgcttactggactaccatggtatgttcaccctggacgtggaggagaatgagaatggggagcgcaccccctacctaattgtcatgggtgctttggacagggaaacccaggaccagtatgtgagcatcatcatagctgaggatggtgggtctccaccacttttgggcagtgccactctcaccattggcatcagtgacattaatgacaattgccctctcttcacagactcacaaatcaatgtcactgtgtatgggaatgctacagtgggcaccccaattgcagctgtccaggctgtggataaagacttggggaccaatgctcaaattacttattcttacagtcagaaagttccacaagcatctaaggatttatttcacctggatgaaaacactggagtcattaaacttttcagtaagattggaggaagtgttctggagtcccacaagctcaccatccttgctaatggaccaggctgcatccctgctgtaatcactgctcttgtgtccattattaaagttattttcagaccccctgaaattgtccctcgttacatagcaaacgagatagatggtgtggtttatctgaaagaactggaacccgttaacactcccattgcgtttttcaccataagagatccagaaggtaaatacaaggttaactgctacctggatggtgaagggccgtttaggttatcaccttacaaaccatacaataatgaatatttactagagaccacaaaacctatggactatgagctacagcagttctatgaagtagctgtggtggcttggaactctgagggatttcatgtcaaaagggtcattaaagtgcaacttttagatgacaatgataatgctccaattttccttcaacccttaatagaactaaccatcgaagagaacaactcacccaatgcctttttgactaagctgtatgctacagatgccgacagcgaggagagaggccaagtttcatattttctgggacctgatgctccatcatatttttccttagacagtgtcacaggaattctgacagtttctactcagctggaccgagaagagaaagaaaagtacagatacactgtcagagctgttgactgtgggaagccacccagagaatcagtagccactgtggccctcacagtgttggataaaaatgacaacagtcctcggtttatcaacaaggacttcagcttttttgtgcctgaaaactttccaggctatggtgagattggagtaattagtgtaacagatgctgacgctggacgaaatggatgggtcgccctctctgtggtgaaccagagtgatatttttgtcatagatacaggaaagggtatgctgagggctaaagtctctttggacagagagcagcaaagctcctatactttgtgggttgaagctgttgatgggggtgagcctgccctctcctctacagcaaaaatcacaattctccttctagatatcaatgacaaccctcctcttgttttgtttcctcagtctaatatgtcttatctgttagtactgccttctactctgccaggctccccggttacagaagtctatgctgtcgacaaagacacaggcatgaatgctgtcatagcttacagcatcatagggagaagaggtcctaggcctgagtccttcaggattgaccctaaaactggcaacattactttggaagaggcattgctgcagacagattatgggctccatcgcttactggtgaaagtgagtgatcatggttatcccgagcctctccactccacagtcatggtgaacctatttgtcaatgacactgtcagtaatgagagttacattgagagtcttttaagaaaagaaccagagattaatatagaggagaaagaaccacaaatctcaatagaaccgactcataggaaggtagaatctgtgtcttgtatgcccaccttagtagctctgtctgtaataagcttgggttccatcacactggtcacagggatgggcatatacatctgtttaaggaaaggggaaaagcatcccagggaagatgaaaatttggaagtacagattccactgaaaggaaaaattgacttgcatatgcgagagagaaagccaatggatatttctaatatttgatatttcatggtggaataacacagagaaatgttttaactgactttggatcttcatcacctaaaaaagagtgtgttgatggcagttccaatgaaggacaactaatttataacttgttctatattgtaaatagctgtttacaggtttttaaatttaaattcagaggttataaaatgtgtacagcatttttaagtgaaaattagtactaacagctataggacttgtattt

SEQ ID NO: 213487 - DNA, 6347 bp, Artificial Sequence
  derived and/or modified sequence
ataaaatattgcatattgacagcaatatcccagtggctgatttattgataatatctttgaccatttgaattttttttcctattatatataaggaaatacaaactaggtaacaggaagaaatgagaaaaggtagagagagacaatagtgaagactggtggacattggactacaaaagattactgcaggattcttctatgatgctgattacagctttatcttatcaagctttggcattgaagaccatgtgaattcatctccaaccctgggagtgaaataagaactttcttttttgcttctgaaattttaagctctatacggaaacactttttacttaatctgcatgacatcagagaaagggaacaatttgaccaaagaaagaagaaaaagtggattagcagatctcatggactgagagtctccagatggtaggaggtccattcagcagaaatacaaatgagaatacgatgtttctaatgtatttaatttggagaaaaacattttcacattttttcaataagcaaagttaatcacattacattttacctttggtaaaagaatattaattaaattgattatgctcacactagagaacaatataacatatcatagtcaaataacgtttatgtttatattcattattacaagcattaaaaagaaataaatagtgttggcagatattacttaagcaggcagagtctcctatatctggaaatttatcatttatactgctagagttaaggatattttaatagtatttaattaactaaaatttaagagattactgctttcagccatttaaaaattattaattgaacgttgactacctgcttggtctgtgtttaccattatccattaagagcttgttatttaattggggaaatccaagtcaagatacagtaaatacgcaagaaacttatcaaatatttgaataaaaataatggcacccatattttatggtgtatttatagtattgttcctgaaaaaataagaaaaactattaatatccccctccaaaaacacatggaagaaatttcccatttttaaaaattattaatattctcatctaataaatgctatttggaactatcatattggaaataaataaaatacctttaatccaataatgatatcattgaagaaatgagtaccctcatatagttacagtgctattataaataactaaaatttctggaggtatttgttttacatataccagaaagtcttaaaattttacattccagttaaaacatatattcaatatttagtaattcatgctaaattatcataaatatttccaaagatgtcgataaaataagcctcactgaaaatatatttatataaaatattgaacaagtaaaatgttcatatccacattacaaactgatatgaggaaattctattctgtccaaaaatgatacagaatacgtaaagacatgcaaaatgattataacataataaaacataaattagatgatttttaaaatctctaagttcagtaaaaatccagagaaatcaaactgaatgtggataaaggcaccaaaaagtggaatgaataaagtcacgtacatcggactgtgaagaaaaatcatgttttggaaaagctgtccacacaatacaagaatttttaatcgaagaaaaattcactggcaaagaagccactactgcctctaaaataagaccacaaggcaaacacccagagacatttgagcctccaactaggaaactagcagaagctctaccactgcccacagcaaagattcaaaattgggcaacctgtggacttggcatctgactggtgcggcaaggaaggaggctggtaggtaagcgctactgtgcccaaccccgagctgcctcttcgcagtcttcaggagcaagtcccccattccagctcctctggcagagtatggagttacctgcgtccggggcaggaaaccatgaatgtgcccttctgccctcttgcctttctgccactctttgagttcccgtccttaattgaagagccagtgactattggctgaagttcccccagcgatttgcatgaaccgagagggagtgtcttctgccgccctcccttcaagagcgctctgactgcagcctcccagggaatgcgcggccgagggaatgcgcgcagctcacaggccctgggagtgagctggtgcccggcgacctggcacccgcgcctggatatggggcgtctacatcgtcccaggagcagcaccagctacaggaacctgccgcatctgtttctgtttttcctcttcgtgggacccttcagctgcctcgggagttacagccgggccaccgagcttctgtacagcctaaacgagggactacccgcgggggtgctcatcggcagcctggccgaggacctgcggctgctgcccaggtctgcagggaggccggacccgcagtcgcagctgccagagcgcaccggtgctgagtggaacccccctctctccttcagcctggcctcccggggactgagtggccagtacgtgaccctagacaaccgctctggggagctgcacacttcagctcaggagatcgacagggaggccctgtgtgttgaagggggtggagggactgcgtggagcggcagcgtttccatctcctcctctccttctgactcttgtcttttgctgctggatgtgcttgtcctgcctcaggaatacttcaggtttgtgaaggtgaagatcgccatcagagacatcaatgacaacgccccgcagttccctgtttcccagatctcggtgtgggtcccggaaaatgcacctgtaaacacccgactggccatagagcatcctgctgtggacccagatgtaggcattaatggggtacagacctatcgcttactggactaccatggtatgttcaccctggacgtggaggagaatgagaatggggagcgcaccccctacctaattgtcatgggtgctttggacagggaaacccaggaccagtatgtgagcatcatcatagctgaggatggtgggtctccaccacttttgggcagtgccactctcaccattggcatcagtgacattaatgacaattgccctctcttcacagactcacaaatcaatgtcactgtgtatgggaatgctacagtgggcaccccaattgcagctgtccaggctgtggataaagacttggggaccaatgctcaaattacttattcttacagtcagaaagttccacaagcatctaaggatttatttcacctggatgaaaacactggagtcattaaacttttcagtaagattggaggaagtgttctggagtcccacaagctcaccatccttgctaatggaccaggctgcatccctgctgtaatcactgctcttgtgtccattattaaagttattttcagaccccctgaaattgtccctcgttacatagcaaacgagatagatggtgtggtttatctgaaagaactggaacccgttaacactcccattgcgtttttcaccataagagatccagaaggtaaatacaaggttaactgctacctggatggtgaagggccgtttaggttatcaccttacaaaccatacaataatgaatatttactagagaccacaaaacctatggactatgagctacagcagttctatgaagtagctgtggtggcttggaactctgagggatttcatgtcaaaagggtcattaaagtgcaacttttagatgacaatgataatgctccaattttccttcaacccttaatagaactaaccatcgaagagaacaactcacccaatgcctttttgactaagctgtatgctacagatgccgacagcgaggagagaggccaagtttcatattttctgggacctgatgctccatcatatttttccttagacagtgtcacaggaattctgacagtttctactcagctggaccgagaagagaaagaaaagtacagatacactgtcagagctgttgactgtgggaagccacccagagaatcagtagccactgtggccctcacagtgttggataaaaatgacaacagtcctcggtttatcaacaaggacttcagcttttttgtgcctgaaaactttccaggctatggtgagattggagtaattagtgtaacagatgctgacgctggacgaaatggatgggtcgccctctctgtggtgaaccagagtgatatttttgtcatagatacaggaaagggtatgctgagggctaaagtctctttggacagagagcagcaaagctcctatactttgtgggttgaagctgttgatgggggtgagcctgccctctcctctacagcaaaaatcacaattctccttctagatatcaatgacaaccctcctcttgttttgtttcctcagtctaatatgtcttatctgttagtactgccttctactctgccaggctccccggttacagaagtctatgctgtcgacaaagacacaggcatgaatgctgtcatagcttacagcatcatagggagaagaggtcctaggcctgagtccttcaggattgaccctaaaactggcaacattactttggaagaggcattgctgcagacagattatgggctccatcgcttactggtgaaagtgagtgatcatggttatcccgagcctctccactccacagtcatggtgaacctatttgtcaatgacactgtcagtaatgagagttacattgagagtcttttaagaaaagaaccagagattaatatagaggagaaagaaccacaaatctcaatagaaccgactcataggaaggtagaatctgtgtcttgtatgcccaccttagtagctctgtctgtaataagcttgggttccatcacactggtcacagggatgggcatatacatctgtttaaggaaaggggaaaagcatcccagggaagatgaaaatttggaagtacagattccactgaaaggaaaaattgacttgcatatgcgagagagaaagccaatggatatttctaatatttgatatttcatggtggaataacacagagaaatgttttaactgactttggatcttcatcacctaaaaaagagtgtgttgatggcagttccaatgaaggacaactaatttataacttgttctatattgtaaatagctgtttacaggtttttaaatttaaattcagaggttataaaatgtgtacagcatttttaagtgaaaattagtactaacagctataggacttgtatttaaaaaaaaaaaaaaagcttggacatggtttgcagctttcatacaccaagcagatgattgataaaacctgggagtaaggtaagaaaaatggaacaaatttttatctaaaaattcctgtcaccacaagagggcatcagctgctcctttgcaggaaactggggtattgtacttggcagttgtacatgaaattaatgaaagagtatattttaaatatattgtttttaacattaaacaaatatgaaattaaagtaaattaaatttcaccctatttaaacatatgataaaaaaagaaatgcacttgtaaacagaatgtttattacctcataagtgcatatatagtgtgaaagagaaggcattaaaaagaagtgcaattcctttttagcaaggataaaatcattgccttgtgttacagattcagcctgctgaagagtattccactttctgtgtactcgaattgctttctgtttgctttaccactgcacttgttattattacaagggaaatagatttatacatacatatatatattcttcattacaggaaatgtaactagatattgtgcccaagaaaaacagccagaagcaaagaaatgcttcaatctttagttgcttcataggcattcatgacattttagtgctttcacaacttgttggtcgtactttatacttgggttatatattagacttttataggcttgaaatcatccatcacataagaaaatagaaatcatattaaaagtgaattcttctagaggcttgtgtacactactggttgttttagttgggccttttatatgaaagttatactgtacttatctttttgttgttgtttaggtttgttgactaccatttctggcttcctttctttggttttggattaaatccaacagtttatttgtaagccctgcagcagatttctttgataatttagcttttactgaatctcttgcaatgaagaaagctatttcatcagtgatttatcactttcaattcattgtgtgagctggaaatattattttatatgagagctatagcaaaataatctgtataaacaaggaatgtgttagcttaaactggatcattttactttttggcatcatgcatctgtactgtaccaaaagtgtttatatgtctgcaaattaaaggtatatattttcataa

SEQ ID NO: 213488 - DNA, 4605 bp, Artificial Sequence
  derived and/or modified sequence
tttattttaattctccctctcttgctagcaacctgtggacttggcatctgactggtgcggcaaggaaggaggctggtaggtaagcgctactgtgcccaaccccgagctgcctcttcgcagtcttcaggagcaagtcccccattccagctcctctggcagagtatggagttacctgcgtccggggcaggaaaccatgaatgtgcccttctgccctcttgcctttctgccactctttgagttcccgtccttaattgaagagccagtgactattggctgaagttcccccagcgatttgcatgaaccgagagggagtgtcttctgccgccctcccttcaagagcgctctgactgcagcctcccagggaatgcgcggccgagggaatgcgcgcagctcacaggccctgggagtgagctggtgcccggcgacctggcacccgcgcctggatatggggcgtctacatcgtcccaggagcagcaccagctacaggaacctgccgcatctgtttctgtttttcctcttcgtgggacccttcagctgcctcgggagttacagccgggccaccgagcttctgtacagcctaaacgagggactacccgcgggggtgctcatcggcagcctggccgaggacctgcggctgctgcccaggtctgcagggaggccggacccgcagtcgcagctgccagagcgcaccggtgctgagtggaacccccctctctccttcagcctggcctcccggggactgagtggccagtacgtgaccctagacaaccgctctggggagctgcacacttcagctcaggagatcgacagggaggccctgtgtgttgaagggggtggagggactgcgtggagcggcagcgtttccatctcctcctctccttctgactcttgtcttttgctgctggatgtgcttgtcctgcctcaggaatacttcaggtttgtgaaggtgaagatcgccatcagagacatcaatgacaacgccccgcagttccctgtttcccagatctcggtgtgggtcccggaaaatgcacctgtaaacacccgactggccatagagcatcctgctgtggacccagatgtaggcattaatggggtacagacctatcgcttactggactaccatggtatgttcaccctggacgtggaggagaatgagaatggggagcgcaccccctacctaattgtcatgggtgctttggacagggaaacccaggaccagtatgtgagcatcatcatagctgaggatggtgggtctccaccacttttgggcagtgccactctcaccattggcatcagtgacattaatgacaattgccctctcttcacagactcacaaatcaatgtcactgtgtatgggaatgctacagtgggcaccccaattgcagctgtccaggctgtggataaagacttggggaccaatgctcaaattacttattcttacagtcagaaagttccacaagcatctaaggatttatttcacctggatgaaaacactggagtcattaaacttttcagtaagattggaggaagtgttctggagtcccacaagctcaccatccttgctaatggaccaggctgcatccctgctgtaatcactgctcttgtgtccattattaaagttattttcagaccccctgaaattgtccctcgttacatagcaaacgagatagatggtgtggtttatctgaaagaactggaacccgttaacactcccattgcgtttttcaccataagagatccagaaggtaaatacaaggttaactgctacctggatggtgaagggccgtttaggttatcaccttacaaaccatacaataatgaatatttactagagaccacaaaacctatggactatgagctacagcagttctatgaagtagctgtggtggcttggaactctgagggatttcatgtcaaaagggtcattaaagtgcaacttttagatgacaatgataatgctccaattttccttcaacccttaatagaactaaccatcgaagagaacaactcacccaatgcctttttgactaagctgtatgctacagatgccgacagcgaggagagaggccaagtttcatattttctgggacctgatgctccatcatatttttccttagacagtgtcacaggaattctgacagtttctactcagctggaccgagaagagaaagaaaagtacagatacactgtcagagctgttgactgtgggaagccacccagagaatcagtagccactgtggccctcacagtgttggataaaaatgacaacagtcctcggtttatcaacaaggacttcagcttttttgtgcctgaaaactttccaggctatggtgagattggagtaattagtgtaacagatgctgacgctggacgaaatggatgggtcgccctctctgtggtgaaccagagtgatatttttgtcatagatacaggaaagggtatgctgagggctaaagtctctttggacagagagcagcaaagctcctatactttgtgggttgaagctgttgatgggggtgagcctgccctctcctctacagcaaaaatcacaattctccttctagatatcaatgacaaccctcctcttgttttgtttcctcagtctaatatgtcttatctgttagtactgccttctactctgccaggctccccggttacagaagtctatgctgtcgacaaagacacaggcatgaatgctgtcatagcttacagcatcatagggagaagaggtcctaggcctgagtccttcaggattgaccctaaaactggcaacattactttggaagaggcattgctgcagacagattatgggctccatcgcttactggtgaaagtgagtgatcatggttatcccgagcctctccactccacagtcatggtgaacctatttgtcaatgacactgtcagtaatgagagttacattgagagtcttttaagaaaagaaccagagattaatatagaggagaaagaaccacaaatctcaatagaaccgactcataggaaggtagaatctgtgtcttgtatgcccaccttagtagctctgtctgtaataagcttgggttccatcacactggtcacagggatgggcatatacatctgtttaaggaaaggggaaaagcatcccagggaagatgaaaatttggaagtacagattccactgaaaggaaaaattgacttgcatatgcgagagagaaagccaatggatatttctaatatttgatatttcatggtggaataacacagagaaatgttttaactgactttggatcttcatcacctaaaaaagagtgtgttgatggcagttccaatgaaggacaactaatttataacttgttctatattgtaaatagctgtttacaggtttttaaatttaaattcagaggttataaaatgtgtacagcatttttaagtgaaaattagtactaacagctataggacttgtatttaaaaaaaaaaaaaaagcttggacatggtttgcagctttcatacaccaagcagatgattgataaaacctgggagtaaggtaagaaaaatggaacaaatttttatctaaaaattcctgtcaccacaagagggcatcagctgctcctttgcaggaaactggggtattgtacttggcagttgtacatgaaattaatgaaagagtatattttaaatatattgtttttaacattaaacaaatatgaaattaaagtaaattaaatttcaccctatttaaacatatgataaaaaaagaaatgcacttgtaaacagaatgtttattacctcataagtgcatatatagtgtgaaagagaaggcattaaaaagaagtgcaattcctttttagcaaggataaaatcattgccttgtgttacagattcagcctgctgaagagtattccactttctgtgtactcgaattgctttctgtttgctttaccactgcacttgttattattacaagggaaatagatttatacatacatatatatattcttcattacaggaaatgtaactagatattgtgcccaagaaaaacagccagaagcaaagaaatgcttcaatctttagttgcttcataggcattcatgacattttagtgctttcacaacttgttggtcgtactttatacttgggttatatattagacttttataggcttgaaatcatccatcacataagaaaatagaaatcatattaaaagtgaattcttctagaggcttgtgtacactactggttgttttagttgggccttttatatgaaagttatactgtacttatctttttgttgttgtttaggtttgttgactaccatttctggcttcctttctttggttttggattaaatccaacagtttatttgtaagccctgcagcagatttctttgataatttagcttttactgaatctcttgcaatgaagaaagctatttcatcagtgatttatcactttcaattcattgtgtgagctggaaatattattttatatgagagctatagcaaaataatctgtataaacaaggaatgtgttagcttaaactggatcattttactttttggcatcatgcatctgtactgtaccaaaagtgtttatatgtctgcaaattaaaggtatatattttcataa

SEQ ID NO: 213489 - DNA, 2094 bp, Artificial Sequence
  derived and/or modified sequence
atgttcaccctggacgtggaggagaacgagaacggcgagagaaccccctacctgatcgtgatgggcgccctggacagagagacccaggaccagtacgtgagcatcatcatcgccgaggacggcggcagcccccccctgctgggcagcgccaccctgaccatcggcatcagcgacatcaacgacaactgccccctgttcaccgacagccagatcaacgtgaccgtgtacggcaacgccaccgtgggcacccccatcgccgccgtgcaggccgtggacaaggacctgggcaccaacgcccagatcacctacagctacagccagaaggtgccccaggccagcaaggacctgttccacctggacgagaacaccggcgtgatcaagctgttcagcaagatcggcggcagcgtgctggagagccacaagctgaccatcctggccaacggccccggctgcatccccgccgtgatcaccgccctggtgagcatcatcaaggtgatcttcagaccccccgagatcgtgcccagatacatcgccaacgagatcgacggcgtggtgtacctgaaggagctggagcccgtgaacacccccatcgccttcttcaccatcagagaccccgagggcaagtacaaggtgaactgctacctggacggcgagggccccttcagactgagcccctacaagccctacaacaacgagtacctgctggagaccaccaagcccatggactacgagctgcagcagttctacgaggtggccgtggtggcctggaacagcgagggcttccacgtgaagagagtgatcaaggtgcagctgctggacgacaacgacaacgcccccatcttcctgcagcccctgatcgagctgaccatcgaggagaacaacagccccaacgccttcctgaccaagctgtacgccaccgacgccgacagcgaggagagaggccaggtgagctacttcctgggccccgacgcccccagctacttcagcctggacagcgtgaccggcatcctgaccgtgagcacccagctggacagagaggagaaggagaagtacagatacaccgtgagagccgtggactgcggcaagccccccagagagagcgtggccaccgtggccctgaccgtgctggacaagaacgacaacagccccagattcatcaacaaggacttcagcttcttcgtgcccgagaacttccccggctacggcgagatcggcgtgatcagcgtgaccgacgccgacgccggcagaaacggctgggtggccctgagcgtggtgaaccagagcgacatcttcgtgatcgacaccggcaagggcatgctgagagccaaggtgagcctggacagagagcagcagagcagctacaccctgtgggtggaggccgtggacggcggcgagcccgccctgagcagcaccgccaagatcaccatcctgctgctggacatcaacgacaacccccccctggtgctgttcccccagagcaacatgagctacctgctggtgctgcccagcaccctgcccggcagccccgtgaccgaggtgtacgccgtggacaaggacaccggcatgaacgccgtgatcgcctacagcatcatcggcagaagaggccccagacccgagagcttcagaatcgaccccaagaccggcaacatcaccctggaggaggccctgctgcagaccgactacggcctgcacagactgctggtgaaggtgagcgaccacggctaccccgagcccctgcacagcaccgtgatggtgaacctgttcgtgaacgacaccgtgagcaacgagagctacatcgagagcctgctgagaaaggagcccgagatcaacatcgaggagaaggagccccagatcagcatcgagcccacccacagaaaggtggagagcgtgagctgcatgcccaccctggtggccctgagcgtgatcagcctgggcagcatcaccctggtgaccggcatgggcatctacatctgcctgagaaagggcgagaagcaccccagagaggacgagaacctggaggtgcagatccccctgaagggcaagatcgacctgcacatgagagagagaaagcccatggacatcagcaacatctag

SEQ ID NO: 213490 - DNA, 2856 bp, Artificial Sequence
  derived and/or modified sequence
atgagaggcagaggcaacgccagaagcagccaggccctgggcgtgagctggtgccccgccacctggcaccccagactggacatgggcagactgcacagacccagaagcagcaccagctacagaaacctgccccacctgttcctgttcttcctgttcgtgggccccttcagctgcctgggcagctacagcagagccaccgagctgctgtacagcctgaacgagggcctgcccgccggcgtgctgatcggcagcctggccgaggacctgagactgctgcccagaagcgccggcagacccgacccccagagccagctgcccgagagaaccggcgccgagtggaacccccccctgagcttcagcctggccagcagaggcctgagcggccagtacgtgaccctggacaacagaagcggcgagctgcacaccagcgcccaggagatcgacagagaggccctgtgcgtggagggcggcggcggcaccgcctggagcggcagcgtgagcatcagcagcagccccagcgacagctgcctgctgctgctggacgtgctggtgctgccccaggagtacttcagattcgtgaaggtgaagatcgccatcagagacatcaacgacaacgccccccagttccccgtgagccagatcagcgtgtgggtgcccgagaacgcccccgtgaacaccagactggccatcgagcaccccgccgtggaccccgacgtgggcatcaacggcgtgcagacctacagactgctggactaccacggcatgttcaccctggacgtggaggagaacgagaacggcgagagaaccccctacctgatcgtgatgggcgccctggacagagagacccaggaccagtacgtgagcatcatcatcgccgaggacggcggcagcccccccctgctgggcagcgccaccctgaccatcggcatcagcgacatcaacgacaactgccccctgttcaccgacagccagatcaacgtgaccgtgtacggcaacgccaccgtgggcacccccatcgccgccgtgcaggccgtggacaaggacctgggcaccaacgcccagatcacctacagctacagccagaaggtgccccaggccagcaaggacctgttccacctggacgagaacaccggcgtgatcaagctgttcagcaagatcggcggcagcgtgctggagagccacaagctgaccatcctggccaacggccccggctgcatccccgccgtgatcaccgccctggtgagcatcatcaaggtgatcttcagaccccccgagatcgtgcccagatacatcgccaacgagatcgacggcgtggtgtacctgaaggagctggagcccgtgaacacccccatcgccttcttcaccatcagagaccccgagggcaagtacaaggtgaactgctacctggacggcgagggccccttcagactgagcccctacaagccctacaacaacgagtacctgctggagaccaccaagcccatggactacgagctgcagcagttctacgaggtggccgtggtggcctggaacagcgagggcttccacgtgaagagagtgatcaaggtgcagctgctggacgacaacgacaacgcccccatcttcctgcagcccctgatcgagctgaccatcgaggagaacaacagccccaacgccttcctgaccaagctgtacgccaccgacgccgacagcgaggagagaggccaggtgagctacttcctgggccccgacgcccccagctacttcagcctggacagcgtgaccggcatcctgaccgtgagcacccagctggacagagaggagaaggagaagtacagatacaccgtgagagccgtggactgcggcaagccccccagagagagcgtggccaccgtggccctgaccgtgctggacaagaacgacaacagccccagattcatcaacaaggacttcagcttcttcgtgcccgagaacttccccggctacggcgagatcggcgtgatcagcgtgaccgacgccgacgccggcagaaacggctgggtggccctgagcgtggtgaaccagagcgacatcttcgtgatcgacaccggcaagggcatgctgagagccaaggtgagcctggacagagagcagcagagcagctacaccctgtgggtggaggccgtggacggcggcgagcccgccctgagcagcaccgccaagatcaccatcctgctgctggacatcaacgacaacccccccctggtgctgttcccccagagcaacatgagctacctgctggtgctgcccagcaccctgcccggcagccccgtgaccgaggtgtacgccgtggacaaggacaccggcatgaacgccgtgatcgcctacagcatcatcggcagaagaggccccagacccgagagcttcagaatcgaccccaagaccggcaacatcaccctggaggaggccctgctgcagaccgactacggcctgcacagactgctggtgaaggtgagcgaccacggctaccccgagcccctgcacagcaccgtgatggtgaacctgttcgtgaacgacaccgtgagcaacgagagctacatcgagagcctgctgagaaaggagcccgagatcaacatcgaggagaaggagccccagatcagcatcgagcccacccacagaaaggtggagagcgtgagctgcatgcccaccctggtggccctgagcgtgatcagcctgggcagcatcaccctggtgaccggcatgggcatctacatctgcctgagaaagggcgagaagcaccccagagaggacgagaacctggaggtgcagatccccctgaagggcaagatcgacctgcacatgagagagagaaagcccatggacatcagcaacatctag

SEQ ID NO: 213491 - protein, 1938 aa, Artificial Sequence
  derived and/or modified sequence
MAQKGQLSDDEKFLFVDKNFINSPVAQADWAAKRLVWVPSEKQGFEAASIKEEKGDEVVVELVENGKKVTVGKDDIQKMNPPKFSKVEDMAELTCLNEASVLHNLRERYFSGLIYTYSGLFCVVVNPYKHLPIYSEKIVDMYKGKKRHEMPPHIYAIADTAYRSMLQDREDQSILCTGESGAGKTENTKKVIQYLAVVASSHKGKKDTSITGELEKQLLQANPILEAFGNAKTVKNDNSSRFGKFIRINFDVTGYIVGANIETYLLEKSRAIRQARDERTFHIFYYMIAGAKEKMRSDLLLEGFNNYTFLSNGFVPIPAAQDDEMFQETVEAMAIMGFSEEEQLSILKVVSSVLQLGNIVFKKERNTDQASMPDNTAAQKVCHLMGINVTDFTRSILTPRIKVGRDVVQKAQTKEQADFAVEALAKATYERLFRWILTRVNKALDKTHRQGASFLGILDIAGFEIFEVNSFEQLCINYTNEKLQQLFNHTMFILEQEEYQREGIEWNFIDFGLDLQPCIELIERPNNPPGVLALLDEECWFPKATDKSFVEKLCTEQGSHPKFQKPKQLKDKTEFSIIHYAGKVDYNASAWLTKNMDPLNDNVTSLLNASSDKFVADLWKDVDRIVGLDQMAKMTESSLPSASKTKKGMFRTVGQLYKEQLGKLMTTLRNTTPNFVRCIIPNHEKRSGKLDAFLVLEQLRCNGVLEGIRICRQGFPNRIVFQEFRQRYEILAANAIPKGFMDGKQACILMIKALELDPNLYRIGQSKIFFRTGVLAHLEEERDLKITDVIMAFQAMCRGYLARKAFAKRQQQLTAMKVIQRNCAAYLKLRNWQWWRLFTKVKPLLQVTRQEEEMQAKEDELQKTKERQQKAENELKELEQKHSQLTEEKNLLQEQLQAETELYAEAEEMRVRLAAKKQELEEILHEMEARLEEEEDRGQQLQAERKKMAQQMLDLEEQLEEEEAARQKLQLEKVTAEAKIKKLEDEILVMDDQNNKLSKERKLLEERISDLTTNLAEEEEKAKNLTKLKNKHESMISELEVRLKKEEKSRQELEKLKRKLEGDASDFHEQIADLQAQIAELKMQLAKKEEELQAALARLDDEIAQKNNALKKIRELEGHISDLQEDLDSERAARNKAEKQKRDLGEELEALKTELEDTLDSTATQQELRAKREQEVTVLKKALDEETRSHEAQVQEMRQKHAQAVEELTEQLEQFKRAKANLDKNKQTLEKENADLAGELRVLGQAKQEVEHKKKKLEAQVQELQSKCSDGERARAELNDKVHKLQNEVESVTGMLNEAEGKAIKLAKDVASLSSQLQDTQELLQEETRQKLNVSTKLRQLEEERNSLQDQLDEEMEAKQNLERHISTLNIQLSDSKKKLQDFASTVEALEEGKKRFQKEIENLTQQYEEKAAAYDKLEKTKNRLQQELDDLVVDLDNQRQLVSNLEKKQRKFDQLLAEEKNISSKYADERDRAEAEAREKETKALSLARALEEALEAKEELERTNKMLKAEMEDLVSSKDDVGKNVHELEKSKRALETQMEEMKTQLEELEDELQATEDAKLRLEVNMQALKGQFERDLQARDEQNEEKRRQLQRQLHEYETELEDERKQRALAAAAKKKLEGDLKDLELQADSAIKGREEAIKQLRKLQAQMKDFQRELEDARASRDEIFATAKENEKKAKSLEADLMQLQEDLAAAERARKQADLEKEELAEELASSLSGRNALQDEKRRLEARIAQLEEELEEEQGNMEAMSDRVRKATQQAEQLSNELATERSTAQKNESARQQLERQNKELRSKLHEMEGAVKSKFKSTIAALEAKIAQLEEQVEQEAREKQAATKSLKQKDKKLKEILLQVEDERKMAEQYKEQAEKGNARVKQLKRQLEEAEEESQRINANRRKLQRELDEATESNEAMGREVNALKSKLRGPPPQETSQ

SEQ ID NO: 213492 - DNA, 5817 bp, Artificial Sequence
  derived and/or modified sequence
atggctcaaaaggggcagctctctgacgacgaaaaatttctgtttgtggacaagaacttcattaatagtcctgtggctcaggcagactgggcagccaagagactggtctgggtccctagtgagaagcaggggtttgaagccgcttccattaaagaggaaaagggcgacgaagtggtcgtcgaactggtagagaatgggaagaaagtgactgtgggtaaagacgatattcagaaaatgaacccgcctaagttcagtaaagtcgaggacatggcggagctcacatgcctgaatgaggccagcgtactgcacaatctgcgggaaagatactttagcgggttgatatacacatacagcggactgttttgtgtggttgtcaatccttataaacacttacctatctactctgagaaaattgtggatatgtataaagggaagaagagacacgagatgcctccccatatttatgccattgcagataccgcctatagatcgatgctgcaggatcgcgaggaccagtccattctctgcactggcgagtcaggcgccgggaagacagaaaacaccaagaaggtgattcagtaccttgctgtcgtggcctcttctcacaagggtaagaaagatacctcaattactggcgagctcgaaaaacagcttctccaggccaatcctatcctggaggcctttggcaatgcgaaaacagtgaaaaatgataacagtagtcgcttcggcaagtttattcggattaattttgatgtgaccggctacattgtgggtgctaatatcgaaacttatcttcttgaaaagtcgagggccatcagacaggctagagacgaacgaacttttcatattttctattatatgatcgccggcgcgaaggaaaaaatgagatctgacctactgctcgagggattcaacaattacacattcttgtcgaacggttttgtacccattccggcagctcaggatgacgagatgtttcaagaaacagtggaggcaatggccattatggggttcagcgaagaagagcagttgtccatcttgaaggtggtgtctagtgtcctgcagctgggcaatatcgtttttaaaaaggagagaaacaccgaccaagcgagtatgcctgacaatacagccgcacaaaaagtgtgccacctgatgggcatcaacgtcacagactttacacgaagcattctaacacctcggatcaaggtcggacgggacgtggtgcagaaggcccagaccaaagagcaggctgactttgccgtggaagcactggcaaaagccacttatgagagactgtttcggtggatccttaccagagtgaacaaggcccttgacaagacccacaggcagggcgccagctttcttgggattctggacatcgccggctttgaaattttcgaggtgaatagtttcgagcagctttgcatcaactatacaaatgagaaactgcaacaactctttaaccacactatgttcatcctggagcaggaagagtaccagagggagggcatcgagtggaatttcattgattttgggctggatttgcaaccttgcatcgagctgattgagcggcccaataatcccccaggggttctagccctattggacgaagaatgttggttcccgaaggctactgacaagtccttcgtcgagaaactgtgcaccgagcagggatcccaccccaagttccagaaaccaaagcagctgaaagataagacggagttttctatcatccattatgctggtaaggtggattacaacgcctcagcatggctgacgaaaaatatggaccctcttaatgacaacgtcacatccctccttaatgcaagctcagataagttcgtcgctgatctctggaaggacgtggataggattgttggcctggatcagatggctaagatgacagaaagctccctgcctagtgccagcaagaccaaaaaggggatgttcagaacagtgggtcaactgtataaagagcagttagggaaacttatgaccactctccgaaacaccacgcctaactttgtgcgatgtatcattcctaaccatgagaagagatctggtaagttggacgcattcttagtcctggagcagctgcggtgtaatggcgtcctagaaggtatcaggatatgcagacaaggctttcccaatagaattgttttccaagagtttcgccaacggtacgagatccttgctgcgaacgccattcccaaggggtttatggacggcaagcaggcttgtatactaatgatcaaggccttagaacttgatccaaacttgtataggataggccaaagcaaaatcttttttcgcactggcgtgcttgcccacctggaagaagaacgcgatttgaagatcactgatgttattatggcctttcaggctatgtgccgggggtatctggcccggaaagcgtttgcaaagagacagcaacagcttacagcaatgaaggtgattcagcggaattgcgccgcatacctcaagctccggaattggcagtggtggcgactgttcacaaaggttaaacccctgttacaggtaaccagacaggaggaagaaatgcaggctaaggaagatgaacttcaaaaaaccaaagagaggcagcagaaagcggaaaatgaattgaaggagctggaacagaagcactcacagttgactgaggagaagaacctcctccaggagcaattgcaggcagagactgaactgtatgcggaggctgaagaaatgcgtgtgagattggccgctaagaaacaggaacttgaagaaatcctgcacgagatggaggcccgtctggaggaagaggaggatcgcgggcagcaattacaggccgagagaaagaagatggctcaacagatgctggatttggaggagcaattggaggaggaagaggctgcacgccaaaagctgcagttggagaaggtcaccgctgaggccaagattaagaagcttgaagatgagatcctggttatggatgaccagaacaataagttgtccaaggaaagaaagctgctggaagagcgcattagcgatctaactactaatttagccgaggaagaagagaaagctaaaaatctcacgaaactcaagaataagcacgaaagcatgatctccgagctggaggtgcggttgaaaaaggaagagaaaagccggcaggagcttgagaagctaaaacggaaactggaaggggacgcctctgatttccacgaacagatcgctgatttgcaagcccaaatcgccgagcttaagatgcagctggcaaagaaggaagaagaactccaggcggccctagcccgactagacgacgagatcgctcagaagaacaacgccctcaaaaagattcgggagctggaggggcatatctcagaccttcaggaagatctggactccgaacgagcggcaaggaataaagctgagaagcagaagcgggacctcggcgaagaactcgaagccttaaagaccgagcttgaagatacgctagactccacagctacacagcaggaactgcgggccaagcgagaacaagaagtgacagtgctcaaaaaggccctggacgaggaaacacggtcacacgaggcgcaagtgcaggagatgagacagaaacacgcacaagccgtggaagaactcactgagcaattagaacagttcaagagggccaaggcaaatctggacaaaaataaacagactctggagaaggagaacgccgatctggcaggggagctcagggtgctcggacaagcaaaacaggaggtggagcacaagaagaagaaactcgaggcacaggtgcaagaattacagtccaagtgttctgatggcgaacgggctcgggctgagctgaacgacaaggtccataaacttcagaatgaggttgagagtgtgactgggatgttaaatgaagccgaaggcaaggccatcaagttggcaaaggacgttgcgtcactttcaagtcagctacaggatacgcaggaactgctccaggaagagacaagacaaaagttgaatgtgagtaccaaactgcgccaactcgaagaagagcgtaactctcttcaggatcagctggatgaagagatggaagctaaacagaaccttgagcgccatatttccactctaaacattcagctatccgacagtaaaaaaaagctgcaggatttcgcctcaacagtggaggcattggaagaaggcaaaaaacgtttccagaaagaaatcgaaaacctcacccagcagtacgaagaaaaggctgctgcctacgataagctggaaaaaactaaaaaccgattacagcaagagcttgatgatctggtcgtggatctcgacaaccaacggcagctggtctcgaatctcgaaaagaagcagcgcaagttcgatcagcttttagccgaggaaaaaaacatttcctccaaatatgctgatgagcgagatagagccgaggctgaggctcgtgaaaaagagacaaaggcgctcagccttgctcgcgcgttggaggaggccctggaagccaaggaggagcttgagcgaacaaataaaatgttgaaggcggaaatggaagatctcgtgagcagtaaagacgacgtggggaaaaatgtgcatgagctggagaagtcgaaaagggcactggaaacacagatggaggagatgaagacgcagctggaggaactggaagacgaactacaggcaactgaagatgcaaaactccggctggaggtgaatatgcaggctctcaaggggcagttcgagcgagacctccaagcccgagacgagcagaacgaggagaagagaagacagctgcagagacagttacatgagtatgaaactgagctagaagacgagagaaaacagcgcgccctggcggcagccgcaaagaaaaagctggaaggcgatttgaaggacctagagctgcaggctgactccgccatcaaagggcgggaagaggccatcaaacagctgcgcaaactgcaggcacagatgaaagacttccagcgggagctcgaagacgcccgagcctcccgtgatgagatcttcgcaactgccaaagagaatgagaaaaaggctaaatctctggaagccgacctcatgcagctccaggaagatctggccgccgccgagcgcgcacggaagcaggcagacctagagaaggaggaactcgcggaggagttggccagttccttatcagggagaaatgcactgcaagatgaaaagcggagacttgaggcacggatcgcccagctggaagaggagcttgaggaggaacagggcaacatggaggcaatgagtgatcgagtgcgaaaggccacacaacaggccgagcaactcagcaatgagttagccactgagcgttccactgcgcaaaaaaacgagtcagcaaggcagcagttggagaggcaaaataaagagcttagaagcaaactgcacgaaatggagggcgccgttaaatccaaatttaaaagcacaatagccgccttggaggccaaaattgcacagctcgaggaacaggtcgaacaggaagctagggaaaagcaggcagctaccaagtcattgaaacaaaaggataaaaagcttaaggaaatccttttgcaggtcgaggatgagcgcaaaatggctgaacagtataaagagcaagcggagaaagggaatgcacgcgttaaacagttaaagcgtcagttagaagaagccgaggaggagagccagcgtattaacgcaaacaggcggaaactccagagggagctcgacgaggccacagagtctaatgaggccatgggccgggaggtgaatgcccttaagtctaaattgcgcggccccccaccccaagaaacttcacaatag

SEQ ID NO: 213493 - DNA, 5817 bp, Artificial Sequence
  derived and/or modified sequence
atggcccagaagggccagctgagtgatgatgagaagttcctgtttgtggacaagaacttcatcaacagccctgtggcccaggccgactgggccgccaagaggctggtgtgggtgcccagcgagaagcagggctttgaagctgccagcatcaaggaggagaagggagatgaggtggtggtggagctggtggagaatggcaagaaggtgacagtgggcaaggatgacatccagaagatgaacccccccaagttcagcaaggtggaggacatggccgagctgacctgcctgaatgaggcctctgtgctgcacaacctgcgggagcgctacttcagcggcctcatctacacctacagcggcctcttctgtgtggtggtgaacccctacaagcacctgcccatctacagcgagaagatcgtggacatgtacaagggcaagaagagacatgagatgccaccccacatctatgccatcgctgacacagcctaccgctccatgctgcaggaccgggaggaccagagcatcctgtgcacaggagagagcggggccggcaagacagagaacaccaagaaggtgatccagtacctggccgtggtggccagcagccacaagggcaagaaggacaccagcatcactggagagctggagaagcagctgctgcaggccaaccccatcctggaggcctttggaaatgccaagacagtgaagaatgacaacagcagcagatttgggaagttcatccgcatcaactttgatgtgacaggctacatcgtgggcgccaacatcgagacctacctgctggagaagagccgggccatccggcaggccagagatgagaggaccttccacatcttctactacatgattgctggggccaaggagaagatgagaagtgacctgctgctggagggcttcaacaactacaccttcctgagcaatggatttgtgcccatcccagctgcccaggatgatgagatgttccaggagaccgtggaggccatggccatcatgggcttcagcgaggaggagcagctgagcatcctgaaggtggtgtcctctgtgctgcagctgggcaacatcgtgttcaagaaggagaggaacacagaccaggcctccatgccagacaacacagctgcccagaaggtgtgccacctgatgggcatcaacgtgacagacttcaccaggagcatcctgaccccccgcatcaaggtgggcagagatgtggtgcagaaggcccagaccaaggagcaggccgactttgctgtggaggccctggccaaggccacctatgagcggctcttccgctggatcctgaccagggtgaacaaggccctggacaagacccaccggcagggcgccagcttcctgggcatcctggacattgctggctttgagatctttgaggtgaacagctttgagcagctgtgcatcaactacaccaatgagaagctgcagcagctgttcaaccacaccatgttcatcctggagcaggaggagtaccagcgggagggcatcgagtggaacttcatcgactttggcctggacctgcagccctgcatcgagctgattgaaagacccaacaaccccccaggagtgctggccctgctggatgaggagtgctggttccccaaggccacagacaagagctttgtggagaagctgtgcacagagcagggcagccaccccaagttccagaagcccaagcagctgaaggacaagacagagttcagcatcatccactacgccggcaaggtggactacaatgccagcgcctggctgaccaagaacatggaccccctgaatgacaacgtgaccagcctgctgaatgccagcagtgacaagtttgtggccgacctgtggaaggatgtggacagaattgtgggcctggaccagatggccaagatgacagagagcagcctgcccagcgccagcaagaccaagaagggcatgttcagaacagtgggccagctgtacaaggagcagctgggcaagctgatgaccaccctgaggaacaccacccccaactttgtgcgctgcatcatccccaaccacgagaagaggtctgggaagctggatgccttcctggtgctggagcagctgcgctgcaatggagtgctggagggcatccgcatctgccggcagggcttccccaacagaattgtgttccaggagttccggcagagatatgagatcctggccgccaatgccatccccaagggcttcatggatggcaagcaggcctgcatcctgatgatcaaggccctggagctggaccccaacctgtacagaattggccagagcaagatcttcttcagaactggagtgctggcccacctggaggaggagcgggacctgaagatcacagatgtgatcatggccttccaggccatgtgccggggctacctggccaggaaggcctttgccaagaggcagcagcagctgacagccatgaaggtgatccagaggaactgtgccgcctacctgaagctgaggaactggcagtggtggaggctcttcaccaaggtgaagcccctgctgcaggtgacccggcaggaggaggagatgcaggccaaggaggatgagctgcagaagaccaaggagcggcagcagaaggccgagaatgagctgaaggagctggagcagaagcacagccagctgacagaggagaagaacctgctgcaggagcagctgcaggccgagacagagctgtatgcagaggccgaggagatgagggtgcggctggccgccaagaagcaggagctggaggagatcctgcacgagatggaggcccggctggaggaggaggaggaccggggccagcagctgcaggccgagaggaagaagatggcccagcagatgctggacctggaggagcagctggaggaggaggaggccgcccggcagaagctgcagctggagaaggtgacagctgaggccaagatcaagaagctggaggatgagatcctggtgatggatgaccagaacaacaagctgagcaaggagaggaagctgctggaggagcgcatcagtgacctgaccaccaacctggccgaggaggaggagaaggccaagaacctgaccaagctgaagaacaagcatgagagcatgatcagcgagctggaggtgcggctgaagaaggaggagaagagccggcaggagctggagaagctgaagaggaagctggagggagatgccagtgacttccacgagcagattgctgacctgcaggcccagattgctgagctgaagatgcagctggccaagaaggaggaggagctgcaggccgccctggcccggctggatgatgaaattgcccagaagaacaatgccctgaagaagatccgggagctggagggccacatcagtgacctgcaggaggacctggacagcgagcgggccgccaggaacaaggccgagaagcagaagagggacctgggggaggagctggaggccctgaagacagagctggaggacaccctggacagcacagccacccagcaggagctgcgggccaagcgggagcaggaggtgacagtgctgaagaaggccctggatgaggagaccaggagccatgaggcccaggtgcaggagatgaggcagaagcacgcccaggccgtggaggagctgacagagcagctggagcagttcaagagggccaaggccaacctggacaagaacaagcagaccctggagaaggaaaatgctgacctggccggggagctgcgggtgctgggccaggccaagcaggaggtggagcacaagaagaagaagctggaggcccaggtgcaggagctgcagagcaaatgttctgatggagagcgggcccgggcagagctgaatgacaaggtgcacaagctgcagaatgaggtggagagcgtgacaggcatgctgaatgaagctgagggcaaggccatcaagctggccaaggatgtggccagcctgagcagccagctgcaggacacccaggagctgctgcaggaggagacccggcagaagctgaatgtgtccaccaagctgcggcagctggaggaggagaggaacagcctgcaggaccagctggatgaggagatggaggccaagcagaacctggagcggcacatcagcaccctgaacatccagctgagtgacagcaagaagaagctgcaggactttgccagcacagtggaggccctggaggagggcaagaagcgcttccagaaggagattgagaacctgacccagcagtatgaggagaaggctgctgcctatgacaagctggagaagaccaagaaccggctgcagcaggagctggatgacctggtggtggacctggacaaccagaggcagctggtgagcaacctggagaagaagcagaggaagtttgaccagctgctggccgaggagaagaacatcagcagcaaatatgcagatgagcgggacagagctgaggccgaggcccgggagaaggagaccaaggccctgagcctggcccgggccctggaggaggccctggaggccaaggaggagctggagaggaccaacaagatgctgaaggccgagatggaggacctggtgagcagcaaggatgatgtgggcaagaatgtgcatgagctggagaagagcaagagggccctggagacccagatggaggagatgaagacccagctggaggagctggaggatgagctgcaggccacagaagatgccaagctgcggctggaggtgaacatgcaggccctgaagggccagtttgagcgggacctgcaggccagagatgagcagaatgaggagaagaggcggcagctgcagaggcagctgcatgaatatgaaacagagctggaggatgagaggaagcagagggccctggccgctgctgccaagaagaagctggagggggacctgaaggacctggagctgcaggccgacagcgccatcaagggccgggaggaggccatcaagcagctgaggaagctgcaggcccagatgaaggacttccagcgggagctggaggatgcccgggccagcagagatgagatctttgccacagccaaggaaaatgagaagaaggccaagagcctggaggccgacctgatgcagctgcaggaggacctggccgctgctgagcgggccaggaagcaggccgacctggagaaggaggagctggccgaggagctggccagcagcctgagcggcagaaatgccctgcaggatgagaagaggcggctggaggcccgcatcgcccagctggaggaggagctggaggaggagcagggcaacatggaggccatgtctgacagagtgaggaaggccacccagcaggccgagcagctgagcaatgagctggccacagagaggagcacagcccagaagaatgaaagtgcccggcagcagctggagcggcagaacaaggagctgcggagcaagctgcacgagatggagggcgctgtgaagagcaagttcaagagcaccatcgccgccctggaggccaagatcgcccagctggaggagcaggtggagcaggaggcccgggagaagcaggccgccaccaagagcctgaagcagaaggacaagaagctgaaggagatcctgctgcaggtggaggatgagaggaagatggccgagcagtacaaggagcaggccgagaagggaaatgcccgggtgaagcagctgaagaggcagctggaggaggccgaggaggagagccagaggatcaatgccaacagaaggaagctgcagcgggagctggatgaggccacagagagcaatgaggccatgggccgggaggtgaatgccctgaagagcaagctgcggggccccccaccccaggagaccagccagtag

SEQ ID NO: 213494 - DNA, 5817 bp, Artificial Sequence
  derived and/or modified sequence
atggcccagaagggccagctgagcgacgacgagaagttcctgttcgtggataaaaacttcatcaatagtcccgtggcccaggccgattgggcagccaagaggctggtgtgggtgccgtccgagaaacagggttttgaagcagcttcaatcaaggaagaaaaaggcgacgaagtggtggtcgaactcgttgaaaatggcaagaaagtgacagtgggaaaagatgacatccagaagatgaatcccccgaagttcagcaaggtggaagacatggcagagcttacatgtctcaacgaggcctccgtgctccacaaccttcgtgagcgctacttctcgggactcatttatacttacagcggtctgttttgcgtggtggtcaatccctacaaacacctgccgatctattctgaaaagatagtggacatgtataagggcaaaaaacggcacgagatgcctccccatatttatgccatcgctgataccgcttaccgatctatgcttcaagaccgagaagatcagtctatcctgtgcacaggagagagtggagccggaaagacggaaaatactaaaaaagtcattcaataccttgcagttgtcgccagttcacacaagggaaagaaggatacatccattactggtgaactggagaaacagctcttgcaagccaatcctatacttgaagcttttggcaacgccaaaaccgtcaagaacgataattcttcacgcttcgggaaattcatccggatcaacttcgatgtaactggttacattgttggcgccaacattgaaacgtacctcctggaaaaaagccgagctattaggcaggctcgcgatgagagaaccttccatatcttctactacatgatcgccggcgccaaggagaagatgaggtccgatcttttgcttgaaggatttaataattacaccttcctctctaacggttttgtgcccattcctgccgcccaggatgatgaaatgttccaggaaacagtggaagccatggccattatgggctttagtgaagaagagcagctctctatcctcaaggttgtgagcagcgtgctccagctggggaatattgtttttaagaaggagcggaataccgaccaggcttcaatgcccgacaatacagcggcacagaaagtgtgccacttgatgggtattaatgtaacagatttcaccagatctatccttacaccacggataaaggtggggagggacgtcgtgcagaaggcgcagactaaggagcaggcagatttcgccgtagaagctctggccaaggccacgtacgagaggctgtttaggtggattctcacgagggtgaacaaagctcttgataaaacacacagacaaggcgcctcattcctgggaatactggatatagccggattcgaaatctttgaagttaacagcttcgaacagctgtgcattaattacacgaacgagaagttgcaacagctatttaatcatacaatgttcattctggagcaggaggagtatcagagggagggcatcgagtggaacttcatcgatttcgggcttgatcttcaaccatgtatcgagctcatagagagacccaacaaccccccaggggtgttggctcttttagacgaggaatgttggttcccgaaggcaactgacaagagctttgtggagaaactctgcacggagcagggctctcatccgaagttccaaaaacccaaacagttgaaggacaagactgaattctccatcattcattatgctggcaaggttgattataatgcgtctgcttggttgacaaagaacatggatccgctgaatgacaacgtaactagcctgctcaatgcgtcgtcagataagtttgtagccgacttgtggaaggacgtggaccgcattgtcggtctggaccagatggcaaaaatgacggaatcatcgttgccctctgccagcaaaactaagaaagggatgttcagaaccgtgggccagctttataaagaacagcttggaaagctgatgacaacactacgaaataccacccctaactttgtgagatgtatcatacccaaccacgagaagcgttcaggcaagctcgacgccttcttggtgcttgagcaacttcggtgtaatggtgttttggagggaataagaatttgccgacaaggctttcctaatcggatcgtgttccaggaattccgccagagatacgaaatcctggccgccaacgcgattcccaagggatttatggacggcaaacaagcttgtattcttatgattaaggccttagagctggatcctaacctttatcgcattgggcaaagtaagatattcttcagaactggggtgctggctcatttagaagaagagagggatcttaagatcactgacgtcatcatggcgtttcaagcaatgtgtagaggctatctggcgagaaaggcattcgccaaaaggcagcaacagctgaccgctatgaaggttatacagcgtaactgcgccgcctacttgaagctccgtaattggcaatggtggaggctctttactaaggtcaagccattactacaggtcacacggcaggaagaggaaatgcaggcaaaggaagatgagctccaaaagaccaaggagcggcagcaaaaagccgagaatgagctcaaggagctggagcagaagcacagccagcttacagaagaaaagaacctccttcaggagcagctgcaggctgagactgaattatatgcagaagctgaggagatgagagtgcgtttggcggcaaaaaaacaagaattagaagaaatactgcatgagatggaagcccgactggaagaggaggaagaccggggacagcagctgcaggccgagcggaagaaaatggcgcagcagatgctcgacctggaggagcagctggaagaggaggaagccgcacgtcagaaactgcagcttgagaaagtcacagcggaagccaaaattaagaaactggaagacgaaatattggtgatggacgaccagaataataaattatccaaagaaagaaagctacttgaagagcgtatttcagacctcacaaccaatctggctgaggaagaggaaaaagcaaaaaacttgacaaaactgaaaaataagcacgagagcatgatcagtgaattggaagtgcgtttgaagaaggaagaaaagtcaagacaagagctcgagaagctcaagcggaagcttgagggagatgcctctgatttccatgaacagatcgccgatctgcaagcacagattgctgaactcaaaatgcaactggccaagaaagaggaagagctgcaggccgccctcgccagactcgatgacgaaattgcccagaaaaacaacgcgctaaagaaaattagggaactggaggggcacatttccgacttacaggaagatctggatagtgagcgcgcggctcgtaataaagcagagaaacaaaagagggacctgggggaagagctggaggccctgaagaccgagttggaggataccctcgacagcacagctactcagcaggagttgcgcgccaaacgcgagcaggaagtgacagtcctaaaaaaagccctggacgaggaaacccgaagccatgaggcccaggttcaagagatgcgacagaagcatgctcaagcagtggaagagttgaccgagcagttagagcagttcaaaagagcgaaggccaacttagataagaacaagcagactctggaaaaggagaacgccgatctggccggagagcttagagtgctcggccaggccaagcaggaagttgaacacaagaaaaagaaactagaagctcaagtgcaggaattacagtctaagtgctctgatggtgagcgcgcgcgtgccgagctaaatgataaggtccacaagctgcagaatgaagtggagtccgtgacgggaatgcttaacgaggctgaaggcaaagctatcaaacttgccaaggatgtggcctcactgtcatcccagttgcaggatacgcaggaactgctgcaagaggagacccggcagaagctgaacgtgtctactaagttgagacagttagaggaggagcgaaattcactgcaagaccagcttgatgaggagatggaggctaagcagaacctggagaggcatatctccactttgaatatccaactaagcgattccaaaaagaagctgcaggactttgcctctacggttgaggccttggaagaaggcaagaagcggtttcagaaggaaatcgagaacctgactcagcagtatgaagagaaagccgctgcttatgataagctggagaagacgaagaatagactgcagcaggaacttgatgatctcgtggttgatctggataatcagaggcagttagtgagtaacctggagaagaagcaacggaaatttgatcagttgctggctgaggagaaaaatatttcttctaaatatgcggacgagagggaccgcgctgaagcagaagctagagagaaggagacaaaagctctatcattagcccgggcattagaagaggcactggaggccaaggaggaactcgagcgcaccaataaaatgctaaaggccgaaatggaggacctggtctccagtaaggacgatgtaggcaaaaacgtccatgaacttgaaaagagtaagcgtgccctcgaaacgcaaatggaagaaatgaagactcagcttgaggaacttgaagacgagcttcaggccacagaggacgccaagctgagacttgaggtgaatatgcaggccctcaaaggccagttcgaacgagacttacaagcacgagacgagcagaatgaagagaagagacggcagctgcaaagacagcttcatgaatatgagacggagctcgaggacgagcgtaagcagcgggctctagcagccgccgctaaaaagaagcttgaaggagatctgaaagatctggagctgcaggctgacagcgctataaaggggagggaagaggctatcaaacagcttaggaaattacaggctcagatgaaggatttccagcgggagttggaagatgctcgagcttcacgggacgagatattcgctacagcaaaggaaaatgaaaaaaaagcaaagtctctggaggcagacctcatgcagcttcaagaggatctcgccgccgctgaacgagctagaaagcaggcggatctggagaaagaagagctggctgaagaactggcgagtagtctatccggaaggaacgccctgcaggatgaaaaacggcgtctggaagcgcggatagcccagctggaagaggaactggaggaagagcaggggaatatggaagcgatgagtgatagggtacgcaaagcgactcaacaagctgagcagttaagtaacgagttggccaccgaacggtcaactgctcagaaaaacgagagcgcgcgtcagcagctcgagaggcagaacaaggaattgcggtctaaacttcacgaaatggagggagccgtgaaatcaaaattcaaatcaacaatcgcggcactagaggcaaaaatcgcgcagctcgaggaacaagtggaacaggaagcaagagagaagcaggcagccacgaagtccctgaaacagaaggacaaaaagcttaaagagattcttctgcaggtggaggacgagcgaaaaatggccgaacaatacaaggaacaggccgaaaaaggcaatgcccgtgttaagcagcttaagaggcagcttgaggaggcagaggaggaatcacaaagaattaacgctaacagacgcaaactccagagggaattggacgaggcgaccgaatcaaacgaagctatggggcgcgaggtgaacgctctaaaatccaaattacgtggtccgccgccccaggagacaagtcaatag

SEQ ID NO: 213495 - DNA, 5816 bp, Artificial Sequence
  derived and/or modified sequence
atggctcagaaaggccaactcagcgatgacgagaaatttctcttcgtggacaaaaatttcatcaactctcccgtggcccaggccgactgggcagctaagagactggtctgggtaccttcagagaagcagggtttcgaggcggcatcaatcaaggaagagaagggcgatgaagttgtggtggagctagtggaaaatggcaagaaagtgaccgtcggcaaagacgacattcagaagatgaatcctccaaagttcagcaaagtcgaggacatggctgaactgacttgcctgaatgaagctagcgtgcttcacaacctgcgcgaaaggtactttagcgggttaatctatacctattctggtctcttttgcgtggtggttaacccatacaagcatttgccaatttatagcgaaaaaatcgtcgacatgtataagggaaaaaaaagacatgaaatgcccccacacatttacgcaatcgctgatacagcctatcgttcaatgctccaagaccgtgaagatcagtctatcctctgtaccggtgaaagtggggctggaaagacagagaacactaagaaggtcattcagtatctcgctgttgtcgcgtcttcgcacaaagggaaaaaagatactagcattactggggaactggagaaacagctgcttcaggccaaccccattctggaagccttcggtaatgcgaaaactgtcaaaaatgataatagcagcaggttcggtaagtttattcgcataaattttgacgtcaccggctacattgttggagcgaacatcgagacttacctgttggaaaagtctagagccatcaggcaggccagggatgaaaggactttccacatcttctactacatgatcgctggagcaaaggagaagatgcggtctgatctgctgctggagggcttcaacaactataccttcctgtccaatggtttcgttcccatccccgctgctcaggatgacgaaatgttccaagaaactgttgaggcaatggcaataatggggttttctgaggaagagcaactgtcaatcctgaaggttgtgagtagcgttttgcagcttggaaatatagtttttaaaaaagagagaaatacagaccaggcctcaatgcctgataatacggcagcccagaaggtctgtcatcttatggggatcaacgtgacagacttcacccggagcatactcacacctcgcatcaaggttggcagggacgtggtgcagaaggcacagacgaaggagcaagccgattttgcagtcgaggcgttagccaaggctacctatgagaggctgttccgctggatcctgacgagggttaataaggcacttgataagactcatcggcaaggcgcttcgttccttggaatccttgatatagcgggttttgagatcttcgaagtgaattcttttgagcagctatgcattaactataccaacgaaaagctccagcaactcttcaatcacaccatgttcatacttgaacaggaggaatatcagagagaggggatcgaatggaattttattgacttcgggctggacctgcaaccctgcattgaactgatcgagcgcccaaacaatcccccaggggtgctggctctgctcgacgaagagtgttggttccctaaggccaccgataagtcattcgtcgaaaagttgtgcacggagcagggttctcatccgaaatttcaaaagccaaaacagctgaaagataagacagagttctctatcattcattacgctgggaaagtggattataacgccagtgcctggctcacgaagaatatggaccctctgaatgacaacgtgacttccttgctcaatgcatctagcgacaagtttgtggctgacttgtggaaagacgttgacaggatcgtgggactggatcagatggctaagatgaccgaatctagcttgccatccgcttccaagactaaaaagggcatgttccgcacagtcggtcagctctacaaagagcagctcgggaaattgatgacaacgctccgcaataccaccccaaattttgttcgttgtattattccaaaccatgagaaacgatcaggcaaattggacgcctttctcgtgttggaacagctgagatgtaacggcgtactggagggcattagaatatgccggcaggggtttccaaatagaatcgtgttccaggaatttcggcagcggtacgagatacttgctgcaaacgctatccccaaaggcttcatggatggcaagcaggcctgcatcctcatgattaaggctttggagttagacccaaatctgtatcggatcggccaaagtaagatcttcttccggacgggcgtgcttgcccatctggaagaggagcgggatcttaaaattacagacgtcataatggccttccaagccatgtgccgcggttacctggcgaggaaggccttcgccaaacgacagcagcagctgaccgcaatgaaggttatccagaggaactgcgcggcttacctaaagttgcggaactggcaatggtggcgcttatttactaaagtgaaacccctgttacaagtgacgcgccaggaggaggaaatgcaggccaaggaggacgagctccagaagactaaagagaggcagcagaaggcagagaacgagttgaaagagctcgagcaaaaacattctcagcttaccgaggaaaaaaacctgctccaagaacaattgcaggcagagaccgaactatatgccgaggccgaggagatgagggtcagactcgcggcaaaaaaacaagaactggaagaaattcttcatgaaatggaggccaggcttgaggaggaggaagatcgcggtcaacagctccaggcagagcgtaaaaagatggcacaacagatgctggacctggaagaacagctcgaggaagaagaggccgcacggcagaagcttcagctggaaaaggtgaccgccgaggccaaaatcaagaaactcgaggacgaaatactggttatggatgatcaaaacaacaagctgtcaaaggagcgcaagctcctcgaagagcggatctcagacctgaccaccaatctggctgaggaagaagagaaggctaaaaacctgaccaagctgaagaacaagcacgaatcaatgatctctgagctggaagtgcgactgaaaaaggaagagaaatccaggcaggagctagaaaagctgaaaagaaagctagagggcgatgcatctgacttccacgaacaaatagccgatctccaggcgcagatagccgagctcaagatgcagctggcaaaaaaggaggaggagctgcaggctgccctagcgcgactggacgatgaaatagcccagaaaaacaacgctctgaagaagattcgggaactggagggtcatatcagtgatctccaggaagatctcgactccgagcgtgccgctaggaataaggctgagaagcaaaagcgcgatcttggggaggaactcgaagcactaaagaccgaacttgaagacactcttgattctactgctactcagcaggagttgcgtgccaagcgcgaacaggaggtgacagtgttgaagaaggcactcgacgaagagacccgctcacatgaggcccaagtgcaggaaatgaggcagaagcatgcgcaggcggtggaagagctcaccgaacagttagagcagtttaaacgagctaaggcgaacttagataagaataaacagaccctagaaaaggagaacgccgaccttgccggtgagctgcgagtgttggggcaagcgaaacaggaagtggagcataagaaaaagaaactcgaggcccaagtgcaagagctccagtcgaagtgctctgatggagagcgggcacgcgctgaactgaacgacaaggtgcacaaacttcagaatgaggtggaatctgttacaggcatgcttaatgaagccgaaggaaaagcaataaagcttgcaaaagacgtcgctagtctgtctagccagttgcaggacacccaggaacttttgcaggaggagacacgccaaaagctgaacgtgtcaaccaagttgagacagctggaggaagagcgaaattctctgcaggaccagctggatgaggagatggaggccaaacagaacctggagaggcacatctccacactgaatattcagttgagtgattccaaaaagaaactccaagactttgcaagcactgtagaagcattggaggaggggaagaaacgtttccagaaggaaattgagaaccttacccagcagtatgaagaaaaggcagccgcttacgacaaattagaaaaaaccaagaatcgcctgcagcaggagctggatgacctggttgtcgatttggataatcagcgccaactggtgagtaatctggaaaagaagcagaggaaatttgatcaactccttgccgaggagaagaatataagctccaagtatgcagacgagagggatagagcagaagctgaagctagggaaaaggaaaccaaggcgctgagccttgctcgtgcattggaagaggctctcgaggccaaggaggagttggagagaaccaataagatgttgaaagctgagatggaggatcttgtaagttcaaaagatgacgttggtaaaaacgtgcacgaattggaaaaaagcaagagggctcttgagacacagatggaggagatgaaaactcagcttgaagaactggaggacgagcttcaggccaccgaggacgctaaacttcgcctggaggtgaatatgcaggccttgaagggccagttcgagcgggacctccaggctcgcgacgaacagaacgaggaaaagaggcgacagctccagcgccagcttcacgagtacgagacagagctagaagatgaacgtaaacagcgtgccctagcagcagccgcaaaaaaaaaactcgagggtgacctgaaagacctggaactccaggctgatagcgctatcaagggcagagaagaagccattaagcagctgaggaagcttcaagcccagatgaaagattttcagcgcgaactagaggacgccagggcttccagggatgaaatcttcgctacagccaaggaaaatgaaaagaaagctaagagtctggaagccgacttgatgcagcttcaggaggacctggctgcggctgagcgcgcacgaaagcaggccgacctggaaaaggaggagctggccgaagaactagctagcagcctgagcgggaggaacgctttgcaagatgaaaaaagaagactcgaggcacgcatagcccaactggaggaggaactggaggaagagcaaggaaacatggaggctatgtcagacagagtcaggaaggccacacaacaagctgaacagctgagcaatgaactagccacggagagatcaacagcgcaaaaaaacgagtccgcccgtcaacagcttgaacggcagaacaaggagctccggtctaagttgcatgagatggaaggagccgtgaagtccaaattcaagtcaaccatcgccgcactcgaggccaaaatagcccagttggaggaacaggtggagcaggaggcacgagagaagcaagccgcaacaaagtccctgaaacaaaaagataagaagctcaaggaaatcctgctgcaggttgaagacgagcggaagatggctgaacagtacaaagagcaagccgaaaaaggaaatgctagggtgaagcagctcaagcggcaactggaggaggctgaagaggagagccaaaggattaacgccaaccggaggaaactgcagcgagagctcgatgaggctacagaatctaatgaagccatggggagggaagtcaacgccctcaaatctaagctaagagggcctcccccacaggaaacatcccagta

SEQ ID NO: 213496 - DNA, 5817 bp, Artificial Sequence
  derived and/or modified sequence
atggcccagaagggccagctgagcgacgacgagaagttcctgttcgtggacaagaacttcatcaacagccccgtggcccaggccgactgggccgccaagagactggtgtgggtgcccagcgagaagcagggcttcgaggccgccagcatcaaggaggagaagggcgacgaggtggtggtggagctggtggagaacggcaagaaggtgaccgtgggcaaggacgacatccagaagatgaacccccccaagttcagcaaggtggaggacatggccgagctgacctgcctgaacgaggccagcgtgctgcacaacctgagagagagatacttcagcggcctgatctacacctacagcggcctgttctgcgtggtggtgaacccctacaagcacctgcccatctacagcgagaagatcgtggacatgtacaagggcaagaagagacacgagatgcccccccacatctacgccatcgccgacaccgcctacagaagcatgctgcaggacagagaggaccagagcatcctgtgcaccggcgagagcggcgccggcaagaccgagaacaccaagaaggtgatccagtacctggccgtggtggccagcagccacaagggcaagaaggacaccagcatcaccggcgagctggagaagcagctgctgcaggccaaccccatcctggaggccttcggcaacgccaagaccgtgaagaacgacaacagcagcagattcggcaagttcatcagaatcaacttcgacgtgaccggctacatcgtgggcgccaacatcgagacctacctgctggagaagagcagagccatcagacaggccagagacgagagaaccttccacatcttctactacatgatcgccggcgccaaggagaagatgagaagcgacctgctgctggagggcttcaacaactacaccttcctgagcaacggcttcgtgcccatccccgccgcccaggacgacgagatgttccaggagaccgtggaggccatggccatcatgggcttcagcgaggaggagcagctgagcatcctgaaggtggtgagcagcgtgctgcagctgggcaacatcgtgttcaagaaggagagaaacaccgaccaggccagcatgcccgacaacaccgccgcccagaaggtgtgccacctgatgggcatcaacgtgaccgacttcaccagaagcatcctgacccccagaatcaaggtgggcagagacgtggtgcagaaggcccagaccaaggagcaggccgacttcgccgtggaggccctggccaaggccacctacgagagactgttcagatggatcctgaccagagtgaacaaggccctggacaagacccacagacagggcgccagcttcctgggcatcctggacatcgccggcttcgagatcttcgaggtgaacagcttcgagcagctgtgcatcaactacaccaacgagaagctgcagcagctgttcaaccacaccatgttcatcctggagcaggaggagtaccagagagagggcatcgagtggaacttcatcgacttcggcctggacctgcagccctgcatcgagctgatcgagagacccaacaacccccccggcgtgctggccctgctggacgaggagtgctggttccccaaggccaccgacaagagcttcgtggagaagctgtgcaccgagcagggcagccaccccaagttccagaagcccaagcagctgaaggacaagaccgagttcagcatcatccactacgccggcaaggtggactacaacgccagcgcctggctgaccaagaacatggaccccctgaacgacaacgtgaccagcctgctgaacgccagcagcgacaagttcgtggccgacctgtggaaggacgtggacagaatcgtgggcctggaccagatggccaagatgaccgagagcagcctgcccagcgccagcaagaccaagaagggcatgttcagaaccgtgggccagctgtacaaggagcagctgggcaagctgatgaccaccctgagaaacaccacccccaacttcgtgagatgcatcatccccaaccacgagaagagaagcggcaagctggacgccttcctggtgctggagcagctgagatgcaacggcgtgctggagggcatcagaatctgcagacagggcttccccaacagaatcgtgttccaggagttcagacagagatacgagatcctggccgccaacgccatccccaagggcttcatggacggcaagcaggcctgcatcctgatgatcaaggccctggagctggaccccaacctgtacagaatcggccagagcaagatcttcttcagaaccggcgtgctggcccacctggaggaggagagagacctgaagatcaccgacgtgatcatggccttccaggccatgtgcagaggctacctggccagaaaggccttcgccaagagacagcagcagctgaccgccatgaaggtgatccagagaaactgcgccgcctacctgaagctgagaaactggcagtggtggagactgttcaccaaggtgaagcccctgctgcaggtgaccagacaggaggaggagatgcaggccaaggaggacgagctgcagaagaccaaggagagacagcagaaggccgagaacgagctgaaggagctggagcagaagcacagccagctgaccgaggagaagaacctgctgcaggagcagctgcaggccgagaccgagctgtacgccgaggccgaggagatgagagtgagactggccgccaagaagcaggagctggaggagatcctgcacgagatggaggccagactggaggaggaggaggacagaggccagcagctgcaggccgagagaaagaagatggcccagcagatgctggacctggaggagcagctggaggaggaggaggccgccagacagaagctgcagctggagaaggtgaccgccgaggccaagatcaagaagctggaggacgagatcctggtgatggacgaccagaacaacaagctgagcaaggagagaaagctgctggaggagagaatcagcgacctgaccaccaacctggccgaggaggaggagaaggccaagaacctgaccaagctgaagaacaagcacgagagcatgatcagcgagctggaggtgagactgaagaaggaggagaagagcagacaggagctggagaagctgaagagaaagctggagggcgacgccagcgacttccacgagcagatcgccgacctgcaggcccagatcgccgagctgaagatgcagctggccaagaaggaggaggagctgcaggccgccctggccagactggacgacgagatcgcccagaagaacaacgccctgaagaagatcagagagctggagggccacatcagcgacctgcaggaggacctggacagcgagagagccgccagaaacaaggccgagaagcagaagagagacctgggcgaggagctggaggccctgaagaccgagctggaggacaccctggacagcaccgccacccagcaggagctgagagccaagagagagcaggaggtgaccgtgctgaagaaggccctggacgaggagaccagaagccacgaggcccaggtgcaggagatgagacagaagcacgcccaggccgtggaggagctgaccgagcagctggagcagttcaagagagccaaggccaacctggacaagaacaagcagaccctggagaaggagaacgccgacctggccggcgagctgagagtgctgggccaggccaagcaggaggtggagcacaagaagaagaagctggaggcccaggtgcaggagctgcagagcaagtgcagcgacggcgagagagccagagccgagctgaacgacaaggtgcacaagctgcagaacgaggtggagagcgtgaccggcatgctgaacgaggccgagggcaaggccatcaagctggccaaggacgtggccagcctgagcagccagctgcaggacacccaggagctgctgcaggaggagaccagacagaagctgaacgtgagcaccaagctgagacagctggaggaggagagaaacagcctgcaggaccagctggacgaggagatggaggccaagcagaacctggagagacacatcagcaccctgaacatccagctgagcgacagcaagaagaagctgcaggacttcgccagcaccgtggaggccctggaggagggcaagaagagattccagaaggagatcgagaacctgacccagcagtacgaggagaaggccgccgcctacgacaagctggagaagaccaagaacagactgcagcaggagctggacgacctggtggtggacctggacaaccagagacagctggtgagcaacctggagaagaagcagagaaagttcgaccagctgctggccgaggagaagaacatcagcagcaagtacgccgacgagagagacagagccgaggccgaggccagagagaaggagaccaaggccctgagcctggccagagccctggaggaggccctggaggccaaggaggagctggagagaaccaacaagatgctgaaggccgagatggaggacctggtgagcagcaaggacgacgtgggcaagaacgtgcacgagctggagaagagcaagagagccctggagacccagatggaggagatgaagacccagctggaggagctggaggacgagctgcaggccaccgaggacgccaagctgagactggaggtgaacatgcaggccctgaagggccagttcgagagagacctgcaggccagagacgagcagaacgaggagaagagaagacagctgcagagacagctgcacgagtacgagaccgagctggaggacgagagaaagcagagagccctggccgccgccgccaagaagaagctggagggcgacctgaaggacctggagctgcaggccgacagcgccatcaagggcagagaggaggccatcaagcagctgagaaagctgcaggcccagatgaaggacttccagagagagctggaggacgccagagccagcagagacgagatcttcgccaccgccaaggagaacgagaagaaggccaagagcctggaggccgacctgatgcagctgcaggaggacctggccgccgccgagagagccagaaagcaggccgacctggagaaggaggagctggccgaggagctggccagcagcctgagcggcagaaacgccctgcaggacgagaagagaagactggaggccagaatcgcccagctggaggaggagctggaggaggagcagggcaacatggaggccatgagcgacagagtgagaaaggccacccagcaggccgagcagctgagcaacgagctggccaccgagagaagcaccgcccagaagaacgagagcgccagacagcagctggagagacagaacaaggagctgagaagcaagctgcacgagatggagggcgccgtgaagagcaagttcaagagcaccatcgccgccctggaggccaagatcgcccagctggaggagcaggtggagcaggaggccagagagaagcaggccgccaccaagagcctgaagcagaaggacaagaagctgaaggagatcctgctgcaggtggaggacgagagaaagatggccgagcagtacaaggagcaggccgagaagggcaacgccagagtgaagcagctgaagagacagctggaggaggccgaggaggagagccagagaatcaacgccaacagaagaaagctgcagagagagctggacgaggccaccgagagcaacgaggccatgggcagagaggtgaacgccctgaagagcaagctgagaggcccccccccccaggagaccagccagtag

SEQ ID NO: 213497 - protein, 187 aa, Artificial Sequence
  derived and/or modified sequence
MPRVVPDQRSKFENEEFFRKLSRECEIKYTGFRDRPHEERQARFQNACRDGRSEIAFVATGTNLSLQFFPASWQGEQRQTPSREYVDLEREAGKVYLKAPMILNGVCVIWKGWIDLQRLDGMGCLEFDEERAQQEDALAQQAFEEARRRTREFEDRDRSHREEMEARRQQDPSPGSNLGGGDDLKLR

SEQ ID NO: 213498 - DNA, 564 bp, Artificial Sequence
  derived and/or modified sequence
atgccccgggtggtgcccgaccaacgctcaaagttcgagaatgaagaatttttccgcaaacttagcagggagtgcgagattaagtacacaggattccgagatagaccacacgaggaaaggcaggccaggttccagaatgcctgccgggacggaaggtctgaaattgcttttgtagcgactggtacgaatttatctttgcagttctttccggcctcgtggcagggagaacaacgtcagacaccatccagagagtacgtggatctcgagcgagaggccggcaaagtgtatctgaaggcacccatgatcttgaatggcgtgtgcgtgatttggaaaggatggatcgatttgcagcggctcgacggaatggggtgtctggagttcgacgaggagcgcgcacagcaggaagatgcgctcgcccagcaagcctttgaggaggcccgccgaagaacacgggagttcgaggaccgcgacaggagtcaccgcgaggagatggaggccagacgccagcaagatccatctccgggctccaaccttgggggcggggacgacctgaagttgcgatag

SEQ ID NO: 213499 - DNA, 564 bp, Artificial Sequence
  derived and/or modified sequence
atgccccgggtggtgcctgaccagaggagcaagtttgaaaatgaggagttcttcaggaagctgagccgggagtgtgagatcaagtacacaggcttccgggaccggccccatgaggagcggcaggcccgcttccagaatgcctgcagagatggccgctcagaaattgcctttgtggccaccggcaccaacctgagcctgcagttcttccctgcctcctggcagggcgagcagaggcagacccccagccgggagtatgtggacctggagcgggaggccggcaaggtgtacctgaaggcccccatgatcctgaatggagtgtgtgtgatctggaagggctggattgacctgcagaggctggatggcatgggctgcctggagtttgatgaggagcgggcccagcaggaggatgccctggcccagcaggcctttgaggaggcccggcggaggacccgggagtttgaggaccgggacaggagccaccgggaggagatggaggcccggcggcagcaggaccccagccctggcagcaacctgggcggcggagatgacctgaagctgaggtag

SEQ ID NO: 213500 - DNA, 564 bp, Artificial Sequence
  derived and/or modified sequence
atgccccgggtggtgcccgaccagcggagcaagttcgagaacgaggagttttttaggaaactgtctcgtgaatgtgaaatcaaatatacaggcttcagggacagaccgcacgaagaaagacaggctagattccaaaatgcttgtcgagatgggagaagcgaaattgcatttgttgcaacagggaccaatttaagcctgcagttttttcccgcttcctggcagggcgagcagagacaaacgccctcacgtgaatacgttgatctagagcgcgaggccgggaaagtttacctgaaggcaccaatgatcctcaatggtgtgtgcgtgatttggaagggttggatagacctacagcggctcgacggcatgggttgcctagaattcgacgaagaacgcgctcagcaagaggatgccctcgcccagcaggctttcgaggaggccagacgccggactagagaatttgaggacagagaccggtcccatagggaggaaatggaggctaggcgccagcaagatccttctccaggaagcaacttaggcggcggggatgacctcaagctgcgttag

SEQ ID NO: 213501 - DNA, 564 bp, Artificial Sequence
  derived and/or modified sequence
atgccacgcgttgtgcccgatcaaagatccaaatttgaaaacgaggaattcttcaggaagctaagtcgggaatgtgaaattaaatacactggcttcagggatcgccctcacgaagaacgtcaggctcgcttccaaaatgcgtgtagagatggcaggtctgagattgcttttgtggctaccggaacaaacctgtctctgcagttctttcctgcatcctggcagggtgagcaacgacagacacctagcagggaatatgtggacctggagcgagaggcaggcaaggtgtacctgaaggctcccatgattctgaacggcgtgtgcgtaatctggaagggatggatcgaccttcagaggctcgacgggatgggttgcttggaattcgacgaggagcgcgctcaacaagaggacgcgctggcccagcaggcgtttgaggaagcacgaagacgaacgcgcgagttcgaggacagagatcggtcccatcgggaggagatggaggccaggcgacagcaggatccttcccccggaagtaatttgggagggggagacgatcttaagttaagatag

SEQ ID NO: 213502 - DNA, 3100 bp, Artificial Sequence
  derived and/or modified sequence
gcggtgagcgctggggctgcgcgggcggcaggcaacggctgaggcggcggcggcggcggcggcggcgtgggttgggctcgagcgggcggcggcgcctcagactccccggaacgggagcccacgcgggcgggcgcctgaaacaaagggaagcgggcgtccgggcgccgcgggtgggcggtcagtcggtcagcgcggagccagccagcgggtgcccgcgcaagccccgagcgcggccggccggcgcggcctcagggcgggaagatgccgcgcgtcgtgcccgaccagagaagcaagttcgagaacgaggagttttttaggaagctgagccgcgagtgtgagattaagtacacgggcttcagggaccggccccacgaggaacgccaggcacgcttccagaacgcctgccgcgacggccgctcggaaatcgcttttgtggccacaggaaccaatctgtctctccagttttttccggccagctggcagggagaacagcgacaaacacctagccgagagtatgtcgacttagaaagagaagcaggcaaggtatatttgaaggctcccatgattctgaatggagtctgtgttatctggaaaggctggattgatctccaaagactggatggtatgggctgtctggagtttgatgaggagcgagcccagcaggaggatgcattagcacaacaggcctttgaagaggctcggagaaggacacgcgaatttgaagatagagacaggtctcatcgggaggaaatggaggcaagaagacaacaagaccctagtcctggttccaatttaggtggtggtgatgacctcaaacttcgttaattaatagcacagcagatgtgtgctgcccatctttacatacacattgcttctagttggcagaaataattgattaaaagaccagaaactgtgataactggaggtactacggtctatttctcaaccttaggcagtaatagacatcacaaactgccatggttttgcactatgattataatacctgcatttctaattttttaagcatgtagccagtaataatttgaagttttttttctatgcaagcttaccttgttggcattattttagggagttgaaactatcaactgtaaagctccttttcttccactttaatttaaaagttcatgtcatttaaaaacaagtcaagaaattaaaattgtatcagagggttttctctaatcattttttctatttttttttttgtacttctagatgttttggttatacagcttcattttagatgagcattcttattttttgttttgtttgccccatttccttttgtgtttttatagtctatagcattttaaaactgctgatgttgtttgcattatttacaggctaaaaacttagtagcatagagctgtctgccacagccttctgacaaagtttacagttattaaagttgcagtatccttttaaatgctagtaatcagcactctttcttttttttttttttaatagagacagggtctcgcagtgttgcccaggctggtctcgaactcctggcatcaagcgatcctcctgccttagcctcccagagtactgggattacaggctctttctttttaaacataaaagttttaaattggtattaactctgtactctgccctagattgttttagcttctgttctgtaatcatgagtttggttggagatattctccatagatgatcttctactgaaatgcctaaagaagtcacaggctggcttctgttttattcagggatttttttaaaaagtcaatcagaaaagggatactggagcttcttcatgtatgtaacagcatattaaactggagacagtgatgaatcagctacaaaggtaatattgtattaaaatcatgtttaagatagctgcttttatgtgtattttatattgcatgcttttgtaaaaacatgctgggtgatgaaagattagttttagagagaaaatgttcatctgtgcagaggatgcattttcttccattaattctggaaaaaacgttcacagttatatatatggtattttgcaaaaggactattaatagaaccttttgagatgaattaatgtaagaatattttttaaataggcttactgtcaaattgcaactttttttttagatacagagtggaaaacagtgctaagtcatttggcacctccttacaaatatttttcatggtcacatttattaaatgttactacatttctgaatttttgaaaaatgtattttatcattaaatggcattattttaaagggtgaaaaactgacacagtcaattcagaaaatggactgaagtctgaataaggtcattgcatttaaaaagcatataactgtacttgactgatgagggaggtgttactttcattgtatataggtcttatttcataaacagatatcctgtatcaaataaaagtatttgttatatatttgaagttatgcatggaaaggagtgtgtttaaattgttacaaacaataatgcgtcattaaaggccatgctgatcttgcataactataagtactatgaatgaatttggttggttttggtgttgtacagctcacatgtttacacactcagtgccctaatttcccctgagggaatcgctttttaagtgatccttacagtggtgttttatgttactttattacagagctccttggttttttacttctgcacttaaatttttttaaataacatgatgatggtacattttcctctattgtctagctaagggctttcggtccaccagtaaataagatcaaatgctcttaaatgttcctgttaccatcctaatgtaaatactggatttttctgtcatttagcaccatgctgcttctgtctgtcttaatgctggcattaagatcatgagccctttttctccagtagtacaggctttgaaaactacttctattaagttattgatgcaatttgatattttttcataatctatatttaaacaaaattacatcattgcatcatcttttctaaattcatctccattaaaacttgccttaagctaccagattgcttttgccaccattggccatactgtgtgtttgtttgtttaatttactttcacaataaacttctgtgtagt

SEQ ID NO: 213503 - DNA, 564 bp, Artificial Sequence
  derived and/or modified sequence
atgcccagagtggtgcccgaccagagaagcaagttcgagaacgaggagttcttcagaaagctgagcagagagtgcgagatcaagtacaccggcttcagagacagaccccacgaggagagacaggccagattccagaacgcctgcagagacggcagaagcgagatcgccttcgtggccaccggcaccaacctgagcctgcagttcttccccgccagctggcagggcgagcagagacagacccccagcagagagtacgtggacctggagagagaggccggcaaggtgtacctgaaggcccccatgatcctgaacggcgtgtgcgtgatctggaagggctggatcgacctgcagagactggacggcatgggctgcctggagttcgacgaggagagagcccagcaggaggacgccctggcccagcaggccttcgaggaggccagaagaagaaccagagagttcgaggacagagacagaagccacagagaggagatggaggccagaagacagcaggaccccagccccggcagcaacctgggcggcggcgacgacctgaagctgagatag

SEQ ID NO: 213504 - protein, 282 aa, Artificial Sequence
  derived and/or modified sequence
MAMSSGGSGGGVPEQEDSVLFRRGTGQSDDSDIWDDTALIKAYDKAVASFKHALKNGDICETSGKPKTTPKRKPAKKNKSQKKNTAASLQQWKVGDKCSAIWSEDGCIYPATIASIDFKRETCVVVYTGYGNREEQNLSDLLSPICEVANNIEQNAQENENESQVSTDESENSRSPGNKSDNIKPKSAPWNSFLPPPPPMPGPRLGPGKPGLKFNGPPPPPPPPPPHLLSCWLPPFPSGPPIIPPPPPICPDSLDDADALGSMLISWYMSGYHTGYYMEMLA

SEQ ID NO: 213505 - DNA, 849 bp, Artificial Sequence
  derived and/or modified sequence
atggccatgagcagcggcggcagcggcggcggcgtgcccgagcaggaggacagcgtgctgttcagaagaggcaccggccagagcgacgacagcgacatctgggacgacaccgccctgatcaaggcctacgacaaggccgtggccagcttcaagcacgccctgaagaacggcgacatctgcgagaccagcggcaagcccaagaccacccccaagagaaagcccgccaagaagaacaagagccagaagaagaacaccgccgccagcctgcagcagtggaaggtgggcgacaagtgcagcgccatctggagcgaggacggctgcatctaccccgccaccatcgccagcatcgacttcaagagagagacctgcgtggtggtgtacaccggctacggcaacagagaggagcagaacctgagcgacctgctgagccccatctgcgaggtggccaacaacatcgagcagaacgcccaggagaacgagaacgagagccaggtgagcaccgacgagagcgagaacagcagaagccccggcaacaagagcgacaacatcaagcccaagagcgccccctggaacagcttcctgcccccccccccccccatgcccggccccagactgggccccggcaagcccggcctgaagttcaacggccccccccccccccccccccccccccccccccacctgctgagctgctggctgccccccttccccagcggcccccccatcatccccccccccccccccatctgccccgacagcctggacgacgccgacgccctgggcagcatgctgatcagctggtacatgagcggctaccacaccggctactacatggagatgctggcctag

SEQ ID NO: 213506 - DNA, 849 bp, Artificial Sequence
  derived and/or modified sequence
atggcaatgagctcagggggttctggggggggggtaccggaacaggaggattccgtattgttcagacgaggaacaggccagtctgatgattctgatatctgggatgatactgctttgattaaagcctatgataaggctgtcgcttctttcaaacacgccctgaagaatggggatatttgcgaaacttccggaaagccaaagactactccaaagcggaagcctgcaaaaaagaataaatctcagaaaaaaaacacagctgcttccctgcagcagtggaaggtgggggataaatgcagcgcaatctggagcgaagacggctgtatctaccccgctacaatagcctccatcgacttcaaaagggagacctgcgtggtggtgtataccggctacggtaaccgagaagaacagaacctatctgacctgttgtcacctatctgcgaggtcgctaacaatatcgagcaaaacgcccaagagaatgagaatgagtcgcaggtatctaccgacgaatcagaaaacagcaggagccccggcaacaaaagcgataatatcaagccaaaaagcgcaccttggaatagcttcttgcctcccccacctccaatgcctggacccagactggggcctggaaaacccggactgaaattcaacggcccaccgccacctccaccgccacccccccctcatcttctcagttgttggctcccaccttttcctagtgggccccccatcatacccccacctcctcccatttgtcccgattctctcgacgacgccgacgctcttggatccatgctcattagctggtatatgagcgggtatcatacaggctactatatggaaatgttagcatag

SEQ ID NO: 213507 - DNA, 849 bp, Artificial Sequence
  derived and/or modified sequence
atggcgatgagttcaggaggatccggggggggcgtacccgagcaagaagacagcgtgctgtttaggcggggaacaggtcagagtgacgattccgacatttgggatgacacggctttaatcaaagcatacgacaaggctgtggcgagtttcaaacacgcactgaagaatggtgatatctgtgaaacatccggcaagcccaagactactcccaaacgcaagcccgcgaagaaaaacaagtcccagaagaaaaacactgccgccagcctgcaacagtggaaggtgggggataagtgctccgcaatatggtcagaggacggttgcatctaccctgccactatcgcctctatcgacttcaaacgcgagacatgcgtggttgtgtacaccggctacggaaacagggaggaacagaacctaagcgatctgctctcccccatttgcgaggttgcaaataatatcgaacagaatgcccaggagaatgagaatgagtctcaagtatctaccgacgagtccgagaacagtaggagtcccggaaataagagcgataacatcaaacctaagtcagcgccctggaatagctttctccctccacctcccccaatgccaggacccagactgggacctgggaaaccagggctcaagttcaacggccctccaccaccacctccacctccacccccacacctgttaagctgctggctgcccccatttccatctggcccccctataatccctccacctccccctatctgtcccgattccctggacgatgccgatgccctcggatcaatgctgatctcttggtatatgagtggctatcataccggctactacatggaaatgctggcttag

SEQ ID NO: 213508 - DNA, 849 bp, Artificial Sequence
  derived and/or modified sequence
atggccatgagcagcggcggcagcggcggcggcgtgcctgagcaggaggacagcgtgctcttccggcggggcaccggccagagtgatgacagcgacatctgggatgacacagccctgatcaaggcctatgacaaggctgtggccagcttcaagcacgccctgaagaatggagacatctgtgagaccagcggcaagcccaagaccacccccaagaggaagccagccaagaagaacaagagccagaagaagaacacagctgccagcctgcagcagtggaaggtgggggacaagtgcagcgccatctggagcgaagatggctgcatctacccagccaccatcgccagcattgacttcaagcgggagacctgtgtggtggtgtacacaggctacggcaaccgggaggagcagaacctgagtgacctgctgagccccatctgtgaggtggccaacaacatcgagcagaatgcccaggagaatgaaaatgaaagccaggtgtccacagatgaaagtgagaacagccgcagccctggcaacaagagtgacaacatcaagcccaagagcgccccctggaacagcttcctgcccccacctccacccatgcctggcccccggctgggccctgggaagccaggcctgaagttcaatggacctcctcctcctcctcctcctcctccaccccacctgctgagctgctggctgccccccttccccagcggcccccccatcatccccccacctccacccatctgcccagacagcctggatgatgctgatgccctgggctccatgctgatctcctggtacatgagcggctaccacacaggctactacatggagatgctggcctag

SEQ ID NO: 213509 - DNA, 849 bp, Artificial Sequence
  derived and/or modified sequence
atggccatgagcagcggcggcagcggcggcggcgtgcccgagcaggaggactcggttttgttcaggcggggtaccggccaatcagacgactctgacatttgggacgacacagccttaataaaagcgtacgataaagctgtcgcctccttcaaacacgccctgaagaatggggacatatgtgagacaagtgggaagcccaagactacgccaaaaagaaagcctgcaaagaagaacaagtcccagaaaaagaataccgccgcatccctgcagcagtggaaggtgggcgataagtgctctgcaatctggtccgaagatggttgcatttatcctgccactattgcgagcattgactttaagcgcgagacttgcgttgtcgtgtacacggggtatgggaatagagaagagcaaaacctgtcagatctcctcagccccatctgtgaagtcgcgaataatatcgagcagaatgctcaagaaaatgaaaatgagtcacaagtgtccaccgacgagtccgaaaacagtcgctcccccggaaacaagtccgacaacataaaacccaaatccgctccctggaattcatttttgccgccaccaccgccaatgcctgggccccgcctggggcccgggaagcccgggctcaaattcaatgggccacctccgccgccccccccaccgcctccccacttactgtcctgctggcttccacctttcccatccggtccacccatcataccacccccaccacccatttgtccagactctctggacgacgccgacgcgctcggatccatgctgattagctggtatatgtccggctatcatacaggatactatatggagatgttggcctag

SEQ ID NO: 213510 - DNA, 849 bp, Artificial Sequence
  derived and/or modified sequence
atggccatgagcagcggcggcagcggcggcggcgtgcccgagcaggaggatagcgtgctctttaggcgggggactggacagtccgacgactccgatatctgggacgataccgctctgatcaaggcctatgacaaagccgtggcaagttttaagcacgctctgaaaaatggggacatctgcgaaacatcgggaaagccaaagacaactccaaagcgcaaaccagccaaaaagaacaagagccaaaaaaaaaatactgctgccagcttacagcagtggaaagtgggggacaaatgcagtgccatttggtccgaggatggttgtatctatccagcgacgattgcttcaatcgattttaagagggagacttgcgtggtagtgtatacaggttacggtaacagggaagagcagaacctttcggatctgctaagtcctatctgcgaggtcgccaacaacattgagcaaaacgcccaggagaacgaaaatgaaagtcaggtttccaccgatgagtccgagaactccagatcgcccggtaacaaaagcgataatattaagccaaagtcggcgccttggaactcttttctgccgccacctcctcctatgcccggaccaagattgggaccgggcaaacctgggttgaaattcaacgggcccccccctccccctccccctcctccccctcacctgttaagttgttggttgccccctttcccaagtggcccacccatcatccctcctcccccccctatctgtccggattccctcgatgatgccgatgccctaggctccatgctgatctcttggtacatgtcaggctaccacacgggttactacatggaaatgctggcgtag

SEQ ID NO: 213511 - DNA, 849 bp, Artificial Sequence
  derived and/or modified sequence
atggctatgtcatccgggggaagcgggggtggagttcccgagcaagaggatagtgttctgtttaggagggggaccggccagagcgatgatagcgacatctgggacgatactgccttgattaaggcttacgacaaggcggtagcatctttcaaacacgccctgaagaacggcgacatatgtgagacatccggcaagccaaagacaacgcctaaacgcaagcccgcaaaaaagaataaatcccagaagaaaaatacagccgctagtctacagcagtggaaggtgggtgacaaatgctccgcgatctggtctgaggatggttgcatttaccctgcgacaatagcttctatagatttcaagcgggagacttgtgtcgtagtctatacaggttacggcaatagggaggagcaaaatctgtccgatttgctcagtcccatatgcgaggtcgctaacaatatcgagcaaaatgcgcaagagaacgaaaatgaatcccaagtgagcactgacgagtcagaaaatagtaggagccccggaaacaagagcgataacatcaagcccaagagtgccccatggaacagtttcctcccaccaccccctccaatgcctggacctcggttaggaccaggaaaaccaggtctcaagtttaacggccctccacctccaccccctcccccaccaccccatttgttatcatgctggctgcctcccttcccatcaggaccccctatcatcccgccacccccacctatctgccctgatagcctggacgatgccgacgccctcggatcaatgctcataagttggtatatgagcggctatcacacaggatattacatggaaatgttagcatag

SEQ ID NO: 213512 - DNA, 849 bp, Artificial Sequence
  derived and/or modified sequence
atggccatgtcttctggagggtccggtggcggtgtgcccgagcaggaggatagcgtcctatttcggagggggactggacagagtgacgatagtgacatatgggatgacacagctctgataaaagcttatgacaaagctgtggcatctttcaagcatgcattgaaaaacggggacatctgcgaaacctctgggaagcccaaaaccacacccaagcgcaagcccgcaaaaaaaaacaaatctcagaagaagaacaccgccgcaagcctccagcaatggaaagtcggcgataaatgtagcgcgatctggtcagaagatgggtgcatatacccagccaccattgcctcaattgacttcaagagagaaacatgtgtggtggtgtatacagggtacggcaatcgagaagaacaaaacctgtctgacttattgagcccaatatgtgaggtggcaaacaatattgaacaaaacgctcaggagaacgagaacgaaagtcaagtttcaactgacgagagcgagaactcccggagccccggtaacaaatcagacaacattaagcccaagagcgcgccatggaactccttcctgccccctccccctccaatgcctggcccacgcctaggccctgggaaacctgggttgaaatttaatggccctccccctcccccacctccaccgcctccacacctgctgtcgtgctggctccctccattcccctctggacctccaattatccctccccctccaccgatctgtcccgacagcctagatgatgccgatgctctcgggagcatgttaatctcttggtatatgtcaggctatcataccggatattatatggagatgctcgcgtag

SEQ ID NO: 213513 - DNA, 1445 bp, Artificial Sequence
  derived and/or modified sequence
gggtttgctatggcgatgagcagcggcggcagtggtggcggcgtcccggagcaggaggattccgtgctgttccggcgcggcacaggccagagcgatgattctgacatttgggatgatacagcactgataaaagcatatgataaagctgtggcttcatttaagcatgctctaaagaatggtgacatttgtgaaacttcgggtaaaccaaaaaccacacctaaaagaaaacctgctaagaagaataaaagccaaaagaagaatactgcagcttccttacaacagtggaaagttggggacaaatgttctgccatttggtcagaagacggttgcatttacccagctaccattgcttcaattgattttaagagagaaacctgtgttgtggtttacactggatatggaaatagagaggagcaaaatctgtccgatctactttccccaatctgtgaagtagctaataatatagaacaaaatgctcaagagaatgaaaatgaaagccaagtttcaacagatgaaagtgagaactccaggtctcctggaaataaatcagataacatcaagcccaaatctgctccatggaactcttttctccctccaccaccccccatgccagggccaagactgggaccaggaaagccaggtctaaaattcaatggcccaccaccgccaccgccaccaccaccaccccacttactatcatgctggctgcctccatttccttctggaccaccaataattcccccaccacctcccatatgtccagattctcttgatgatgctgatgctttgggaagtatgttaatttcatggtacatgagtggctatcatactggctattatatggaaatgctggcatagagcagcactaaatgacaccactaaagaaacgatcagacagatctggaatgtgaagcgttatagaagataactggcctcatttcttcaaaatatcaagtgttgggaaagaaaaaaggaagtggaatgggtaactcttcttgattaaaagttatgtaataaccaaatgcaatgtgaaatattttactggactctattttgaaaaaccatctgtaaaagactggggtgggggtgggaggccagcacggtggtgaggcagttgagaaaatttgaatgtggattagattttgaatgatattggataattattggtaattttatgagctgtgagaagggtgttgtagtttataaaagactgtcttaatttgcatacttaagcatttaggaatgaagtgttagagtgtcttaaaatgtttcaaatggtttaacaaaatgtatgtgaggcgtatgtggcaaaatgttacagaatctaactggtggacatggctgttcattgtactgtttttttctatcttctatatgtttaaaagtatataataaaaatatttaatttttttttaaattagctgtatctgtgattgtatttcttt

SEQ ID NO: 213514 - DNA, 1573 bp, Artificial Sequence
  derived and/or modified sequence
ccacaaatgtgggagggcgataaccactcgtagaaagcgtgagaagttactacaagcggtcctcccggccaccgtactgttccgctcccagaagccccgggcggcggaagtcgtcactcttaagaagggacggggccccacgctgcgcacccgcgggtttgctatggcgatgagcagcggcggcagtggtggcggcgtcccggagcaggaggattccgtgctgttccggcgcggcacaggccagagcgatgattctgacatttgggatgatacagcactgataaaagcatatgataaagctgtggcttcatttaagcatgctctaaagaatggtgacatttgtgaaacttcgggtaaaccaaaaaccacacctaaaagaaaacctgctaagaagaataaaagccaaaagaagaatactgcagcttccttacaacagtggaaagttggggacaaatgttctgccatttggtcagaagacggttgcatttacccagctaccattgcttcaattgattttaagagagaaacctgtgttgtggtttacactggatatggaaatagagaggagcaaaatctgtccgatctactttccccaatctgtgaagtagctaataatatagaacaaaatgctcaagagaatgaaaatgaaagccaagtttcaacagatgaaagtgagaactccaggtctcctggaaataaatcagataacatcaagcccaaatctgctccatggaactcttttctccctccaccaccccccatgccagggccaagactgggaccaggaaagccaggtctaaaattcaatggcccaccaccgccaccgccaccaccaccaccccacttactatcatgctggctgcctccatttccttctggaccaccaataattcccccaccacctcccatatgtccagattctcttgatgatgctgatgctttgggaagtatgttaatttcatggtacatgagtggctatcatactggctattatatggaaatgctggcatagagcagcactaaatgacaccactaaagaaacgatcagacagatctggaatgtgaagcgttatagaagataactggcctcatttcttcaaaatatcaagtgttgggaaagaaaaaaggaagtggaatgggtaactcttcttgattaaaagttatgtaataaccaaatgcaatgtgaaatattttactggactctattttgaaaaaccatctgtaaaagactgaggtgggggtgggaggccagcacggtggtgaggcagttgagaaaatttgaatgtggattagattttgaatgatattggataattattggtaattttatgagctgtgagaagggtgttgtagtttataaaagactgtcttaatttgcatacttaagcatttaggaatgaagtgttagagtgtcttaaaatgtttcaaatggtttaacaaaatgtatgtgaggcgtatgtggcaaaatgttacagaatctaactggtggacatggctgttcattgtactgtttttttctatcttctatatgtttaaaagtatataataaaaatatttaatttttttttaaatt

SEQ ID NO: 213515 - DNA, 846 bp, Artificial Sequence
  derived and/or modified sequence
atggccatgagcagcggcggcagcggcggcggcgtgcccgagcaggaggacagcgtgctgttccgccgcggcaccggccagagcgacgacagcgacatctgggacgacaccgccctgatcaaggcctacgacaaggccgtggccagcttcaagcacgccctgaagaacggcgacatctgcgagaccagcggcaagcccaagaccacccccaagcgcaagcccgccaagaagaacaagagccagaagaagaacaccgccgccagcctgcagcagtggaaggtgggcgacaagtgcagcgccatctggagcgaggacggctgcatctaccccgccaccatcgccagcatcgacttcaagcgcgagacctgcgtggtggtgtacaccggctacggcaaccgcgaggagcagaacctgagcgacctgctgagccccatctgcgaggtggccaacaacatcgagcagaacgcccaggagaacgagaacgagagccaggtgagcaccgacgagagcgagaacagccgcagccccggcaacaagagcgacaacatcaagcccaagagcgccccctggaacagcttcctgcccccccccccccccatgcccggcccccgcctgggccccggcaagcccggcctgaagttcaacggccccccccccccccccccccccccccccccccacctgctgagctgctggctgccccccttccccagcggcccccccatcatccccccccccccccccatctgccccgacagcctggacgacgccgacgccctgggcagcatgctgatcagctggtacatgagcggctaccacaccggctactacatggagatgctggcc

SEQ ID NO: 213516 - protein, 262 aa, Artificial Sequence
  derived and/or modified sequence
MAMSSGGSGGGVPEQEDSVLFRRGTGQSDDSDIWDDTALIKAYDKAVASFKHALKNGDICETSGKPKTTPKRKPAKKNKSQKKNTAASLQQWKVGDKCSAIWSEDGCIYPATIASIDFKRETCVVVYTGYGNREEQNLSDLLSPICEVANNIEQNAQENENESQVSTDESENSRSPGNKSDNIKPKSAPWNSFLPPPPPMPGPRLGPGKIIPPPPPICPDSLDDADALGSMLISWYMSGYHTGYYMGFRQNQKEGRCSHSLN

SEQ ID NO: 213517 - DNA, 789 bp, Artificial Sequence
  derived and/or modified sequence
atggccatgagcagcggcggcagcggcggcggcgtgcccgagcaggaggacagcgtgctgttcagaagaggcaccggccagagcgacgacagcgacatctgggacgacaccgccctgatcaaggcctacgacaaggccgtggccagcttcaagcacgccctgaagaacggcgacatctgcgagaccagcggcaagcccaagaccacccccaagagaaagcccgccaagaagaacaagagccagaagaagaacaccgccgccagcctgcagcagtggaaggtgggcgacaagtgcagcgccatctggagcgaggacggctgcatctaccccgccaccatcgccagcatcgacttcaagagagagacctgcgtggtggtgtacaccggctacggcaacagagaggagcagaacctgagcgacctgctgagccccatctgcgaggtggccaacaacatcgagcagaacgcccaggagaacgagaacgagagccaggtgagcaccgacgagagcgagaacagcagaagccccggcaacaagagcgacaacatcaagcccaagagcgccccctggaacagcttcctgcccccccccccccccatgcccggccccagactgggccccggcaagatcatccccccccccccccccatctgccccgacagcctggacgacgccgacgccctgggcagcatgctgatcagctggtacatgagcggctaccacaccggctactacatgggcttcagacagaaccagaaggagggcagatgcagccacagcctgaactag

SEQ ID NO: 213518 - DNA, 789 bp, Artificial Sequence
  derived and/or modified sequence
atggccatgtcctcgggcggctccgggggtggtgtgcccgagcaggaggatagcgtactgttcagacgcggcactggccagagtgacgacagtgacatctgggatgataccgcgctgatcaaagcatacgataaggcagtggcctccttcaaacatgctctgaaaaatggcgacatatgcgagacaagtgggaaaccgaaaaccacaccaaaaagaaaacccgcgaagaagaataaaagccaaaaaaagaataccgcagcctcactccagcaatggaaggtcggagataaatgctccgcaatttggagtgaggatggatgtatctatcctgctaccattgcctcaatagattttaaacgggagacctgtgtcgtagtctacactgggtacgggaaccgcgaggaacagaacctctccgacctgctgtcccccatttgtgaggtggctaataacatcgaacagaatgctcaggagaacgagaatgagtcccaggtctcaacggacgaatccgaaaattcacggtcccccggtaataaatccgacaatatcaagcccaagagcgctccctggaactccttcctgccgcccccgccgcctatgccagggcctaggctcgggcccgggaagataatacctccaccccccccaatatgccccgatagccttgacgacgctgatgcactgggaagtatgctcatatcttggtatatgtccggttaccataccggatactacatgggcttccggcagaatcaaaaagagggccggtgctcccattccctcaactag

SEQ ID NO: 213519 - DNA, 789 bp, Artificial Sequence
  derived and/or modified sequence
atggccatgtcctcaggtggatcaggagggggcgtccctgaacaggaggatagcgtcctgttcagacggggtactgggcagtctgacgactcagatatatgggatgacacagctctcatcaaagcctacgataaggcggtggcttccttcaaacatgctttaaaaaacggtgacatctgtgaaacctcaggaaaacctaagaccaccccgaagcgtaaaccagccaagaagaacaaatcccagaaaaaaaataccgcagccagccttcagcagtggaaggtaggtgataagtgttccgccatttggtctgaagacggatgtatttatcctgcaaccatcgcttctatcgatttcaaaagggaaacgtgcgtcgtcgtgtataccggctacgggaatcgcgaagaacaaaacctgagtgatctgctgtcaccaatctgcgaagtggcaaataacatcgaacagaacgctcaggagaatgagaatgagtcccaggttagtaccgacgagtcagagaactcccggtcacccggcaacaagtcggacaatatcaaaccaaagagtgccccctggaatagttttttgcctccaccacctcccatgcccgggccacggctgggccctggtaagataattcctccacctcctcccatctgtcccgactctctggatgacgcagatgccctggggtccatgctcatttcctggtatatgagcggataccacactggatactatatgggctttaggcaaaaccagaaggaggggcggtgcagtcactcactcaactag

SEQ ID NO: 213520 - DNA, 789 bp, Artificial Sequence
  derived and/or modified sequence
atggcaatgagctccggcggatcaggtgggggtgttccagagcaggaggactccgtactgttcaggcgcggaacaggacagagcgatgattcagatatatgggacgacacagccttgataaaggcatatgataaggccgtagccagtttcaagcatgctcttaagaacggcgacatctgcgagacaagtgggaaaccaaagacgaccccgaagagaaagcccgctaagaagaataaaagtcagaaaaagaacaccgccgctagccttcagcagtggaaggtgggtgataaatgctccgctatttggtctgaagacggatgcatatatcccgctactattgcctcaattgacttcaagcgggagacctgtgtggtggtgtatacaggctatggaaatagagaggagcagaatctaagcgacctgctgtctccaatttgcgaggtggcaaataacatcgaacagaatgcccaggagaatgaaaatgaaagccaggtaagcacggatgagagcgagaatagccgaagccccggcaataagtcggacaacattaaacctaagagcgccccttggaatagctttctgccccctcctccaccaatgcctggtccacgtctgggccccgggaaaattattcccccgcctccacccatttgccctgacagccttgatgatgctgacgcactcggctccatgctgatctcatggtacatgtcaggctaccacactgggtactacatggggttccgtcaaaatcaaaaggaggggcgatgttcacattccttgaattag

SEQ ID NO: 213521 - DNA, 789 bp, Artificial Sequence
  derived and/or modified sequence
atggccatgagcagcggcggcagcggcggcggcgtgcctgagcaggaggacagcgtgctcttccggcggggcaccggccagagtgatgacagcgacatctgggatgacacagccctgatcaaggcctatgacaaggctgtggccagcttcaagcacgccctgaagaatggagacatctgtgagaccagcggcaagcccaagaccacccccaagaggaagccagccaagaagaacaagagccagaagaagaacacagctgccagcctgcagcagtggaaggtgggggacaagtgcagcgccatctggagcgaagatggctgcatctacccagccaccatcgccagcattgacttcaagcgggagacctgtgtggtggtgtacacaggctacggcaaccgggaggagcagaacctgagtgacctgctgagccccatctgtgaggtggccaacaacatcgagcagaatgcccaggagaatgaaaatgaaagccaggtgtccacagatgaaagtgagaacagccgcagccctggcaacaagagtgacaacatcaagcccaagagcgccccctggaacagcttcctgcccccacctccacccatgcctggcccccggctgggccctgggaagatcatccccccacctccacccatctgcccagacagcctggatgatgctgatgccctgggctccatgctgatctcctggtacatgagcggctaccacacaggctactacatgggcttccggcagaaccagaaggagggccgctgcagccacagcctgaactag

SEQ ID NO: 213522 - DNA, 789 bp, Artificial Sequence
  derived and/or modified sequence
atggccatgagcagcggcggcagcggcggcggcgtgcccgagcaggaagatagcgtgctttttcggagaggcacgggccagtccgacgactctgacatttgggacgacaccgccctgatcaaagcatacgataaggccgttgccagtttcaagcatgccctgaaaaatggcgatatctgtgagacctccggcaagccaaagactacccccaagcgtaagccagcgaagaagaacaagtcccagaagaagaacacagccgcatccctgcagcaatggaaagtcggggacaaatgttccgcgatttggagcgaagacgggtgcatatatccagccaccatcgcttcaatcgattttaagagagaaacctgcgtggttgtttataccggttacggtaatcgggaggaacagaatctgtcagacctcctaagtccaatttgcgaggtcgctaataatatcgaacaaaacgcccaggaaaacgagaacgaatcccaagttagcaccgacgaatcagagaactcccgaagccctggcaataagtctgacaatattaagccgaagagtgccccctggaacagcttcctgcctccgcctcctccaatgcctggtccgcgtctgggtcctgggaagatcattccccctcccccacccatttgtcctgattccctggatgacgctgatgcactcggatccatgctcatctcctggtacatgtccggttatcatacggggtattatatgggcttcaggcagaaccagaaggagggcagatgtagtcattccctcaactag

SEQ ID NO: 213523 - DNA, 789 bp, Artificial Sequence
  derived and/or modified sequence
atggccatgagcagcggcggcagcggcggcggcgtgcccgagcaggaagactccgtgttgtttcggcggggaacgggccaatccgatgattccgatatctgggacgatacagctctgatcaaagcgtatgataaagccgtagcctcctttaaacacgcgctcaagaatggggatatctgcgagaccagcggcaagcccaagaccacgcccaagaggaaacctgccaaaaagaacaagtcacagaagaagaacaccgcggcctcactgcagcagtggaaggtgggcgacaaatgctccgctatttggtctgaggacggatgcatttaccccgctactatagcgagcattgatttcaagcgggaaacctgtgtggtagtgtacacagggtatggaaatagagaagaacagaatctctccgatctcctgtcccctatctgcgaggtcgcaaacaacatcgaacaaaacgctcaggaaaacgaaaacgagagccaggtgtcaaccgacgagtctgaaaattcccgtagtccagggaataagtctgataatataaagccaaaaagcgccccctggaattcatttcttccaccaccgccacccatgccaggaccccggttgggaccgggaaagattattcctccgcctccacccatctgccccgactcactagatgatgccgatgctctggggagcatgctgatttcttggtatatgtccggataccatacgggttactacatgggctttcgccagaaccagaaagagggccgttgtagccacagtctgaactag

SEQ ID NO: 213524 - DNA, 789 bp, Artificial Sequence
  derived and/or modified sequence
atggccatgagcagcggcggcagcggcggcggcgtgcccgagcaggaggacagcgtactctttcggaggggtacaggccagtccgatgattccgacatctgggatgacacggcacttattaaagcatacgacaaagctgtagctagcttcaagcatgccctgaagaatggcgacatttgtgaaacatctggtaaacccaagaccacccccaagcgaaagcccgcgaagaaaaacaaatcccaaaagaagaataccgccgcttctttgcaacagtggaaggtcggggacaaatgtagcgccatctggagcgaggatgggtgtatctatcctgctaccattgcaagcatcgattttaagagggaaacttgcgtggtggtgtacactggctatggcaatcgggaggagcaaaatctgtctgacctcctgagccctatctgtgaggtggccaataatatcgaacaaaacgctcaggagaacgaaaatgagtcccaagtctccaccgatgagtcagagaacagccgttctccaggaaacaaatccgacaacatcaagccaaaatcagctccgtggaactcattcctccctcccccacccccaatgccaggccctagactcggccccgggaagatcatcccacctcccccgccaatttgcccggacagcctggacgatgctgacgcactcggaagcatgttaatctcttggtacatgtcaggataccataccggctactatatgggctttagacagaaccaaaaagagggaagatgcagccattcgctgaattag

SEQ ID NO: 213525 - DNA, 789 bp, Artificial Sequence
  derived and/or modified sequence
atggccatgagctccggcggatccggaggcggagttcctgagcaggaagattccgtcttattccgcagagggactggtcagagcgacgactccgatatttgggacgataccgcgcttattaaggcctatgacaaggctgtcgcaagcttcaaacatgcccttaagaacggggatatctgtgagacgtccggaaagcccaaaactactccaaaaaggaagcctgctaaaaaaaacaagtcccaaaagaagaacacagctgccagcctccaacaatggaaagtgggagacaagtgctccgctatctggagcgaggacggctgtatctacccagcgacaattgcttctatcgattttaaaagagagacgtgtgtagtggtgtataccggttacggtaacagagaggagcagaaccttagcgacctgttgagtcccatttgcgaggtcgcaaataacattgagcagaatgcgcaagagaacgaaaatgagtcgcaagttagtactgacgaatcagaaaacagccggagcccaggcaacaagagcgacaatatcaaacccaagtctgccccatggaactccttcctgccaccaccccctcctatgcccggacccaggctgggccctgggaagattatcccccctccccctccgatctgtccggattctctcgacgatgccgatgctctaggcagcatgctcatcagttggtatatgagcggatatcacaccggatactatatggggttccgtcagaaccaaaaggagggacggtgctcacactctctcaattag

SEQ ID NO: 213526 - DNA, 789 bp, Artificial Sequence
  derived and/or modified sequence
atggccatgtcctcgggaggctccggtggtggcgtgcccgaacaggaggactctgtgctgttccgccgaggcaccggtcaaagtgacgatagcgacatttgggacgataccgcactcatcaaagcatatgataaagccgtcgccagcttcaagcatgctttgaaaaacggcgacatttgtgagacgagcgggaagccaaagaccacccctaaaaggaagcccgcaaaaaaaaataagtcacaaaagaagaatacagccgcttcccttcaacaatggaaggtgggggataagtgttccgccatttggtctgaagacgggtgcatttaccccgctactatcgcctccattgattttaaaagggaaacgtgcgtcgtggtgtacaccggatatgggaacagagaggagcagaatctcagcgatctgctgagcccaatttgcgaagtcgccaacaacatagagcagaacgcgcaggagaatgaaaatgagtcccaggttagcacggatgagagtgagaactccagatctcctggaaataaaagtgacaatatcaagcccaaaagtgctccctggaactcgtttctgccacctcctcctcctatgcctggcccacgcctcggacccggaaaaatcattcctcctcctcctcccatatgtccggactctctggacgatgccgatgcattgggcagcatgctgatctcctggtatatgagcggctatcatactggttattacatgggcttcaggcaaaatcaaaaggagggaagatgctcccacagtttgaactag

SEQ ID NO: 213527 - DNA, 789 bp, Artificial Sequence
  derived and/or modified sequence
atggccatgtcatctggcggatctgggggtggtgtgcccgagcaagaggatagtgtcttgtttcggagagggacaggccagagtgacgactcagatatttgggatgacacagctctcattaaggcttacgataaggcagtcgcaagcttcaaacatgctcttaagaacggcgacatctgtgaaacgagcggtaaacccaagaccactcctaaaaggaagccagctaagaagaataagtctcagaagaagaatacagctgccagtctgcagcagtggaaggtgggggacaaatgcagtgctatctggagcgaggatggctgtatctacccagccaccattgcttccattgacttcaaacgggagacctgcgtagtggtgtataccgggtatgggaaccgcgaggaacagaatttgtcggatctgttgtctcctatttgcgaagtggcgaacaacattgagcagaatgcccaggagaacgaaaatgagtcacaagtgtccacagatgaaagcgagaactcccgcagccccggtaataagtctgacaacatcaagccaaaatctgccccttggaactccttcttgcccccaccgccaccaatgcctggacccagactgggtcctggtaagatcatccccccaccgccacccatctgccctgattccttagacgacgccgatgccctcgggagtatgctgatctcctggtatatgagtggatatcacactggttactacatgggattcaggcaaaaccagaaagaaggtcgctgttcccattcactgaattag

SEQ ID NO: 213528 - DNA, 1531 bp, Artificial Sequence
  derived and/or modified sequence
ccacaaatgtgggagggcgataaccactcgtagaaagcgtgagaagttactacaagcggtcctcccggccaccgtactgttccgctcccagaagccccgggcggcggaagtcgtcactcttaagaagggacggggccccacgctgcgcacccgcgggtttgctatggcgatgagcagcggcggcagtggtggcggcgtcccggagcaggaggattccgtgctgttccggcgcggcacaggccagagcgatgattctgacatttgggatgatacagcactgataaaagcatatgataaagctgtggcttcatttaagcatgctctaaagaatggtgacatttgtgaaacttcgggtaaaccaaaaaccacacctaaaagaaaacctgctaagaagaataaaagccaaaagaagaatactgcagcttccttacaacagtggaaagttggggacaaatgttctgccatttggtcagaagacggttgcatttacccagctaccattgcttcaattgattttaagagagaaacctgtgttgtggtttacactggatatggaaatagagaggagcaaaatctgtccgatctactttccccaatctgtgaagtagctaataatatagaacaaaatgctcaagagaatgaaaatgaaagccaagtttcaacagatgaaagtgagaactccaggtctcctggaaataaatcagataacatcaagcccaaatctgctccatggaactcttttctccctccaccaccccccatgccagggccaagactgggaccaggaaagataattcccccaccacctcccatatgtccagattctcttgatgatgctgatgctttgggaagtatgttaatttcatggtacatgagtggctatcatactggctattatatgggtttcagacaaaatcaaaaagaaggaaggtgctcacattccttaaattaaggagaaatgctggcatagagcagcactaaatgacaccactaaagaaacgatcagacagatctggaatgtgaagcgttatagaagataactggcctcatttcttcaaaatatcaagtgttgggaaagaaaaaaggaagtggaatgggtaactcttcttgattaaaagttatgtaataaccaaatgcaatgtgaaatattttactggactctattttgaaaaaccatctgtaaaagactggggtgggggtgggaggccagcacggtggtgaggcagttgagaaaatttgaatgtggattagattttgaatgatattggataattattggtaattttatgagctgtgagaagggtgttgtagtttataaaagactgtcttaatttgcatacttaagcatttaggaatgaagtgttagagtgtcttaaaatgtttcaaatggtttaacaaaatgtatgtgaggcgtatgtggcaaaatgttacagaatctaactggtggacatggctgttcattgtactgtttttttctatcttctatatgtttaaaagtatataataaaaatatttaatttttttttaaatt

SEQ ID NO: 213529 - DNA, 1219 bp, Artificial Sequence
  derived and/or modified sequence
agaagccccgggcggcggaagtcgtcactcttaagaagggacggggccccacgctgcgcacccgcgggtttgctatggcgatgagcagcggcggcagtggtggcggcgtcccggagcaggaggattccgtgctgttccggcgcggcacaggccagagcgatgattctgacatttgggatgatacagcactgataaaagcatatgataaagctgtggcttcatttaagcatgctctaaagaatggtgacatttgtgaaacttcgggtaaaccaaaaaccacacctaaaagaaaacctgctaagaagaataaaagccaaaagaagaatactgcagcttccttacaacagtggaaagttggggacaaatgttctgccatttggtcagaagacggttgcatttacccagctaccattgcttcaattgattttaagagagaaacctgtgttgtggtttacactggatatggaaatagagaggagcaaaatctgtccgatctactttccccaatctgtgaagtagctaataatatagaacaaaatgctcaagagaatgaaaatgaaagccaagtttcaacagatgaaagtgagaactccaggtctcctggaaataaatcagataacatcaagcccaaatctgctccatggaactcttttctccctccaccaccccccatgccagggccaagactgggaccaggaaagataattcccccaccacctcccatatgtccagattctcttgatgatgctgatgctttgggaagtatgttaatttcatggtacatgagtggctatcatactggctattatatgggtttcagacaaaatcaaaaagaaggaaggtgctcacattccttaaattaaggagtaagtctgccagcattatgaaagtgaatcttacttttgtaaaactttatggtttgtggaaaacaaatgtttttgaacatttaaaaagttcagatgttaaaaagttgaaaggttaatgtaaaacaatcaatattaaagaattttgatgccaaaactattagataaaaggttaatctacatccctactagaattctcatacttaactggttggttatgtggaagaaacatactttcacaataaagagctttaggatatgatgccattttatatcactagtaggcagaccagcagacttttttttattgtgatatgggataacctaggcatactgcactgtacactctgacatat

SEQ ID NO: 213530 - DNA, 1388 bp, Artificial Sequence
  derived and/or modified sequence
gctgcgcacccgcgggtttgctatggcgatgagcagcggcggcagtggtggcggcgtcccggagcaggaggattccgtgctgttccggcgcggcacaggccagagcgatgattctgacatttgggatgatacagcactgataaaagcatatgataaagctgtggcttcatttaagcatgctctaaagaatggtgacatttgtgaaacttcgggtaaaccaaaaaccacacctaaaagaaaacctgctaagaagaataaaagccaaaagaagaatactgcagcttccttacaacagtggaaagttggggacaaatgttctgccatttggtcagaagacggttgcatttacccagctaccattgcttcaattgattttaagagagaaacctgtgttgtggtttacactggatatggaaatagagaggagcaaaatctgtccgatctactttccccaatctgtgaagtagctaataatatagaacaaaatgctcaagagaatgaaaatgaaagccaagtttcaacagatgaaagtgagaactccaggtctcctggaaataaatcagataacatcaagcccaaatctgctccatggaactcttttctccctccaccaccccccatgccagggccaagactgggaccaggaaagataattcccccaccacctcccatatgtccagattctcttgatgatgctgatgctttgggaagtatgttaatttcatggtacatgagtggctatcatactggctattatatgggttttagacaaaatcaaaaagaaggaaggtgctcacattccttaaattaaggagaaatgctggcatagagcagcactaaatgacaccactaaagaaacgatcagacagatctggaatgtgaagcgttatagaagataactggcctcatttcttcaaaatatcaagtgttgggaaagaaaaaaggaagtggaatgggtaactcttcttgattaaaagttatgtaataaccaaatgcaatgtgaaatattttactggactctattttgaaaaaccatctgtaaaagactgaggtgggggtgggaggccagcacggtggtgaggcagttgagaaaatttgaatgtggattagattttgaatgatattggataattattggtaattttatgagctgtgagaagggtgttgtagtttataaaagactgtcttaatttgcatacttaagcatttaggaatgaagtgttagagtgtcttaaaatgtttcaaatggtttaacaaaatgtatgtgaggcgtatgtggcaaaatgttacagaatctaactggtggacatggctgttcattgtactgtttttttctatcttctatatgtttaaaagtatataataaaaatatttaatttttttttaaa

SEQ ID NO: 213531 - DNA, 786 bp, Artificial Sequence
  derived and/or modified sequence
atggccatgagcagcggcggcagcggcggcggcgtgcccgagcaggaggacagcgtgctgttccgccgcggcaccggccagagcgacgacagcgacatctgggacgacaccgccctgatcaaggcctacgacaaggccgtggccagcttcaagcacgccctgaagaacggcgacatctgcgagaccagcggcaagcccaagaccacccccaagcgcaagcccgccaagaagaacaagagccagaagaagaacaccgccgccagcctgcagcagtggaaggtgggcgacaagtgcagcgccatctggagcgaggacggctgcatctaccccgccaccatcgccagcatcgacttcaagcgcgagacctgcgtggtggtgtacaccggctacggcaaccgcgaggagcagaacctgagcgacctgctgagccccatctgcgaggtggccaacaacatcgagcagaacgcccaggagaacgagaacgagagccaggtgagcaccgacgagagcgagaacagccgcagccccggcaacaagagcgacaacatcaagcccaagagcgccccctggaacagcttcctgcccccccccccccccatgcccggcccccgcctgggccccggcaagatcatccccccccccccccccatctgccccgacagcctggacgacgccgacgccctgggcagcatgctgatcagctggtacatgagcggctaccacaccggctactacatgggcttccgccagaaccagaaggagggccgctgcagccacagcctgaac

SEQ ID NO: 213532 - protein, 1241 aa, Artificial Sequence
  derived and/or modified sequence
MPLHIGDFVWDSKVHSLQSSLNIFSLLPTKGRTEHLFFSHILSFHWPAFSSIRLELWINLRCEFLRSKKSSEEITQYIQSYKGFVDITGEHFVNSWVQRELPMASAYCNDSIFAYEELRLDSFKDWPRESAVGVAALAKAGLFYTGIKDIVQCFSCGGCLEKWQEGDDPLDDHTRCFPNCPFLQNMKSSAEVTPDLQSRGELCELLETTSESNLEDSIAVGPIVPEMAQGEAQWFQEAKNLNEQLRAAYTSASFRHMSLLDISSDLATDHLLGCDLSIASKHISKPVQEPLVLPEVFGNLNSVMCVEGEAGSGKTVLLKKIAFLWASGCCPLLNRFQLVFYLSLSSTRPDEGLASIICDQLLEKEGSVTEMCVRNIIQQLKNQVLFLLDDYKEICSIPQVIGKLIQKNHLSRTCLLIAVRTNRARDIRRYLETILEIKAFPFYNTVCILRKLFSHNMTRLRKFMVYFGKNQSLQKIQKTPLFVAAICAHWFQYPFDPSFDDVAVFKSYMERLSLRNKATAEILKATVSSCGELALKGFFSCCFEFNDDDLAEAGVDEDEDLTMCLMSKFTAQRLRPFYRFLSPAFQEFLAGMRLIELLDSDRQEHQDLGLYHLKQINSPMMTVSAYNNFLNYVSSLPSTKAGPKIVSHLLHLVDNKESLENISENDDYLKHQPEISLQMQLLRGLWQICPQAYFSMVSEHLLVLALKTAYQSNTVAACSPFVLQFLQGRTLTLGALNLQYFFDHPESLSLLRSIHFPIRGNKTSPRAHFSVLETCFDKSQVPTIDQDYASAFEPMNEWERNLAEKEDNVKSYMDMQRRASPDLSTGYWKLSPKQYKIPCLEVDVNDIDVVGQDMLEILMTVFSASQRIELHLNHSRGFIESIRPALELSKASVTKCSISKLELSAAEQELLLTLPSLESLEVSGTIQSQDQIFPNLDKFLCLKELSVDLEGNINVFSVIPEEFPNFHHMEKLLIQISAEYDPSKLVKLIQNSPNLHVFHLKCNFFSDFGSLMTMLVSCKKLTEIKFSDSFFQAVPFVASLPNFISLKILNLEGQQFPDEETSEKFAYILGSLSNLEELILPTGDGIYRVAKLIIQQCQQLHCLRVLSFFKTLNDDSVVEIAKVAISGGFQKLENLKLSINHKITEEGYRNFFQALDNMPNLQELDISRHFTECIKAQATTVKSLSQCVLRLPRLIRLNMLSWLLDADDIALLNVMKERHPQSKYLTILQKWILPFSPIIQK

SEQ ID NO: 213533 - DNA, 3726 bp, Artificial Sequence
  derived and/or modified sequence
atgcccctgcacatcggcgacttcgtgtgggacagcaaggtgcacagcctgcagagcagcctgaacatcttcagcctgctgcccaccaagggcagaaccgagcacctgttcttcagccacatcctgagcttccactggcccgccttcagcagcatcagactggagctgtggatcaacctgagatgcgagttcctgagaagcaagaagagcagcgaggagatcacccagtacatccagagctacaagggcttcgtggacatcaccggcgagcacttcgtgaacagctgggtgcagagagagctgcccatggccagcgcctactgcaacgacagcatcttcgcctacgaggagctgagactggacagcttcaaggactggcccagagagagcgccgtgggcgtggccgccctggccaaggccggcctgttctacaccggcatcaaggacatcgtgcagtgcttcagctgcggcggctgcctggagaagtggcaggagggcgacgaccccctggacgaccacaccagatgcttccccaactgccccttcctgcagaacatgaagagcagcgccgaggtgacccccgacctgcagagcagaggcgagctgtgcgagctgctggagaccaccagcgagagcaacctggaggacagcatcgccgtgggccccatcgtgcccgagatggcccagggcgaggcccagtggttccaggaggccaagaacctgaacgagcagctgagagccgcctacaccagcgccagcttcagacacatgagcctgctggacatcagcagcgacctggccaccgaccacctgctgggctgcgacctgagcatcgccagcaagcacatcagcaagcccgtgcaggagcccctggtgctgcccgaggtgttcggcaacctgaacagcgtgatgtgcgtggagggcgaggccggcagcggcaagaccgtgctgctgaagaagatcgccttcctgtgggccagcggctgctgccccctgctgaacagattccagctggtgttctacctgagcctgagcagcaccagacccgacgagggcctggccagcatcatctgcgaccagctgctggagaaggagggcagcgtgaccgagatgtgcgtgagaaacatcatccagcagctgaagaaccaggtgctgttcctgctggacgactacaaggagatctgcagcatcccccaggtgatcggcaagctgatccagaagaaccacctgagcagaacctgcctgctgatcgccgtgagaaccaacagagccagagacatcagaagatacctggagaccatcctggagatcaaggccttccccttctacaacaccgtgtgcatcctgagaaagctgttcagccacaacatgaccagactgagaaagttcatggtgtacttcggcaagaaccagagcctgcagaagatccagaagacccccctgttcgtggccgccatctgcgcccactggttccagtaccccttcgaccccagcttcgacgacgtggccgtgttcaagagctacatggagagactgagcctgagaaacaaggccaccgccgagatcctgaaggccaccgtgagcagctgcggcgagctggccctgaagggcttcttcagctgctgcttcgagttcaacgacgacgacctggccgaggccggcgtggacgaggacgaggacctgaccatgtgcctgatgagcaagttcaccgcccagagactgagacccttctacagattcctgagccccgccttccaggagttcctggccggcatgagactgatcgagctgctggacagcgacagacaggagcaccaggacctgggcctgtaccacctgaagcagatcaacagccccatgatgaccgtgagcgcctacaacaacttcctgaactacgtgagcagcctgcccagcaccaaggccggccccaagatcgtgagccacctgctgcacctggtggacaacaaggagagcctggagaacatcagcgagaacgacgactacctgaagcaccagcccgagatcagcctgcagatgcagctgctgagaggcctgtggcagatctgcccccaggcctacttcagcatggtgagcgagcacctgctggtgctggccctgaagaccgcctaccagagcaacaccgtggccgcctgcagccccttcgtgctgcagttcctgcagggcagaaccctgaccctgggcgccctgaacctgcagtacttcttcgaccaccccgagagcctgagcctgctgagaagcatccacttccccatcagaggcaacaagaccagccccagagcccacttcagcgtgctggagacctgcttcgacaagagccaggtgcccaccatcgaccaggactacgccagcgccttcgagcccatgaacgagtgggagagaaacctggccgagaaggaggacaacgtgaagagctacatggacatgcagagaagagccagccccgacctgagcaccggctactggaagctgagccccaagcagtacaagatcccctgcctggaggtggacgtgaacgacatcgacgtggtgggccaggacatgctggagatcctgatgaccgtgttcagcgccagccagagaatcgagctgcacctgaaccacagcagaggcttcatcgagagcatcagacccgccctggagctgagcaaggccagcgtgaccaagtgcagcatcagcaagctggagctgagcgccgccgagcaggagctgctgctgaccctgcccagcctggagagcctggaggtgagcggcaccatccagagccaggaccagatcttccccaacctggacaagttcctgtgcctgaaggagctgagcgtggacctggagggcaacatcaacgtgttcagcgtgatccccgaggagttccccaacttccaccacatggagaagctgctgatccagatcagcgccgagtacgaccccagcaagctggtgaagctgatccagaacagccccaacctgcacgtgttccacctgaagtgcaacttcttcagcgacttcggcagcctgatgaccatgctggtgagctgcaagaagctgaccgagatcaagttcagcgacagcttcttccaggccgtgcccttcgtggccagcctgcccaacttcatcagcctgaagatcctgaacctggagggccagcagttccccgacgaggagaccagcgagaagttcgcctacatcctgggcagcctgagcaacctggaggagctgatcctgcccaccggcgacggcatctacagagtggccaagctgatcatccagcagtgccagcagctgcactgcctgagagtgctgagcttcttcaagaccctgaacgacgacagcgtggtggagatcgccaaggtggccatcagcggcggcttccagaagctggagaacctgaagctgagcatcaaccacaagatcaccgaggagggctacagaaacttcttccaggccctggacaacatgcccaacctgcaggagctggacatcagcagacacttcaccgagtgcatcaaggcccaggccaccaccgtgaagagcctgagccagtgcgtgctgagactgcccagactgatcagactgaacatgctgagctggctgctggacgccgacgacatcgccctgctgaacgtgatgaaggagagacacccccagagcaagtacctgaccatcctgcagaagtggatcctgcccttcagccccatcatccagaagtag

SEQ ID NO: 213534 - DNA, 3726 bp, Artificial Sequence
  derived and/or modified sequence
atgcccctgcacattggggatttcgtgtgggatagtaaggtacactcgcttcaaagtagcctgaacatctttagcctgctgcccactaagggtagaaccgaacacctctttttcagtcatatcctcagttttcactggccagctttctcaagcattaggctggaactatggattaatctcaggtgtgagtttcttcgttcaaaaaaatcgtctgaggaaattacccagtatatacagtcatataagggcttcgtcgacatcactggggaacactttgtgaattcatgggtccagcgcgaactgcccatggcaagcgcttactgtaacgattcgatcttcgcttatgaagagctaaggctggatagcttcaaagactggccccgtgagagtgcggtcggggtagccgccctggcaaaagccgggctgttttacaccggtattaaggacatcgtgcaatgcttttcgtgtggaggatgtctcgagaaatggcaggaaggagatgaccccctagacgatcatacgaggtgcttccctaactgcccttttttacagaatatgaaatcttccgctgaggtgacgcccgatctgcagtcaaggggagagctgtgcgagctcctcgagaccacatcagagagtaacctcgaggactccattgctgtaggccccattgtgcctgaaatggcccagggagaggcccagtggttccaggaggcgaagaaccttaacgaacaactccgggctgcatacacttccgcgagctttcgacatatgtccctgcttgacatatccagcgacctcgccacagatcacctccttggctgcgacttgtccatcgcctccaaacatatctctaaacccgtgcaagaacccctggtgctccctgaagtgtttgggaaccttaactctgtgatgtgtgtagaaggtgaagccggtagcggcaagacagtgttgctgaagaaaatcgcatttctgtgggcctctggatgctgccccttgctcaataggttccagcttgtgttttacctctcgttgagttccactcgccccgatgaggggttggctagcattatctgcgatcaattactggagaaggaaggaagcgtgacagagatgtgtgtgcgtaacatcatacaacaactcaagaaccaagttctgttccttctcgatgactacaaagagatttgctccatcccccaggtaattggaaagctgatccagaagaaccacctgtcccgcacatgcctcctgatagcagtgcgcaccaatcgggcaagggatattaggcggtacctcgagaccatactcgagattaaagcctttcctttctacaacacggtatgcatcctgcggaagttattcagtcataacatgacaagactcagaaaattcatggtctacttcggaaaaaaccagtccttgcagaagatacagaagactccactattcgtagccgctatttgtgctcactggtttcagtatcccttcgacccgagtttcgacgatgtggccgtgttcaaaagctatatggagagactgtccctgcgaaataaggccacggccgaaatcctcaaagcaactgtgagctcctgcggggaactggcgctgaaagggtttttctcatgttgtttcgagtttaacgatgacgacttagccgaggccggcgtcgacgaggacgaggacctgaccatgtgtctcatgagtaagtttaccgctcagaggcttaggcctttctaccgattcctctcaccagctttccaggaattcttagctggaatgcgcctgatcgaactgctcgactcggaccggcaagagcaccaagacctgggtctgtaccacctgaagcaaattaacagcccaatgatgaccgtgagcgcatataacaactttctcaattacgtaagttccctccctagtacaaaggcaggccccaagattgtgtctcatctgctacacctggtcgacaacaaagagagcctagaaaatatatccgaaaacgacgattacctgaaacatcagcctgaaattagcctgcagatgcagttgttaaggggcctgtggcaaatctgtcctcaggcgtacttcagtatggttagcgagcaccttttggtcctcgccttgaagaccgcttaccagtctaatactgttgcggcttgcagcccattcgttctccagttcctccaggggcgaacattaactctgggcgccttaaatctccagtacttctttgatcacccagagtccctgtcgctgctcagatccattcacttccctatcagaggtaataagaccagcccgcgcgcccacttttcagtgctggaaacctgcttcgacaagtcacaggtcccaactatcgaccaggactacgcgtcagcgtttgaaccaatgaatgaatgggagcgcaatcttgccgaaaaggaagacaacgtgaaaagctatatggacatgcagcggcgcgcatctcccgacctcagcacaggatattggaagctgtcacccaagcaatacaagattccctgtttggaagtcgatgtcaatgacatcgacgtggttggtcaggacatgttagaaatactcatgacagtcttctctgcaagccagcgcatcgagttacatttgaatcactccagggggttcattgaaagcattcgccccgcactggagttatccaaggcatctgtgaccaagtgttcaatctccaaacttgaattatctgccgccgaacaagagctgctccttaccctgccttccctcgaatctctggaggtatctggaaccatccagtcccaagaccagatcttccctaatctcgataagttcctgtgcctgaaggagctgtccgtggatcttgagggcaacattaacgtatttagcgtcattccagaggagttcccgaactttcaccacatggagaagttactgatccaaatcagcgccgagtacgacccctcgaagctggtaaagttaatccaaaattcacctaacctgcacgtgttccatctcaagtgtaatttcttttcagattttggcagtctgatgaccatgctagtgtcttgcaagaaactgactgagattaagttcagcgactcctttttccaggcagtcccttttgtggcctcgctgccaaacttcataagcttaaagatactaaatctcgaggggcagcagttccctgacgaggagacttcagaaaagttcgcatatattttgggctctctgtcaaatttagaagaactgatactgccaacaggagatgggatttatcgggtggcaaaactgatcattcagcagtgccaacagctgcattgtcttagagtactttccttcttcaagactctgaatgacgattcagttgttgagattgcaaaggtggcgatttcaggaggtttccagaaacttgagaacctgaaattgtcgattaatcacaaaatcaccgaggaaggttatcggaatttctttcaggccctcgacaacatgccaaatttacaggagctggacataagtagacacttcacagaatgcataaaggctcaggctaccactgtgaagtccctctcccagtgcgtgcttagactgcctcgcctgatccggttgaacatgctttcctggctccttgacgccgacgacatcgcgttgctgaacgttatgaaggagcgccaccctcagtcaaagtacctgactatcttacaaaagtggatactgcccttcagccccattattcagaagtag

SEQ ID NO: 213535 - DNA, 3726 bp, Artificial Sequence
  derived and/or modified sequence
atgcctcttcacatcggagacttcgtctgggactctaaggttcactcactacagtcctcgctcaatatcttcagcctgttgcccactaagggtaggacagagcacttgttcttcagccatattctgtccttccattggcctgctttctcaagtatccgcctggagctatggattaacctgcgttgtgaatttctccgttccaagaagagctccgaagagatcacccagtacatccagtcttataagggattcgtggacataactggggagcacttcgtgaactcttgggtgcagagggaattgcctatggcttctgcttactgcaacgactctatcttcgcttatgaggagttaagactggacagttttaaagactggccccgggaatccgccgtgggtgtcgccgccctggctaaggctgggctgttctacacggggattaaggacatcgtccaatgttttagctgtggagggtgccttgagaagtggcaagaaggcgacgaccccttggatgatcacactaggtgctttcctaattgtccatttctgcagaatatgaaatcatccgcagaagtcacaccagacttgcagagccgcggagaactatgtgagctcctcgagactacttccgaatctaacctagaggactcaatcgccgtgggtcccatcgtgccagaaatggctcagggcgaagcacaatggttccaagaagccaaaaatctcaacgagcaattaagagctgcttacaccagcgctagcttccggcatatgagccttttggatatatcaagcgatctggcaacagatcatctacttggctgtgatctttcgatagcgtcgaagcacatcagtaagcctgttcaagaacctcttgtcctccccgaagtgtttggaaacctgaattcagtgatgtgcgttgagggcgaagccgggagcggcaagacagttctgcttaagaagatagccttcctgtgggctagcggatgctgtccgctgcttaataggttccaactcgtgttttatctgtccttatctagcaccaggcccgacgagggactggccagcattatctgcgaccagttgctggaaaaggagggctccgtgacggaaatgtgtgtgcgtaatataattcagcaactaaaaaatcaggtactcttcctattggatgattataaagaaatttgcagcattccccaggtcatcggaaagcttatccagaagaaccatcttagtcgcacttgcctgttaattgccgtacggacaaacagagcccgagacatccggcgatatctcgagactatactggagattaaggcctttcctttttataacacggtgtgcatccttcgtaaactattcagccataacatgacgaggctacggaagttcatggtctattttgggaaaaatcaatcccttcaaaaaatccagaagactcctctgtttgttgccgctatctgcgcacactggttccagtatccctttgacccgtcattcgacgacgtggctgttttcaaaagttacatggaaagactctctttgcggaacaaagctaccgccgagattctcaaggccaccgtgtcaagctgtggcgagctggcgctaaagggattcttcagctgctgtttcgagttcaacgatgatgacctcgccgaagcaggcgtcgacgaagatgaagacctgactatgtgcttgatgagcaaattcaccgctcaacggctcagacccttctaccgatttctctctcccgctttccaggagtttttggccgggatgcgcctgatcgagctgcttgactctgaccggcaggaacatcaagatctgggtctttatcacctgaaacagattaacagccctatgatgacagtcagtgcctataataatttcctcaactatgtctcctcattgcctagcactaaggcaggcccaaaaattgttagtcatttgttgcacctggttgataataaagaaagtctcgagaacatttccgagaatgacgattatcttaagcaccagccagaaatttctcttcagatgcagctgcttcggggactttggcagatctgtccgcaggcttacttcagtatggtgtccgagcacttgctggtattagcactcaaaacagcctatcagagtaatacagttgctgcatgctccccgttcgttctgcagtttctccaggggcgtactctaacattaggggctctgaaccttcaatacttttttgatcatccggagtctctgtctctgttgcggtccattcactttcctattcgcggcaacaagacttcacctagggcacatttttccgtgcttgagacatgtttcgacaagagccaggtgcctacaatagatcaggattatgcctcggcctttgagcccatgaatgaatgggagagaaatctggccgagaaggaggacaatgttaagtcctatatggacatgcagaggcgggcaagtcccgacctgtccacaggttactggaagctgtctcctaagcagtacaagatcccatgtttggaggttgatgtcaacgacatcgatgtcgtgggacaggacatgctcgagatcctgatgacggttttctcggcatctcagagaatcgaactccatctcaatcactctcggggctttattgaatccatacgccccgccttagaactgtccaaagcctctgttacaaagtgtagcatctcaaaactggaattaagtgccgctgaacaggagctcttactcacgctgccttctctagagtcactggaggtgagcggaacaattcaaagccaagaccaaatatttcccaatcttgataaattcctctgcttgaaagaacttagcgtggacctcgaaggcaatataaatgtgttttcagttattcctgaggaatttcccaattttcatcacatggagaagttgctgatccagattagcgctgagtacgacccgtccaaactggttaagctgatacagaattccccgaatctgcacgtctttcatttaaaatgtaactttttctccgacttcggctctcttatgaccatgttggtgagctgcaaaaaactgactgaaattaaattcagtgactccttcttccaggctgtaccattcgttgcttctctgccgaacttcatttcactcaaaatactgaacctggaaggacagcagttcccagacgaggagacttccgagaagttcgcttacatcctcgggtcactgtcaaatcttgaggagttaatcctcccgacaggagatggaatttaccgggtcgccaaactgataatccagcaatgccagcaactgcattgcttgcgtgtgctcagtttctttaaaacgctgaacgacgacagtgttgtagaaattgcgaaagtcgctattagtggcggctttcagaagcttgagaaccttaagctctcgattaatcataaaataaccgaagagggttaccgcaatttcttccaggcccttgacaacatgccaaacctgcaagagcttgacatttcgaggcacttcacggaatgcatcaaggctcaggcaactaccgtcaaaagtttgagccagtgtgtcttgaggctgcccagacttatccggcttaatatgctctcttggctgctagatgctgatgatattgcactgctgaacgtgatgaaggagagacatcctcagagcaaatacctgacaatcttgcagaagtggattttgccattttcccctatcattcaaaagtag

SEQ ID NO: 213536 - DNA, 3726 bp, Artificial Sequence
  derived and/or modified sequence
atgcccctgcacatcggggactttgtgtgggacagcaaggtgcacagcctgcagagcagcctgaacatcttcagcctgctgcccaccaagggccgcacagagcacctgttcttcagccacatcctgtccttccactggccagccttcagcagcatccggctggagctgtggatcaacctgcgctgtgagttcctgcggagcaagaagagcagcgaggagatcacccagtacatccagagctacaagggctttgtggacatcaccggggagcactttgtgaacagctgggtgcagcgggagctgcccatggccagcgcctactgcaatgacagcatctttgcctatgaggagctgcggctggacagcttcaaggactggccccgggagagcgctgtgggcgtggccgccctggccaaggccggcctcttctacacaggcatcaaggacatcgtgcagtgcttcagctgtggcggctgcctggagaagtggcaggagggagatgaccccctggatgaccacacccgctgcttccccaactgccccttcctgcagaacatgaagagcagcgctgaggtgaccccagacctgcagagcagaggagagctgtgtgagctgctggagaccaccagcgagagcaacctggaggacagcattgctgtgggccccatcgtgcctgagatggcccagggcgaggcccagtggttccaggaggccaagaacctgaatgagcagctgcgggccgcctacaccagcgccagcttccgccacatgagcctgctggacatcagcagtgacctggccacagaccacctgctgggctgtgacctgagcatcgccagcaagcacatcagcaagcctgtgcaggagcccctggtgctgcctgaggtgtttggaaacctgaacagcgtgatgtgtgtggagggggaggccggcagcggcaagacagtgctgctgaagaagatcgccttcctgtgggccagcggctgctgccccctgctgaaccgcttccagctggtgttctacctgagcctgagcagcaccaggccagatgagggcctggccagcatcatctgtgaccagctgctggagaaggagggctctgtgacagagatgtgtgtgaggaacatcatccagcagctgaagaaccaggtgctcttcctgctggatgactacaaggagatctgcagcatcccccaggtgattggcaagctgatccagaagaaccacctgagcaggacctgcctgctgattgctgtgaggaccaacagagcccgggacatccgccgctacctggagaccatcctggagatcaaggccttccccttctacaacacagtgtgcatcctgaggaagctgttcagccacaacatgacccggctgaggaagttcatggtgtactttgggaagaaccagagcctgcagaagatccagaagacccccctgtttgtggccgccatctgtgcccactggttccagtacccctttgaccccagctttgatgatgtggccgtgttcaagagctacatggagcggctgagcctgaggaacaaggccacagctgagatcctgaaggccaccgtgagcagctgtggggagctggccctgaagggcttcttcagctgctgctttgagttcaatgatgatgacctggccgaggccggcgtggatgaagatgaggacctgaccatgtgcctgatgagcaagttcaccgcccagaggctgcggcccttctaccgcttcctgagccctgccttccaggagttcctggccggcatgaggctgattgagctgctggacagcgaccggcaggagcaccaggacctgggcctgtaccacctgaagcagatcaacagccccatgatgacagtgtctgcctacaacaacttcctgaactacgtgagcagcctgcccagcaccaaggccggccccaagatcgtgagccacctgctgcacctggtggacaacaaggagagcctggagaacatcagtgaaaatgatgactacctgaagcaccagcctgagatcagcctgcagatgcagctgctgcggggcctgtggcagatctgcccccaggcctacttctccatggtgtctgagcacctgctggtgctggccctgaagacagcctaccagagcaacacagtggccgcctgcagcccctttgtgctgcagttcctgcagggccgcaccctgaccctgggcgccctgaacctgcagtacttctttgaccaccctgagagcctgagcctgctgcggagcatccacttccccatccggggcaacaagaccagcccccgggcccacttctctgtgctggagacctgctttgacaagagccaggtgcccaccatcgaccaggactatgccagcgcctttgagcccatgaatgagtgggagaggaacctggccgagaaggaggacaacgtgaagagctacatggacatgcagaggcgggccagcccagacctgagcacaggctactggaagctgagccccaagcagtacaagatcccctgcctggaggtggatgtgaatgacattgatgtggtgggccaggacatgctggagatcctgatgaccgtcttcagcgccagccagagaattgagctgcacctgaaccacagccggggcttcatcgagagcatccggcctgccctggagctgagcaaggcctctgtgaccaagtgcagcatcagcaagctggagctgtctgctgctgagcaggagctgctgctgaccctgcccagcctggagagcctggaggtgtctggcaccatccagagccaggaccagatcttccccaacctggacaagttcctgtgcctgaaggagctgtctgtggacctggagggcaacatcaacgtgttttctgtcatccctgaggagttccccaacttccaccacatggagaagctgctgatccagatctctgcagaatatgaccccagcaagctggtgaagctgatccagaacagccccaacctgcacgtgttccacctgaagtgcaacttcttcagtgactttggcagcctgatgaccatgctggtgtcctgcaagaagctgacagagatcaagttcagtgacagcttcttccaggccgtgccctttgtggccagcctgcccaacttcatcagcctgaagatcctgaacctggagggccagcagttcccagatgaggagaccagcgagaagtttgcctacatcctgggcagcctgagcaacctggaggagctgatcctgcccactggagatggcatctacagagtggccaagctgatcatccagcagtgccagcagctgcactgcctgcgggtgctgtccttcttcaagaccctgaatgatgacagcgtggtggagatcgccaaggtggccatcagcggcggcttccagaagctggagaacctgaagctgagcatcaaccacaagatcacagaggagggctacagaaacttcttccaggccctggacaacatgcccaacctgcaggagctggacatcagccgccacttcacagagtgcatcaaggcccaggccaccaccgtgaagagcctgagccagtgtgtgctgcggctgcccaggctcatccggctgaacatgctgtcctggctgctggatgctgatgacatcgccctgctgaatgtgatgaaggagcggcacccccagagcaagtacctgaccatcctgcagaagtggatcctgcccttcagccccatcatccagaagtag

SEQ ID NO: 213537 - DNA, 3726 bp, Artificial Sequence
  derived and/or modified sequence
atgcccctgcacatcggcgacttcgtgtgggacagcaaggtgcacagtctgcagtccagccttaatatcttttcattgctgcccacaaaagggagaacggagcatctgtttttctcacacatactctcttttcactggcctgcattttcttccattcgtttagagctgtggataaacctacggtgtgaatttctcaggtccaaaaagtcctccgaagagataacccagtacatccaaagttataaagggttcgtcgatataactggcgagcactttgtaaactcatgggtgcagagggaactgccaatggcctctgcgtactgcaatgatagtatctttgcctatgaggaactgcgcctggactcattcaaggattggcccagggagtctgccgtgggggtggcagcactagctaaggctggcctgttttacaccggcatcaaggacatcgttcagtgcttctcctgcgggggctgcttagagaaatggcaagagggtgatgatcccctggacgaccataccaggtgcttcccaaattgtcctttcctgcaaaatatgaagagctctgccgaggtaactccagacctgcagtcccgtggtgagctgtgtgagcttctagagacaaccagtgagagcaatctggaggactcgattgcagtcgggcctattgtgccagagatggcccaaggggaagctcagtggtttcaggaggctaagaatctgaacgagcagctccgggcggcatacacatcagcctccttcagacacatgtcgctcctcgatatcagcagcgatctggccacagaccacctactgggttgcgacctttcgattgcttccaagcacatcagcaaaccagttcaggaacccctggtcctcccagaagtctttgggaacctgaatagcgtgatgtgcgtagagggggaagccggatcaggcaagacagtgctgctgaaaaagatcgctttcctgtgggcatccggatgttgccccctgcttaaccgcttccagctggtattctatctgagcctgtctagcacgcgtccggatgaaggactcgccagtattatctgtgaccagctgctcgaaaaggaaggttcggtcaccgagatgtgtgttagaaatatcattcagcagctgaaaaatcaggtgctcttcttgctggatgactataaggaaatctgtagcattccacaggtgatcgggaaactgattcaaaagaatcatttatcaagaacctgcttattgatcgcagtgagaaccaatcgggctcgcgacatccggcgctatctcgagactatcctcgagattaaagccttcccattttataacaccgtctgcatattgagaaaactattctcacataacatgaccaggcttagaaaattcatggtctattttggtaaaaaccagtcactacagaagattcagaagactccacttttcgtcgcagccatctgcgcccattggtttcagtacccgttcgacccctcatttgacgacgtggctgtctttaagtcgtacatggagcggctgtccttaagaaacaaggccactgcggaaatactgaaagcaaccgttagtagttgtggggaactggcactgaaaggattcttctcttgctgtttcgaatttaacgacgacgatttagcagaggccggtgtcgacgaagacgaagacctgaccatgtgcctgatgtcaaagtttactgctcagagactccgaccgttctatcgattccttagccctgcgttccaagagtttcttgccggaatgcgactgatcgaactccttgacagcgatcgccaagagcaccaggacttgggactgtaccacctcaagcagatcaacagccccatgatgacagtttctgcatacaataactttttaaactacgtgagctctctcccctccactaaagctgggccgaagatagtgtcgcatttattacatctagtggacaataaggagtctcttgaaaatatttctgagaatgacgactatctgaaacatcagccggagataagtctccagatgcagcttcttcgagggttgtggcaaatctgcccacaggcctatttcagcatggtgtctgaacatctgctggtgctagctctgaaaacagcctaccagagtaatactgtggccgcctgtagtccttttgtgctgcaatttcttcaaggaaggactttgacattgggggcactgaacctccagtatttcttcgaccatcccgaaagcctgtcactcctacgttctatccattttcccatacggggtaataaaactagtccccgcgctcacttctcggtcctggagacttgcttcgataaaagccaggttccaaccattgatcaggactatgctagcgcctttgagccaatgaacgaatgggaaaggaatctggccgaaaaagaagacaacgtgaagtcgtatatggacatgcagcggagggcgtcgcctgacctcagcaccgggtattggaaattgagtcctaaacaatataagattccctgccttgaagtggacgtgaacgatatcgacgtagtgggccaggacatgctcgagatcctcatgactgtgttctcagctagccagcgcattgaactgcatcttaatcactccaggggttttatagagtccattagacctgccttagaactttcaaaggcttccgtgaccaagtgttcaatcagtaaacttgagcttagcgctgcagagcaggagctactgcttaccctgccatccctcgagtctttggaagtaagcggcacaatccagtcacaggatcaaatattccctaatctggacaagttcctctgcctgaaagaactgagcgtagaccttgaggggaacatcaacgtgttttcggtaatccccgaggagtttcctaatttccaccacatggagaaattactcatccagattagtgcagagtacgacccaagtaagttagtgaaattaatccagaactctcccaatctccatgtgttccatctcaagtgcaactttttctcggattttggttccctgatgaccatgctggtctcctgcaagaagctgaccgagatcaaattctccgactcattttttcaggccgtgccatttgtcgcgtcactgcccaacttcatttctctaaaaatcctgaacctcgagggccagcagtttccggatgaggaaacatccgagaaattcgcctacatattagggagcctgtcgaatctcgaggaactaatactgccaacgggcgacggcatatacagagtggctaaactgattatccaacagtgtcagcagttgcactgtctcagggtgctgagtttctttaagaccctgaacgacgacagcgtcgtggagattgctaaagtcgccatttccgggggctttcaaaaactagagaatttgaagctcagcataaaccataagataacagaagaaggctacagaaacttcttccaggccctggataacatgccgaacttgcaggaactggatatcagccgacattttactgaatgtatcaaagcacaggctaccacagtgaagagcttgtcacagtgtgtgctgcggctcccacgactgatcaggctcaacatgttaagttggcttctcgatgccgatgacattgccctgctcaacgtgatgaaggaaagacatccacagagtaaatatttaacaattcttcagaagtggattctccccttttctccaattatccaaaagtag

SEQ ID NO: 213538 - DNA, 3726 bp, Artificial Sequence
  derived and/or modified sequence
atgcccctgcacatcggcgacttcgtgtgggacagcaaggtgcactcattgcagtcttcgctcaacattttctccctgctgccaacaaagggtcgcacagagcacctcttcttttctcacatcctgagcttccactggccagcctttagctccatccggttggaactctggattaatctgcgctgcgaatttttgcggtctaagaagtctagcgaagaaatcacgcagtatatccagagctacaaaggattcgtcgatatcactggtgaacatttcgtcaattcctgggtgcagagagagttacccatggccagtgcctactgcaatgattcaatcttcgcttatgaggagctgcgccttgatagctttaaagattggcctcgggaatccgcagtgggcgtggctgccttggccaaggctggtctgttttatactggcattaaagatatcgtgcagtgcttctcatgtggcggctgcttagagaagtggcaggagggagatgaccctttggatgaccacacccggtgttttccgaactgcccgtttcttcagaacatgaagtccagcgctgaagtgactcccgaccttcagagccgaggagagttgtgtgaacttctggagacaaccagtgaatccaatttagaggattcaattgccgtcgggccgatcgtccccgaaatggcccaaggagaggctcagtggtttcaagaggctaaaaacctcaacgaacagcttcgggcagcttacaccagcgcctcatttcggcacatgagtctgctcgacatcagctctgacctcgctacggaccacctactcgggtgcgacctgtctatagcgagtaagcatatcagcaagccagttcaggagcctctggtcctccccgaggttttcggcaatcttaactctgtgatgtgcgttgagggcgaggcagggtccggtaagacagtcctgctgaagaaaattgctttcctctgggcctccgggtgttgtccactcctcaatcggtttcaactggtgttttatcttagcctttctagcacgcggcctgatgaaggactcgcgagcattatatgtgatcagctgctggagaaagaagggtccgtgactgagatgtgtgtcagaaacattattcaacagctgaagaatcaggttctgtttctgcttgacgactataaggaaatctgttcgatccctcaagtaatcggaaaactcattcagaagaatcatttaagcaggacctgtctgctgatagctgtacgaacaaatcgagcaagagacattaggcgatacctggaaactatcctggaaatcaaggccttccccttctacaacacagtttgcatactgagaaagttgttctcacacaacatgacgcgactgagaaaattcatggtctatttcggcaaaaaccagtccttacagaaaatccagaagacaccgctcttcgtagccgctatctgtgcccattggtttcagtatcccttcgacccttcttttgatgacgtggcagtgttcaaatcctacatggaaagactgtcccttcgcaataaagctacagctgagatattgaaagccaccgtgtcttcctgtggggaactggccctgaagggcttcttttcttgttgttttgagtttaacgatgacgatctggcagaggcaggggtggatgaagacgaagatttgactatgtgcctgatgtccaaatttacagcacagagactcaggcccttctaccggttcctgtcccctgctttccaggagttcctggccgggatgcgtttaatcgagctgttggactctgataggcaggaacaccaggatctgggactctaccacctgaaacagatcaacagccctatgatgacagtttctgcttacaataactttctcaattatgtgtcatccctgcctagcacgaaagctggccctaaaatcgtgtctcaccttcttcacctcgttgacaataaagagagtctcgaaaacatttcagaaaatgacgattacctgaaacatcagccggaaatctccctgcagatgcagctactccgaggtttgtggcagatctgccctcaggcctatttttcaatggtgtcagagcacctcctcgtcctggccctgaaaactgcctaccagagcaacaccgtagccgcatgctccccattcgtgctgcagttcttacaagggcggaccctcaccctcggagctctgaatctccaatactttttcgaccaccccgaatcattgtctctgctcagaagcatccatttccccattagggggaacaaaacgtccccccgcgcacacttttctgtcctggaaacatgcttcgataagtcgcaagtccctacaatcgaccaggattatgcatcagcctttgagccaatgaatgaatgggaaaggaacctcgccgagaaagaggacaacgtgaagtcatacatggacatgcagcgacgcgcatcacctgacctgtccacaggctactggaaactttccccaaagcagtataaaattccttgtctcgaggtggacgtaaatgacattgacgtcgtgggccaggatatgctggagatcttgatgacggtgttttccgcctcccagcggattgaactgcacctgaatcattccaggggattcatagagtcgatcaggcccgcccttgagttgtccaaagccagcgttacgaaatgttctattagtaagctagaactgtcagccgccgagcaggagcttttgctgaccctcccgtcgctggaatccttagaagtcagcggcacaatccagtctcaggatcagatatttccaaacttggataaatttctttgtctgaaagaactctcagtggacttggagggcaatatcaatgtattttcggttatcccagaggaattccctaactttcaccacatggagaagctgctgatacaaattagtgctgaatatgatccatctaagctggtaaaattaatacaaaattccccaaacctccacgtgttccatctcaaatgcaatttcttctccgatttcggatctcttatgacaatgctggtgagttgcaaaaaactcaccgaaatcaagtttagcgattcttttttccaggccgtcccctttgtcgcaagcctcccaaattttatctcacttaaaatcctgaatttggagggccagcagttcccagatgaagaaaccagtgaaaagttcgcatatatcttaggcagtctttcaaacctcgaggaactgatactccctacaggggatggcatctaccgggtggctaaactaatcatccaacagtgtcagcagctccattgcttgagggttcttagtttcttcaagacgctaaacgacgactctgttgtggaaatcgcaaaggttgcaatatcgggagggtttcagaaactggaaaatctgaagctttccatcaaccacaaaataacagaggaggggtatcgcaattttttccaggcccttgacaacatgcccaatctgcaggagctcgacatcagcagacacttcaccgagtgcattaaagcccaggcaacgaccgtgaagtccctgagccagtgtgtcctacggctaccacggctcatcagacttaatatgctgtcgtggttacttgacgcggacgatatagcactgttgaatgtcatgaaggagaggcaccctcaatctaaataccttactatcctacagaagtggatactgcccttttccccaatcatccagaagtag

SEQ ID NO: 213539 - DNA, 3777 bp, Artificial Sequence
  derived and/or modified sequence
atgccacttcatattggggacttcgtctgggattccaaggtgcattcattgcaaagttccttaaatattttctcactgcttcctactaaaggacggacagagcatttgttcttcagccacatactttccttccactggccagcattctcctctattagactagaactgtggataaacctcagatgtgaatttcttcggagtaagaaatcctcagaggaaattacccagtatattcaaagctacaagggatttgttgacataacgggagaacattttgtgaattcctgggtccagagagaattacctatggcatcagcttattgcaatgacagcatctttgcttacgaagaactacggctggactcttttaaggactggccccgggaatcagctgtgggagttgcagcactggccaaagcaggtcttttctacacaggtataaaggacatcgtccagtgcttttcctgtggagggtgtttagagaaatggcaggaaggtgatgacccattagacgatcacaccagatgttttcccaattgtccatttctccaaaatatgaagtcctctgcggaagtgactccagaccttcagagccgtggtgaactttgtgaattactggaaaccacaagtgaaagcaatcttgaagattcaatagcagttggtcctatagtgccagaaatggcacagggtgaagcccagtggtttcaagaggcaaagaatctgaatgagcagctgagagcagcttataccagcgccagtttccgccacatgtctttgcttgatatctcttccgatctggccacggaccacttgctgggctgtgatctgtctattgcttcaaaacacatcagcaaacctgtgcaagaacctctggtgctgcctgaggtctttggcaacttgaactctgtcatgtgtgtggagggtgaagctggaagtggaaagacggtcctcctgaagaaaatagcttttctgtgggcatctggatgctgtcccctgttaaacaggttccagctggttttctacctctcccttagttccaccagaccagacgaggggctggccagtatcatctgtgaccagctcctagagaaagaaggatctgttactgaaatgtgcgtgaggaacattatccagcagttaaagaatcaggtcttattccttttagatgactacaaagaaatatgttcaatccctcaagtcataggaaaactgattcaaaaaaaccacttatcccggacctgcctattgattgctgtccgtacaaacagggccagggacatccgccgatacctagagaccattctagagatcaaagcatttcccttttataatactgtctgtatattacggaagctcttttcacataatatgactcgtctgcgaaagtttatggtttactttggaaagaaccaaagtttgcagaagatacagaaaactcctctctttgtggcggcgatctgtgctcattggtttcagtatccttttgacccatcctttgatgatgtggctgttttcaagtcctatatggaacgcctttccttaaggaacaaagcgacagctgaaattctcaaagcaactgtgtcctcctgtggtgagctggccttgaaagggtttttttcatgttgctttgagtttaatgatgatgatctcgcagaagcaggggttgatgaagatgaagatctaaccatgtgcttgatgagcaaatttacagcccagagactaagaccattctaccggtttttaagtcctgccttccaagaatttcttgcggggatgaggctgattgaactcctggattcagataggcaggaacatcaagatttgggactgtatcatttgaaacaaatcaactcacccatgatgactgtaagcgcctacaacaattttttgaactatgtctccagcctcccttcaacaaaagcagggcccaaaattgtgtctcatttgctccatttagtggataacaaagagtcattggagaatatatctgaaaatgatgactacttaaagcaccagccagaaatttcactgcagatgcagttacttaggggattgtggcaaatttgtccacaagcttacttttcaatggtttcagaacatttactggttcttgccctgaaaactgcttatcaaagcaacactgttgctgcgtgttctccatttgttttgcaattccttcaagggagaacactgactttgggtgcgcttaacttacagtactttttcgaccacccagaaagcttgtcattgttgaggagcatccacttcccaatacgaggaaataagacatcacccagagcacatttttcagttctggaaacatgttttgacaaatcacaggtgccaactatagatcaggactatgcttctgcctttgaacctatgaatgaatgggagcgaaatttagctgaaaaagaggataatgtaaagagctatatggatatgcagcgcagggcatcaccagaccttagtactggctattggaaactttctccaaagcagtacaagattccctgtctagaagtcgatgtgaatgatattgatgttgtaggccaggatatgcttgagattctaatgacagttttctcagcttcacagcgcatcgaactccatttaaaccacagcagaggctttatagaaagcatccgcccagctcttgagctgtctaaggcctctgtcaccaagtgctccataagcaagttggaactcagcgcagccgaacaggaactgcttctcaccctgccttccctggaatctcttgaagtctcagggacaatccagtcacaagaccaaatctttcctaatctggataagttcctgtgcctgaaagaactgtctgtggatctggagggcaatataaatgttttttcagtcattcctgaagaatttccaaacttccaccatatggagaaattattgatccaaatttcagctgagtatgatccttccaaactagtaaaattaattcaaaattctccaaaccttcatgttttccatctgaagtgtaacttcttttcggattttgggtctctcatgactatgcttgtttcctgtaagaaactcacagaaattaagttttcggattcattttttcaagccgtcccatttgttgccagtttgccaaattttatttctctgaagatattaaatcttgaaggccagcaatttcctgatgaggaaacatcagaaaaatttgcctacattttaggttctcttagtaacctggaagaattgatccttcctactggggatggaatttatcgagtggccaaactgatcatccagcagtgtcagcagcttcattgtctccgagtcctctcatttttcaagactttgaatgatgacagcgtggtggaaattgccaaagtagcaatcagtggaggtttccagaaacttgagaacctaaagctttcaatcaatcacaagattacagaggaaggatacagaaatttctttcaagcactggacaacatgccaaacttgcaggagttggacatctccaggcatttcacagagtgtatcaaagctcaggccacaacagtcaagtctttgagtcaatgtgtgttacgactaccaaggctcattagactgaacatgttaagttggctcttggatgcagatgatattgcattgcttaatgtcatgaaagaaagacatcctcaatctaagtacttaactattctccagaaatggatactgccgttctctccaatcattcagaaataaaagattcagctaaaaactgctgaatcaataatttgtcttggggcatattga

SEQ ID NO: 213540 - DNA, 4543 bp, Artificial Sequence
  derived and/or modified sequence
tggcacagatctccagaaacccttgtaatttcctgagtgacaggggtgatagaaacatcttttattagaatacttggtcttggttcctgacacaagagcttctaagacctttggaatctccaagtgataagagtgtatgacagtgagctaactggtggctgggatcctttagacaacttcaggatgggggctatcccctgaaagactaaggcatgattagaggtctgggatttgcagccccacgcctcgacctccagagagggtaaaagggctggagattgattaaccaccagttgccagtgatttaaccaatcatgcctaagtgatggcacctccattaaaaaataaaccacaggtttggagagctttcggtttggttaaccccaaccacataccaagaaggcgatgcacctcaaactgcatgaagacaaaaggtcctgtgctcacctgggacccttctggacgttgccctgtgtacctcttcgactgcctgttcatctacgacgaaccccgggtattgaccccagacaacaatgccacttcatattggggacttcgtctgggattccaaggtgcattcattgcaaagttccttaaatattttctcactgcttcctactaaaggacggacagagcatttgttcttcagccacatactttccttccactggccagcattctcctctattagactagaactgtggataaacctcagatgtgaatttcttcggagtaagaaatcctcagaggaaattacccagtatattcaaagctacaagggatttgttgacataacgggagaacattttgtgaattcctgggtccagagagaattacctatggcatcagcttattgcaatgacagcatctttgcttacgaagaactacggctggactcttttaaggactggccccgggaatcagctgtgggagttgcagcactggccaaagcaggtcttttctacacaggtataaaggacatcgtccagtgcttttcctgtggagggtgtttagagaaatggcaggaaggtgatgacccattagacgatcacaccagatgttttcccaattgtccatttctccaaaatatgaagtcctctgcggaagtgactccagaccttcagagccgtggtgaactttgtgaattactggaaaccacaagtgaaagcaatcttgaagattcaatagcagttggtcctatagtgccagaaatggcacagggtgaagcccagtggtttcaagaggcaaagaatctgaatgagcagctgagagcagcttataccagcgccagtttccgccacatgtctttgcttgatatctcttccgatctggccacggaccacttgctgggctgtgatctgtctattgcttcaaaacacatcagcaaacctgtgcaagaacctctggtgctgcctgaggtctttggcaacttgaactctgtcatgtgtgtggagggtgaagctggaagtggaaagacggtcctcctgaagaaaatagcttttctgtgggcatctggatgctgtcccctgttaaacaggttccagctggttttctacctctcccttagttccaccagaccagacgaggggctggccagtatcatctgtgaccagctcctagagaaagaaggatctgttactgaaatgtgcgtgaggaacattatccagcagttaaagaatcaggtcttattccttttagatgactacaaagaaatatgttcaatccctcaagtcataggaaaactgattcaaaaaaaccacttatcccggacctgcctattgattgctgtccgtacaaacagggccagggacatccgccgatacctagagaccattctagagatcaaagcatttcccttttataatactgtctgtatattacggaagctcttttcacataatatgactcgtctgcgaaagtttatggtttactttggaaagaaccaaagtttgcagaagatacagaaaactcctctctttgtggcggcgatctgtgctcattggtttcagtatccttttgacccatcctttgatgatgtggctgttttcaagtcctatatggaacgcctttccttaaggaacaaagcgacagctgaaattctcaaagcaactgtgtcctcctgtggtgagctggccttgaaagggtttttttcatgttgctttgagtttaatgatgatgatctcgcagaagcaggggttgatgaagatgaagatctaaccatgtgcttgatgagcaaatttacagcccagagactaagaccattctaccggtttttaagtcctgccttccaagaatttcttgcggggatgaggctgattgaactcctggattcagataggcaggaacatcaagatttgggactgtatcatttgaaacaaatcaactcacccatgatgactgtaagcgcctacaacaattttttgaactatgtctccagcctcccttcaacaaaagcagggcccaaaattgtgtctcatttgctccatttagtggataacaaagagtcattggagaatatatctgaaaatgatgactacttaaagcaccagccagaaatttcactgcagatgcagttacttaggggattgtggcaaatttgtccacaagcttacttttcaatggtttcagaacatttactggttcttgccctgaaaactgcttatcaaagcaacactgttgctgcgtgttctccatttgttttgcaattccttcaagggagaacactgactttgggtgcgcttaacttacagtactttttcgaccacccagaaagcttgtcattgttgaggagcatccacttcccaatacgaggaaataagacatcacccagagcacatttttcagttctggaaacatgttttgacaaatcacaggtgccaactatagatcaggactatgcttctgcctttgaacctatgaatgaatgggagcgaaatttagctgaaaaagaggataatgtaaagagctatatggatatgcagcgcagggcatcaccagaccttagtactggctattggaaactttctccaaagcagtacaagattccctgtctagaagtcgatgtgaatgatattgatgttgtaggccaggatatgcttgagattctaatgacagttttctcagcttcacagcgcatcgaactccatttaaaccacagcagaggctttatagaaagcatccgcccagctcttgagctgtctaaggcctctgtcaccaagtgctccataagcaagttggaactcagcgcagccgaacaggaactgcttctcaccctgccttccctggaatctcttgaagtctcagggacaatccagtcacaagaccaaatctttcctaatctggataagttcctgtgcctgaaagaactgtctgtggatctggagggcaatataaatgttttttcagtcattcctgaagaatttccaaacttccaccatatggagaaattattgatccaaatttcagctgagtatgatccttccaaactagtaaaattaattcaaaattctccaaaccttcatgttttccatctgaagtgtaacttcttttcggattttgggtctctcatgactatgcttgtttcctgtaagaaactcacagaaattaagttttcggattcattttttcaagccgtcccatttgttgccagtttgccaaattttatttctctgaagatattaaatcttgaaggccagcaatttcctgatgaggaaacatcagaaaaatttgcctacattttaggttctcttagtaacctggaagaattgatccttcctactggggatggaatttatcgagtggccaaactgatcatccagcagtgtcagcagcttcattgtctccgagtcctctcatttttcaagactttgaatgatgacagcgtggtggaaattgccaaagtagcaatcagtggaggtttccagaaacttgagaacctaaagctttcaatcaatcacaagattacagaggaaggatacagaaatttctttcaagcactggacaacatgccaaacttgcaggagttggacatctccaggcatttcacagagtgtatcaaagctcaggccacaacagtcaagtctttgagtcaatgtgtgttacgactaccaaggctcattagactgaacatgttaagttggctcttggatgcagatgatattgcattgcttaatgtcatgaaagaaagacatcctcaatctaagtacttaactattctccagaaatggatactgccgttctctccaatcattcagaaataaaagattcagctaaaaactgctgaatcaataatttgtcttggggcatattgaggatgtaaaaaaagttgttgattaatgctaaaaaccaaattatccaaaattattttattaaatattgcatacaaaagaaaatgtgtaaggcttgctaaaaaacaaaacaaaacaaaacacagtcctgcatactcaccaccaagctcaagaaataaatcatcaccaatacctttgaggtccctgagtaatccaccccagctaaaggcaaacccttcaatcaagtttatacagca

SEQ ID NO: 213541 - DNA, 3726 bp, Artificial Sequence
  derived and/or modified sequence
atgccgttacatataggcgacttcgtgtgggattccaaggtccactctttacagtcgagtctaaatatcttctctttactccctacaaaaggacgtactgaacacctattcttttcgcacatcctttcttttcattggcctgccttctcaagtattagactcgagctgtggattaacctccgttgcgagttcttgagatctaagaagagcagcgaagagataacacaatatatccagtcttacaagggttttgttgatattacaggcgaacatttcgttaactcatgggtacagcgcgaattgcctatggcctccgcctactgcaatgatagcatcttcgcttatgaagagctgcggcttgattcttttaaagattggcctagggagagtgcggtgggcgtggctgctctcgccaaggctgggttattctatacaggtatcaaggacattgtccagtgcttttcgtgtggcggatgtttagagaaatggcaggagggagacgatcccctggacgaccacacaagatgctttcccaactgccccttcctgcaaaatatgaaatcaagcgcagaagtgacccctgatctccagagtcggggagaattatgcgagctgctagagaccacctccgaatccaatctagaagattctattgcagtgggcccaattgtgcccgagatggctcaaggagaagcccagtggtttcaagaggctaaaaaccttaacgagcaactgcgcgctgcatacaccagcgcctcctttcggcacatgtcactcctggatatcagcagcgatctggccactgatcacttgttaggctgtgatctcagtattgcttctaagcatatttctaagccagtgcaggagcctctagtacttcccgaggtcttcgggaacttgaactccgttatgtgcgttgagggcgaggccggaagcggcaaaactgttctcctgaaaaagatagccttcctgtgggcaagcggctgctgccccttgctcaaccggtttcaactggttttttacctgtccctttcttcaacacggcctgacgaaggcctggccagtatcatatgtgatcagctgttggagaaggaaggatccgtgacagagatgtgtgttcggaacatcatccagcagcttaaaaatcaggtattatttctgctcgatgattacaaggaaatttgttccatcccgcaggtcatcggaaagctcatccagaagaaccacctgtcacggacttgcctgcttatagccgtgagaaccaatagggcacgtgacatcagacggtatctggaaaccattcttgagatcaaggcattccccttttataacactgtttgcattctgcggaagctctttagtcataatatgacacggctgagaaaatttatggtttacttcggcaaaaatcagtcactgcaaaaaatccaaaaaacccctctgtttgttgccgcaatatgcgcgcactggttccaatacccttttgatccgtcttttgacgacgttgccgtgtttaaaagttatatggaaaggctgagcttacgcaacaaggcaacagcggaaattcttaaggccaccgtgtcatcatgcggtgagttggccctgaaggggttcttttcttgttgctttgagtttaacgacgacgaccttgccgaggcaggcgtggatgaggatgaggatctgaccatgtgcctgatgagcaaatttacagcccagcgactgcggcctttctacaggtttctaagtcccgcttttcaagagttcctcgctggcatgcgcctcatagaattgctagactctgatagacaggaacaccaggacctggggctgtaccaccttaaacaaataaacagccccatgatgacagtgagcgcctataacaattttctaaattatgtttccagtctgccaagcacaaaggccggtccaaagattgtgtcccacctactgcacttagtcgacaacaaggagtccttggaaaatatcagcgagaacgatgattacctgaagcaccagccggaaatttcgcttcaaatgcagctccttaggggcctgtggcagatatgcccccaggcgtatttctcgatggttagcgagcacctgctcgtgctggcgcttaaaacggcttatcaatccaacacagtggccgcatgtagcccttttgtgctgcaattcctgcagggacgaactctcaccctcggagctctgaatcttcagtatttcttcgatcaccccgagtctctttcacttctgaggagcatccacttccccattcggggtaacaagaccagtccgagagcccactttagtgtgcttgagacatgcttcgacaagagtcaagtgccaaccatcgatcaagactatgcctccgcctttgaacctatgaacgagtgggagaggaacctggccgaaaaggaggacaatgtcaagtcttacatggacatgcagcgccgagcgtcccccgacctcagcacgggctactggaaattgagtcctaaacagtacaaaattccttgccttgaagtagatgtaaacgacatcgacgtagtcgggcaggatatgctggagatcctgatgacagtgttcagtgcctcgcagcgtattgaactgcacttgaatcatagcaggggctttatagagtccattaggcctgccctagagctttccaaggccagcgtcaccaaatgtagcatcagcaagctggagctgtcagccgcagaacaagagttactgttaactctgcccagcctggaatccctggaagtcagcgggactattcaatcacaggaccagatttttcccaacctagataaattcctgtgtttgaaggaactgagcgtagatttggagggaaatattaacgtattcagcgttatcccagaggagttccctaatttccatcatatggagaaattacttattcaaatctcagccgaatatgacccctccaaactggtgaagctgatccagaacagtcccaatcttcacgtgtttcacctaaagtgtaacttttttagcgactttggaagcctgatgaccatgttagtaagttgtaagaaactgaccgagattaaattttctgattcattcttccaggctgttcctttcgtggcttcgctgcccaactttatttccctgaagattttgaacctggagggtcagcagttccccgatgaggaaacctctgaaaaatttgcttacatcctcggttctctctccaaccttgaagaattaatactccctactggagacggaatttatagagtagctaaactcattatccagcagtgccagcaactccattgtctgcgggtgctatctttctttaagaccctcaacgatgattcagttgtcgagatcgccaaagtcgcgatcagcggcggattccagaaattggaaaaccttaagctgtccataaatcataagatcacggaggagggttaccgcaacttcttccaggccctcgacaatatgccaaatctccaagagctcgacataagcaggcacttcacggaatgcatcaaagcacaggctaccaccgtgaagtcactatcgcagtgtgtgctgcgcttgcctcgtctcattagactgaacatgttatcctggctgcttgatgctgatgatatcgccttgctgaacgtcatgaaggaacggcatccacagtccaagtatctcaccattctgcagaaatggatcctcccattcagccccattatccagaagtag

SEQ ID NO: 213542 - DNA, 3726 bp, Artificial Sequence
  derived and/or modified sequence
atgcctctgcatatcggtgatttcgtctgggactcaaaagttcactctctccagtcctctctcaatattttttcgctcctgcccaccaagggcaggacagaacacctttttttctcacacatcttatcgtttcactggcccgcatttagctccattagactcgagctgtggattaatcttaggtgcgaattcttgcgttcaaaaaagtcctccgaagagatcacacagtacatacagtcctacaagggattcgtcgacataaccggtgaacactttgtgaattcgtgggtacaacgcgagctgcccatggctagcgcttactgcaacgacagtattttcgcctatgaggagcttagattagactcttttaaagattggccacgggagtccgctgtgggagtcgccgcattagctaaagcaggcctcttctacactggaatcaaagatatcgtgcagtgctttagctgtgggggttgtctggagaagtggcaggaaggtgatgacccacttgacgaccacacaagatgcttcccaaattgcccgtttttacagaacatgaaatcttccgctgaagttacaccggatctacagagccgcggagagctgtgtgaattactggaaaccacaagcgaatccaacttggaagattccatcgccgtggggcctattgttccggagatggctcagggcgaggcacagtggttccaggaagccaagaatctgaatgaacagctgcgcgctgcttataccagtgcatccttcaggcatatgagcctcttggacatatcttctgatttggccaccgatcacctgcttggctgtgatttgtccattgcttcaaagcacatcagcaaaccagtgcaggaaccgctggttctgcctgaggtgtttggaaatctgaactcagtaatgtgtgttgaaggcgaggcgggttccggcaagactgtgttgttgaagaagatcgcctttctgtgggcttccggctgttgtcccctcctcaaccgcttccagctggtgttttacctctctctcagttcaacaagacccgatgagggtctggcatccataatatgcgaccagctacttgagaaagagggatcagtgactgagatgtgcgtccgtaacatcattcagcagctgaaaaaccaggtcctcttccttctggacgattacaaagagatatgcagcatacctcaggtaattggcaagctgatccagaagaaccacctgagccgtacatgcctgctcattgctgtgcggactaatagggccagggatatcagacgatacctagagacaatcctcgagataaaggccttcccgttctacaatacagtttgtatcctcaggaagcttttcagtcacaatatgacaaggctcaggaagtttatggtgtacttcggcaaaaaccaatcgctgcagaaaattcagaaaacccctctgtttgttgccgcaatttgtgctcactggttccagtacccattcgacccatcctttgatgacgttgcagtttttaagtcctacatggagagactgtctctacgaaacaaagcaaccgcagagatcctgaaggccaccgtctcaagttgtggcgaattggccctaaaggggtttttctcctgttgtttcgaattcaatgatgatgacttagcggaggccggtgtggatgaggacgaggatttgacaatgtgtctcatgtcaaagtttacagctcaacgcctgagacctttctataggtttctttcacccgcatttcaggaattcctggctggcatgaggctgatagaattgctcgatagcgaccgccaggaacatcaagacctcggcttgtaccacctcaagcagatcaatagtccaatgatgactgtcagtgcctacaataattttctcaactatgtttcctctttgcccagcactaaggccggacctaagatcgtctctcacttgctgcacctcgtagataacaaagaatcgctggaaaacatttctgaaaacgacgactatctgaagcatcagcctgagatatccttacagatgcaactgctcagagggctgtggcaaatttgcccacaggcttactttagcatggtgagtgagcatctgctggttctcgccttgaagaccgcctatcaatcaaatacggtcgcggcatgctcacccttcgtccttcaatttctgcagggcagaaccctgacacttggggctctcaatctgcaatatttcttcgatcaccccgagagcctcagcctgctgagatccatccatttcccaatcagggggaataagacctcccccagagctcacttttccgtcttggagacatgtttcgataagtcacaggtgccaacaatagatcaggactacgcgtccgcattcgaaccaatgaacgagtgggaacgcaatctggctgagaaggaggataacgtgaagtcctatatggacatgcagcggagggcctcccccgatctgtccactggttactggaagttatcccccaagcaatacaagattccctgcctggaagtagatgtaaatgacatcgatgtcgtcggacaggacatgctcgaaatcctaatgaccgtttttagcgcctcacaaaggattgagctgcaccttaatcattccagaggatttattgagtccatcagacccgcactcgagctcagcaaagcaagcgttacaaagtgtagcatatctaaattggagctttcagcagcggagcaggaactcctcctcacattgccaagcctggagtctttggaagtgagtggtactatccaaagtcaggaccaaatttttcccaatctggataagtttttgtgtcttaaggagctgagcgtggacttggagggtaatatcaatgtgttctctgtcatccccgaagaatttcccaactttcaccatatggagaagttgctgatccagatcagcgccgagtatgacccatcaaaactggtaaaacttatccaaaactcgccgaatttgcatgtgtttcacctgaaatgcaattttttctccgacttcggaagtctgatgacaatgctcgtgagctgcaagaaactgacagagattaaattctcagactcatttttccaggcagtcccttttgtagcttcactacccaattttatttctcttaaaatcctcaaccttgagggccaacagttcccagacgaggaaacgtcagagaaattcgcatacatcctgggcagtctgtcaaacctcgaagaacttattctacccaccggggatggcatatatcgagtggctaagctgattatccaacaatgccaacagctccattgtcttcgcgtgctgtcattttttaagacactgaacgatgattctgttgtggaaatcgccaaagtggccattagcggtggcttccaaaaacttgaaaacctgaaattatccatcaatcacaagataactgaagaaggttaccgcaactttttccaggcgctcgacaacatgcccaatttgcaggagctcgacattagcaggcacttcacggaatgcatcaaagcacaggccactactgtcaagtctctctctcagtgcgtcttgaggctgccacgccttatcagactgaatatgcttagctggctcttggacgcggatgatattgcgctattgaatgtgatgaaggagcgacacccccagtcaaagtacctgaccattctgcagaaatggatcctgcctttttcaccaatcattcagaagtag

SEQ ID NO: 213543 - protein, 835 aa, Artificial Sequence
  derived and/or modified sequence
MSRRKQGKPQHLSKREFSPEPLEAILTDDEPDHGPLGAPEGDHDLLTCGQCQMNFPLGDILIFIEHKRKQCNGSLCLEKAVDKPPSPSPIEMKKASNPVEVGIQVTPEDDDCLSTSSRGICPKQEHIADKLLHWRGLSSPRSAHGALIPTPGMSAEYAPQGICKDEPSSYTCTTCKQPFTSAWFLLQHAQNTHGLRIYLESEHGSPLTPRVGIPSGLGAECPSQPPLHGIHIADNNPFNLLRIPGSVSREASGLAEGRFPPTPPLFSPPPRHHLDPHRIERLGAEEMALATHHPSAFDRVLRLNPMAMEPPAMDFSRRLRELAGNTSSPPLSPGRPSPMQRLLQPFQPGSKPPFLATPPLPPLQSAPPPSQPPVKSKSCEFCGKTFKFQSNLVVHRRSHTGEKPYKCNLCDHACTQASKLKRHMKTHMHKSSPMTVKSDDGLSTASSPEPGTSDLVGSASSALKSVVAKFKSENDPNLIPENGDEEEEEDDEEEEEEEEEEEEELTESERVDYGFGLSLEAARHHENSSRGAVVGVGDESRALPDVMQGMVLSSMQHFSEAFHQVLGEKHKRGHLAEAEGHRDTCDEDSVAGESDRIDDGTVNGRGCSPGESASGGLSKKLLLGSPSSLSPFSKRIKLEKEFDLPPAAMPNTENVYSQWLAGYAASRQLKDPFLSFGDSRQSPFASSSEHSSENGSLRFSTPPGELDGGISGRSGTGSGGSTPHISGPGPGRPSSKEGRRSDTCEYCGKVFKNCSNLTVHRRSHTGERPYKCELCNYACAQSSKLTRHMKTHGQVGKDVYKCEICKMPFSVYSTLEKHMKKWHSDRVLNNDIKTE

SEQ ID NO: 213544 - DNA, 2508 bp, Artificial Sequence
  derived and/or modified sequence
atgtcgagacggaagcagggtaaaccacagcacctctctaagcgcgagttttcccctgaaccgcttgaagccatactgactgatgacgagcctgatcacggacccctgggcgcccctgaaggggaccatgatctcttaacctgtgggcaatgtcagatgaatttccctctgggtgacatccttatattcatcgaacacaaaaggaagcagtgcaatggctcactgtgtctggagaaggcagtggataagccgccctcaccatctccaatcgagatgaaaaaggcctcaaaccctgtggaggtaggcatccaggtcactcccgaggacgacgactgtctcagtacaagctcccgtgggatctgtcctaagcaggaacacatcgccgataagctgctgcactggcggggcttgagctcccctcgaagtgcccatggagctctcatccccactcctggcatgtccgccgagtatgctccgcaaggtatctgtaaagatgagccctccagctacacttgcacgacctgcaaacagccctttacctccgcatggtttctcctgcaacatgcacagaacacccacggactgaggatttacctggaatcggaacacggcagccctttaacacccagggtcggtattcctagtgggcttggagcggaatgcccttcgcaaccccctttgcatggcatccatattgcagataacaacccatttaacttgctccgaatcccgggctcagtttcccgcgaggcgagcgggctggccgaaggacgattccctcccacccctccattattcagcccacccccacgacatcatctggacccacatagaattgagagactaggcgctgaggagatggccctagctacgcatcacccatccgctttcgaccgtgtgctgcggctcaatcccatggcaatggagcctccagctatggatttttcacgtcgcttacgggagctggctggaaatacttctagtccacctctctctccaggtaggccatcaccaatgcagaggctattacaacccttccagcccggctcgaaacctccctttctggccacccccccacttcctcccttgcaatctgccccacctccatcacagccccctgtaaagagcaaaagttgcgagttctgcggtaaaacgttcaagttccaatccaatctagtggtgcaccgcaggtcacatactggcgagaagccctataaatgtaatctctgtgaccatgcatgcacccaggccagcaaacttaaaaggcatatgaaaacccatatgcataagtcgagtcctatgacagttaaaagcgatgacggcctatccactgctagtagcccggaacccggaacatccgacctcgtggggagcgccagctccgcattgaaaagtgtagtggcaaaatttaagtctgagaacgaccctaacctcatcccggaaaatggagacgaagaggaggaagaggacgacgaagaggaggaagaggaagaggaggaggaggaagaggagctcactgagagcgaacgcgtggactatggtttcggcctgtcacttgaagctgcccggcatcacgaaaattcaagcaggggtgcagtcgttggagttggcgacgaatccagggccttgcccgatgtgatgcagggtatggttctctctagcatgcaacacttcagcgaggctttccaccaagtgctgggcgagaagcacaaacgcggccacctggcagaagccgagggccatcgggacacctgcgatgaagattcagtggctggagaatcagaccgcatcgatgacgggacagtaaacggcaggggttgtagccctggcgagtccgcgagcggcggactgtccaaaaagttgcttcttggtagcccgagttcgctttcgcctttctccaagagaattaaattggagaaggagtttgatctcccccccgctgccatgccaaacactgagaatgtctatagtcagtggctcgccgggtatgctgcgagtcggcaactgaaagacccctttctttccttcggcgactctcgacaaagtccgttcgccagctcttcagaacactctagcgagaatggatctttgaggtttagcacaccaccaggtgaactggacggtggtatctccggacgatcaggaaccggcagcggaggtagtactccacatatctccggcccaggaccaggaagaccctcatcaaaggagggccgccgttctgacacgtgcgagtactgtggaaaggtctttaagaactgttctaacctgacggtccaccgtcggagccatacaggagagaggccctacaagtgtgagttgtgcaattatgcatgcgcgcaaagctctaagcttacacgccatatgaaaacgcatgggcaagtgggaaaggatgtctataagtgcgagatatgcaagatgcccttcagcgtgtactctaccctcgaaaagcacatgaagaaatggcactctgatcgggtgctcaataatgatatcaagacagagtag

SEQ ID NO: 213545 - DNA, 2508 bp, Artificial Sequence
  derived and/or modified sequence
atgagcaggaggaagcagggcaagccccagcacctgagcaagcgggagttcagccctgagcccctggaggccatcctgacagatgatgagccagaccacggccccctgggcgcccctgagggggaccatgacctgctgacctgtggccagtgccagatgaacttccccctgggggacatcctgatcttcatcgagcacaagaggaagcagtgcaatggcagcctgtgcctggagaaggctgtggacaagccacccagccccagccccatcgagatgaagaaggccagcaaccctgtggaggtgggcatccaggtgaccccagaagatgatgactgcctgagcaccagcagccggggcatctgccccaagcaggagcacatcgctgacaagctgctgcactggaggggcctgagcagccccaggtctgcccacggggccctgatccccaccccaggcatgtctgcagaatatgccccccagggcatctgcaaggatgagcccagcagctacacctgcaccacctgcaagcagcccttcaccagcgcctggttcctgctgcagcacgcccagaacacccacggcctgcgcatctacctggagagcgagcacggcagccccctgaccccccgggtgggcatccccagcggcctgggcgctgagtgccccagccagccccccctgcacggcatccacatcgctgacaacaaccccttcaacctgctgcgcatccctggctctgtgtcccgggaggccagcggcctggccgagggccgcttcccccccaccccacccctcttcagccccccacccaggcaccacctggacccccacagaattgagcggctgggcgctgaggagatggccctggccacccaccaccccagcgcctttgacagagtgctgcggctgaaccccatggccatggagcccccagccatggacttcagccggcggctgcgggagctggccggcaacaccagcagcccccccctgagccctggccggcccagccccatgcagaggctgctgcagcccttccagcccggcagcaagccacccttcctggccaccccacccctgccccccctgcagagcgcccccccacccagccagccccctgtgaagagcaagagctgtgagttctgtgggaagaccttcaagttccagagcaacctggtggtgcaccggcgcagccacactggagagaagccctacaagtgcaacctgtgtgaccacgcctgcacccaggccagcaagctgaagaggcacatgaagacccacatgcacaagagcagccccatgacagtgaagagtgatgatggcctgagcacagccagcagccctgagcccggcaccagtgacctggtgggcagcgccagcagcgccctgaagtctgtggtggccaagttcaagtcagaaaatgaccccaacctgatcccagaaaatggagatgaggaggaggaggaggatgatgaggaggaggaggaggaggaggaggaggaggaggaggagctgacagagagcgagcgggtggactatggcttcggcctgagcctggaggccgcccggcaccacgagaacagcagcagaggagctgtggtgggcgtgggagatgagagccgggccctgcctgatgtgatgcagggcatggtgctgagctccatgcagcacttcagcgaggccttccaccaggtgctgggggagaagcacaagaggggccacctggccgaggccgagggccaccgggacacctgtgatgaagattctgtggccggggagagtgacagaattgatgatggcaccgtgaatggccggggctgcagccctggagagagcgccagcggcggcctgagcaagaagctgctgctgggcagccccagcagcctgagccccttcagcaagaggatcaagctggagaaggagtttgacctgcccccagctgccatgcccaacacagaaaatgtgtacagccagtggctggccggctacgccgccagccggcagctgaaggaccccttcctgagctttggagacagccggcagagcccctttgccagcagcagcgagcacagcagtgaaaatggcagcctgcgcttcagcaccccacctggagagctggatggcggcatcagcggccgcagcggcaccggcagcggcggcagcaccccccacatcagcggccctggccctggccggcccagcagcaaggagggcagaagaagtgacacctgtgagtactgcggcaaggtgttcaagaactgcagcaacctgactgtgcacagaagaagccacactggagagcggccctacaagtgtgagctgtgcaactatgcctgtgcccagagcagcaagctgaccaggcacatgaagacccacggccaggtgggcaaggatgtgtacaagtgtgagatctgcaagatgcccttctctgtgtacagcaccctggagaagcacatgaagaagtggcacagcgacagagtgctgaacaatgacatcaagacagaatag

SEQ ID NO: 213546 - DNA, 2508 bp, Artificial Sequence
  derived and/or modified sequence
atgagccggcggaagcagggcaagccccagcacctgagcaagcgggaattctcacccgaaccccttgaggccatcctaacagatgacgagccagatcacgggccactgggagctcctgagggcgatcacgaccttctcacatgtggccagtgccaaatgaattttccattaggagacatactgatttttatagagcacaagcgtaagcagtgcaatgggtctttatgcctcgaaaaagccgtggataagccaccttcgcccagtcctatcgagatgaagaaggctagtaatcccgttgaggtcggaattcaggtgactcccgaggacgacgattgcctgagcacgagcagccgcggtatttgcccgaagcaggagcacatagccgacaaactcttgcactggagaggcctctcatctcctcggtcagcccacggagctctaattcctacccccggaatgtccgccgagtatgccccacagggcatttgtaaggatgaaccaagttcctacacttgcacaacctgtaagcaaccgttcacatctgcttggttcctccttcagcatgcccagaatacacatggcctgaggatttatcttgagagtgaacacggatctcccctgaccccccgggtcggtatcccttcagggctgggggctgagtgcccttctcagcccccactgcacggtatccacatcgccgataataaccctttcaatctgctgaggattcctggctctgtctccagagaggctagcggtctagcagaaggacgattccctcccaccccccctcttttctctcctccaccgcgtcaccatttggacccgcacaggattgagcggctcggggccgaggaaatggccctggcgacccaccacccatctgccttcgatcgagtgctgcggctcaatcctatggccatggagccacccgccatggatttctctcgaagactgagggaactggctggtaacaccagttcccctccactcagtcctggccgcccttctcccatgcaacggctgcttcaaccattccaacctggttcaaagccacctttcctggcaacccctcccctgccccccctgcagtctgcgcctccccctagccagcccccagtaaaatctaagtcgtgcgagttttgcggtaagacattcaagttccagtccaatcttgtggtgcacagaagaagtcacacaggagaaaagccatataagtgtaatctatgcgatcacgcgtgtactcaggcatctaagctcaagaggcacatgaaaacccatatgcacaaatccagccccatgactgtaaagtccgatgacggcctaagcactgcttctagcccagagccaggaactagcgatctggtgggatcggcatccagcgccctgaaaagtgtagtggctaaatttaaatccgagaacgatcctaacctgatcccggaaaatggcgatgaggaggaggaagaggacgacgaggaggaggaggaggaagaggaagaggaagaagaggagctgactgaaagcgaacgtgttgattacggctttggattgtccctggaggcagcaagacaccatgagaattcatctcgcggagcagtggtgggagtgggtgatgagtcaagagcccttcctgatgtgatgcaaggaatggtgctgagcagcatgcagcacttttcggaagctttccaccaggttctcggggagaaacataaacgcggtcacttggccgaggccgagggacaccgcgatacctgcgacgaggatagcgtggctggtgaatccgaccgcatcgatgacggcaccgtaaacggcagagggtgcagccctggtgaaagcgccagcggcggtttgtcaaagaagctattgctggggagcccaagtagcttgagcccattcagcaagcgtattaaactcgaaaaagagttcgaccttccacctgccgccatgcctaataccgagaacgtctactcacaatggctcgccggatatgccgcttctcggcagctgaaagaccctttcttaagttttggcgatagtaggcaaagcccttttgcctcatccagcgagcatagtagcgaaaatggcagcctacgatttagcacccccccaggagaattagatggcggcattagcggtagaagcgggacaggctcggggggatcgaccccgcatattagcggccccggacctggaaggccaagctccaaagaaggcagacgtagcgacacatgcgagtattgcggcaaggtgttcaagaattgtagtaatctcacggtgcacagaagaagtcatactggtgagcgaccctataaatgtgagctctgcaattatgcttgcgcacagtcatctaagctaaccaggcacatgaaaactcacggtcaagtgggcaaggacgtgtacaaatgtgagatttgcaaaatgcccttctccgtctatagcaccttagaaaaacacatgaagaagtggcattccgatagggtgttgaacaacgatataaaaaccgaatag

SEQ ID NO: 213547 - DNA, 2508 bp, Artificial Sequence
  derived and/or modified sequence
atgtcccggaggaaacaaggaaaaccgcagcatttgtccaagcgggagttctcacccgaaccgctggaggcaattctgacagacgacgaacccgaccatgggccacttggggcacctgagggtgatcacgacttacttacctgcggtcagtgtcaaatgaatttccccttaggggatatccttatctttattgagcacaagcggaaacagtgtaatggctccttatgcttggagaaagccgttgacaagccccctagcccctctcccatcgaaatgaagaaggccagcaatcccgttgaagtgggcattcaggtaacccctgaggatgatgattgcctgtccacttcatcaagggggatatgcccaaaacaggagcatatcgcggataaactgctccattggcgtgggctcagttctcctcgttccgcccacggggcactgatccctacgcctgggatgtccgccgagtacgctccccaggggatatgcaaggatgaaccctccagctacacctgtaccacatgtaagcagcccttcacctcagcttggtttctgctgcagcacgcgcaaaacacccacggactgagaatttatttggagtctgagcacggctctcccctgacacccagggtgggaataccttccggcctcggtgctgaatgcccttcccaaccaccccttcacggcattcacatagccgataacaatccctttaatctcctccggattccagggagcgtgtctcgcgaagcttccggcctggccgaaggacggttcccgccaacaccaccactgttcagccctcctccaagacaccatctagatccccaccgtatcgaaagactcggcgctgaggagatggccctggcaacccaccacccttccgcctttgaccgcgtgctcaggctgaatcccatggcaatggagcctcccgcaatggacttttctagaagactgcgtgagctagctggcaacacctcttcaccaccgctgagcccagggagaccctcacctatgcagaggctgctgcagccttttcaacctggctccaagcctccctttctggccactccccctctgcctcctctgcagtctgcgcctcctccatcacagcccccagtgaaaagtaagtcctgcgagttctgcgggaagacattcaaattccaatcaaatctggtcgtgcataggagaagccacactggtgagaagccttacaaatgcaatttatgtgatcatgcctgtacccaggcaagtaaactcaaacgccacatgaaaacacacatgcacaaatctagcccaatgacagtgaaatcagatgacggcttaagcacggctagtagtccagagcccggtacatcggatctggttggttctgcatcctccgccttgaaatccgtggtggccaagttcaaaagcgaaaacgacccaaatctaattcccgagaacggggatgaggaagaggaggaggatgatgaggaagaggaagaagaagaggaggaagaggaagaggaattgaccgaatctgaaagggtagattacggctttggactgagcctggaagcagctagacaccacgagaactccagcaggggagccgtagtaggcgttggtgacgagagccgcgcactgcccgatgtcatgcagggaatggtgctttccagtatgcaacatttttcggaagcgttccatcaagtattgggggaaaagcataagaggggtcacctagccgaggccgaaggtcaccgagacacctgtgacgaggattccgttgcaggcgaatcagaccgtattgatgacggtaccgtgaacggtagaggttgctcaccgggtgagtccgcttccggaggcctgagtaagaagctactcttgggctcacccagcagcctgtcccctttttctaagcgcattaagttagagaaagagttcgatttgcccccagctgccatgcccaatacagaaaacgtctatagccaatggcttgcgggatatgctgccagccgtcagctgaaggatccattcctctcttttggggatagtcgtcagagccccttcgcatcctccagcgagcatagtagtgagaatggatccctcaggttctctaccccgccaggcgaattggatggcggaattagcggcaggtcaggcactggcagcgggggtagtacaccccatatctctggtcctggaccgggaagaccatcgtccaaagaggggcgaagaagcgacacttgtgaatactgtggcaaagtgttcaagaactgctctaatttgaccgtacacagacgttcacacactggagagcgtccatataaatgcgaactctgtaactatgcttgcgcccaaagctcaaaattaaccagacatatgaagacccacgggcaggtcggcaaagatgtttataaatgtgagatatgtaaaatgccgttttcagtgtacagcactctggaaaaacatatgaaaaaatggcattctgacagggtactgaataacgacatcaaaaccgagtag

SEQ ID NO: 213548 - DNA, 5942 bp, Artificial Sequence
  derived and/or modified sequence
ttttttttttttttttgcttaaaaaaaagccatgacggctctcccacaattcatcttccctgcgccatctttgtattatttctaatttattttggatgtcaaaaggcactgatgaagatattttctctggagtctccttctttctaacccggctctcccgatgtgaaccgagccgtcgtccgcccgccgccgccgccgccgccgccgccgcccgccccgcagcccaccatgtctcgccgcaagcaaggcaaaccccagcacttaagcaaacgggaattctcgcccgagcctcttgaagccattcttacagatgatgaaccagaccacggcccgttgggagctccagaaggggatcatgacctcctcacctgtgggcagtgccagatgaacttcccattgggggacattcttatttttatcgagcacaaacggaaacaatgcaatggcagcctctgcttagaaaaagctgtggataagccaccttccccttcaccaatcgagatgaaaaaagcatccaatcccgtggaggttggcatccaggtcacgccagaggatgacgattgtttatcaacgtcatctagaggaatttgccccaaacaggaacacatagcagataaacttctgcactggaggggcctctcctcccctcgttctgcacatggagctctaatccccacgcctgggatgagtgcagaatatgccccgcagggtatttgtaaagatgagcccagcagctacacatgtacaacttgcaaacagccattcaccagtgcatggtttctcttgcaacacgcacagaacactcatggattaagaatctacttagaaagcgaacacggaagtcccctgaccccgcgggttggtatcccttcaggactaggtgcagaatgtccttcccagccacctctccatgggattcatattgcagacaataacccctttaacctgctaagaataccaggatcagtatcgagagaggcttccggcctggcagaagggcgctttccacccactccccccctgtttagtccaccaccgagacatcacttggacccccaccgcatagagcgcctgggggcggaagagatggccctggccacccatcacccgagtgcctttgacagggtgctgcggttgaatccaatggctatggagcctcccgccatggatttctctaggagacttagagagctggcagggaacacgtctagcccaccgctgtccccaggccggcccagccctatgcaaaggttactgcaaccattccagccaggtagcaagccgcccttcctggcgacgccccccctccctcctctgcaatccgcccctcctccctcccagcccccggtcaagtccaagtcatgcgagttctgcggcaagacgttcaaatttcagagcaacctggtggtgcaccggcgcagccacacgggcgagaagccctacaagtgcaacctgtgcgaccacgcgtgcacccaggccagcaagctgaagcgccacatgaagacgcacatgcacaaatcgtcccccatgacggtcaagtccgacgacggtctctccaccgccagctccccggaacccggcaccagcgacttggtgggcagcgccagcagcgcgctcaagtccgtggtggccaagttcaagagcgagaacgaccccaacctgatcccggagaacggggacgaggaggaagaggaggacgacgaggaagaggaagaagaggaggaagaggaggaggaggagctgacggagagcgagagggtggactacggcttcgggctgagcctggaggcggcgcgccaccacgagaacagctcgcggggcgcggtcgtgggcgtgggcgacgagagccgcgccctgcccgacgtcatgcagggcatggtgctcagctccatgcagcacttcagcgaggccttccaccaggtcctgggcgagaagcataagcgcggccacctggccgaggccgagggccacagggacacttgcgacgaagactcggtggccggcgagtcggaccgcatagacgatggcactgttaatggccgcggctgctccccgggcgagtcggcctcggggggcctgtccaaaaagctgctgctgggcagccccagctcgctgagccccttctctaagcgcatcaagctcgagaaggagttcgacctgcccccggccgcgatgcccaacacggagaacgtgtactcgcagtggctcgccggctacgcggcctccaggcagctcaaagatcccttccttagcttcggagactccagacaatcgccttttgcctcctcgtcggagcactcctcggagaacgggagtttgcgcttctccacaccgcccggggagctggacggagggatctcggggcgcagcggcacgggaagtggagggagcacgccccatattagtggtccgggcccgggcaggcccagctcaaaagagggcagacgcagcgacacttgtgagtactgtgggaaagtcttcaagaactgtagcaatctcactgtccacaggagaagccacacgggcgaaaggccttataaatgcgagctgtgcaactatgcctgtgcccagagtagcaagctcaccaggcacatgaaaacgcatggccaggtggggaaggacgtttacaaatgtgaaatttgtaagatgccttttagcgtgtacagtaccctggagaaacacatgaaaaaatggcacagtgatcgagtgttgaataatgatataaaaactgaatagaggtatattaatacccctccctcactcccacctgacaccccctttttcaccactccccttccccatcgccctccagccccactccctgtaggatttttttctagtcccatgtgatttaaacaaacaaacaaacaaacagaagtaacgaagctaagaatatgagagtgcttgtcaccagcacacctgttttttttctttttctttttcttttttctttttccttttttttttttttcctttatgttctcaccgtttgaatgcatgatctgtatggggcaatactattgcattttacgcaaactttgagcctttctcttgtgcaataatttacatgttgtgtatgtttttttttaaacttagacagcatgtatggtatgttatggctattttaaattgtccctaattcgttgctgagcaaacatgttgctgtttccagttccgttctgagagaaaaagagagagagagagaaaaagaccatgctgcatacattctgtaatacatatcatgtacagttttattttataacgtgaggaggaaaaacagtctttggattaaccctctatagacagaatagatagcactgaaaaaaaatctctatgagctaaatgtctgtctctaaagggttaaatgtatcaattggaaaggaagaaaaaaggccttgaattgacaaattaacagaaaaacagaacaagtttattctatcatttggttttaaaatatgagtgccttggatctattaaaaccacatcgatggttctttctacttgttataaacttgtagcttaattcagcattgggtgaggtaataaaccttaggaactagcatataattctatattgtatttctcacaacaatggctacctaaaaagatgacccattatgtcctagttaatcatcatttttcctttagtttaattttataaacaaaactgattataccagtataaaagctactttgctcctggtgagagcttaaaagaaatgggctgttttgcccaaagttttattttttttaaacaatgattaaattgaatgtgtaatgtgcaaaagccctggaacgcaattaaatacactagtaaggagttcattttatgaagatatttgctttaataatgtctttttaaaaatactggcaccaaaagaaatagatccagatctacttggttgtcaagtggacaatcaaatgataaactttaagaccttgtataccatattgaaaggaagaggctgacaataaggtttgacagaggggaacagaagaaaataatatgatttattagcacaacgtggtactatttgccatttaaaactagaacaggtatataagctaatattgatacaatgatgattaactatgaattcttaagacttgcatttaaatgtgacattcttaaaaaaagaagagaaagaattttaagagtagcagtatatatgtctgtgctccctaaaagttgtacttcatttcttttccatacactgtgtgctatttgtgttaacatggaagaggattcattgtttttatttttatttttttaattttttcttttttattaagctagcatctgccccagttggtgttcaaatagcacttgactctgcctgtgatatctgtatcttttctctaatcagagatacagaggttgagtataaaataaacctgctcagataggacaattaagtgcactgtacaattttcccagtttacaggtctatacttaagggaaaagttgcaagaatgctgaaaaaaaattgaacacaatctcattgaggagcattttttaaaaactaaaaaaaaaaaaactttgccagccatttacttgactattgagcttacttacttggacgcaacattgcaagcgctgtgaatggaaacagaatacacttaacatagaaatgaatgattgctttcgcttctacagtgcaaggatttttttgtacaaaacttttttaaatataaatgttaagaaaaattttttttaaaaaacacttcattatgtttaggggggaactgcattttagggttccattgtcttggtggtgttacaagacttgttatccatttaaaaatggtagtggaaattctatgccttggatacacaccgctcttcaggttgtaaaaaaaaaaaacatacattggggaaaggtttaagattatatagtacttaaatataggaaaatgcacactcatgttgattcctatgctaaaatacatttatggtcttttttctgtatttctagaatggtatttgaattaaatgttcatctagtgttaggcactatagtatttatattgaagcttgtatttttaactgttgcttgttctcttaaaaggtatcaatgtaccttttttggtagtggaaaaaaaaaagacaggctgccacagtatatttttttaatttggcaggataatatagtgcaaattatttgtatgcttcaaaaaaaaaaaaaagagagaaacaaaaaagtgtgacattacagatgagaagccatataatggcggtttgggggagcctgctagaatgtcacatggatggctgtcataggggttgtacatatccttttttgttcctttttcctgctgccatactgtatgcagtactgcaagctaataacgttggtttgttatgtagtgtgctttttgtccctttccttctatcaccctacattccagcatcttaccttcatatgcagtaaaagaaagaaagaaaaaaaaaggaaaaaaaaaaaaaaaccaatgttttgcagtttttttcattgccaaaaactaaatggtgctttatatttagattggaaagaatttcatatgcaaagcatattaaagagaaagcccgctttagtcaatacttttttgtaaatggcaatgcagaatattttgttattggccttttctattcctgtaatgaaagctgtttgtcgtaacttgaaattttatcttttactatgggagtcactatttattattgcttatgtgccctgttcaaaacagaggcacttaatttgatcttttatttttctttgtttttatttttttttttatttagatgaccaaaggtcattacaacctggctttttattgtatttgtttctggtctttgttaagttctattggaaaaaccactgtctgtgtttttttggcagttgtctgcattaacctgttcatacacccattttgtccctttattgaaaaaataaaaaaaattaaag

SEQ ID NO: 213549 - DNA, 2508 bp, Artificial Sequence
  derived and/or modified sequence
atgagcagaagaaagcagggcaagccccagcacctgagcaagagagagttcagccccgagcccctggaggccatcctgaccgacgacgagcccgaccacggccccctgggcgcccccgagggcgaccacgacctgctgacctgcggccagtgccagatgaacttccccctgggcgacatcctgatcttcatcgagcacaagagaaagcagtgcaacggcagcctgtgcctggagaaggccgtggacaagccccccagccccagccccatcgagatgaagaaggccagcaaccccgtggaggtgggcatccaggtgacccccgaggacgacgactgcctgagcaccagcagcagaggcatctgccccaagcaggagcacatcgccgacaagctgctgcactggagaggcctgagcagccccagaagcgcccacggcgccctgatccccacccccggcatgagcgccgagtacgccccccagggcatctgcaaggacgagcccagcagctacacctgcaccacctgcaagcagcccttcaccagcgcctggttcctgctgcagcacgcccagaacacccacggcctgagaatctacctggagagcgagcacggcagccccctgacccccagagtgggcatccccagcggcctgggcgccgagtgccccagccagccccccctgcacggcatccacatcgccgacaacaaccccttcaacctgctgagaatccccggcagcgtgagcagagaggccagcggcctggccgagggcagattcccccccaccccccccctgttcagccccccccccagacaccacctggacccccacagaatcgagagactgggcgccgaggagatggccctggccacccaccaccccagcgccttcgacagagtgctgagactgaaccccatggccatggagccccccgccatggacttcagcagaagactgagagagctggccggcaacaccagcagcccccccctgagccccggcagacccagccccatgcagagactgctgcagcccttccagcccggcagcaagccccccttcctggccaccccccccctgccccccctgcagagcgcccccccccccagccagccccccgtgaagagcaagagctgcgagttctgcggcaagaccttcaagttccagagcaacctggtggtgcacagaagaagccacaccggcgagaagccctacaagtgcaacctgtgcgaccacgcctgcacccaggccagcaagctgaagagacacatgaagacccacatgcacaagagcagccccatgaccgtgaagagcgacgacggcctgagcaccgccagcagccccgagcccggcaccagcgacctggtgggcagcgccagcagcgccctgaagagcgtggtggccaagttcaagagcgagaacgaccccaacctgatccccgagaacggcgacgaggaggaggaggaggacgacgaggaggaggaggaggaggaggaggaggaggaggaggagctgaccgagagcgagagagtggactacggcttcggcctgagcctggaggccgccagacaccacgagaacagcagcagaggcgccgtggtgggcgtgggcgacgagagcagagccctgcccgacgtgatgcagggcatggtgctgagcagcatgcagcacttcagcgaggccttccaccaggtgctgggcgagaagcacaagagaggccacctggccgaggccgagggccacagagacacctgcgacgaggacagcgtggccggcgagagcgacagaatcgacgacggcaccgtgaacggcagaggctgcagccccggcgagagcgccagcggcggcctgagcaagaagctgctgctgggcagccccagcagcctgagccccttcagcaagagaatcaagctggagaaggagttcgacctgccccccgccgccatgcccaacaccgagaacgtgtacagccagtggctggccggctacgccgccagcagacagctgaaggaccccttcctgagcttcggcgacagcagacagagccccttcgccagcagcagcgagcacagcagcgagaacggcagcctgagattcagcaccccccccggcgagctggacggcggcatcagcggcagaagcggcaccggcagcggcggcagcaccccccacatcagcggccccggccccggcagacccagcagcaaggagggcagaagaagcgacacctgcgagtactgcggcaaggtgttcaagaactgcagcaacctgaccgtgcacagaagaagccacaccggcgagagaccctacaagtgcgagctgtgcaactacgcctgcgcccagagcagcaagctgaccagacacatgaagacccacggccaggtgggcaaggacgtgtacaagtgcgagatctgcaagatgcccttcagcgtgtacagcaccctggagaagcacatgaagaagtggcacagcgacagagtgctgaacaacgacatcaagaccgagtag

SEQ ID NO: 213550 - protein, 736 aa, Artificial Sequence
  derived and/or modified sequence
MKEMSANTVLDSQRQQKHYGITSPISLASPKEIDHIYTQKLIDAMKPFGVFEDEEELNHRLVVLGKLNNLVKEWISDVSESKNLPPSVVATVGGKIFTFGSYRLGVHTKGADIDALCVAPRHVERSDFFQSFFEKLKHQDGIRNLRAVEDAFVPVIKFEFDGIEIDLVFARLAIQTISDNLDLRDDSRLRSLDIRCIRSLNGCRVTDEILHLVPNKETFRLTLRAVKLWAKRRGIYSNMLGFLGGVSWAMLVARTCQLYPNAAASTLVHKFFLVFSKWEWPNPVLLKQPEESNLNLPVWDPRVNPSDRYHLMPIITPAYPQQNSTYNVSTSTRTVMVEEFKQGLAVTDEILQGKSDWSKLLEPPNFFQKYRHYIVLTASASTEENHLEWVGLVESKIRVLVGNLERNEFITLAHVNPQSFPGNKEHHKDNNYVSMWFLGIIFRRVENAESVNIDLTYDIQSFTDTVYRQANNINMLKEGMKIEATHVKKKQLHHYLPAEILQKKKKQSLSDVNRSSGGLQSKRLSLDSSCLDSSRDTDNGTPFNSPASKSDSPSVGETERNSAEPAAVIVEKPLSVPPAQGLSIPVIGAKVDSTVKTVSPPTVCTIPTVVGRNVIPRITTPHNPAQGQPHLNGMSNITKTVTPKRSHSPSIDGTPKRLKDVEKFIRLESTFKDPRTAEERKRKSVDAIGGESMPIPTIDTSRKKRLPSKELPDSSSPVPANNIRVIKNSIRLTLNR

SEQ ID NO: 213551 - DNA, 2211 bp, Artificial Sequence
  derived and/or modified sequence
atgaaagagatgtctgcaaacacagtactagatagtcagcgccagcaaaagcattacggaattacttctccaatctccctcgcatcaccaaaagagattgaccatatatacacacagaaactcatcgatgctatgaaaccattcggcgtttttgaggacgaagaggagctgaaccaccgcctggtagtccttggcaaactgaacaacctggttaaagaatggatctccgacgtgagcgagagtaaaaacctgccccccagtgtggtggcaaccgttggcgggaagatcttcaccttcggcagttaccgcctcggcgtccacacaaagggcgcagatatcgacgcactctgtgtggcgccccgtcacgtcgaacgttccgactttttccagagcttcttcgagaagttgaaacaccaggatggtatccgaaatctgcgggccgtcgaggacgccttcgtaccggtgattaaatttgagtttgacggtatagaaatcgacctggtgtttgccaggctagctatacagactatcagtgataacttggatctccgagacgatagcagactgaggtctctggacatccgatgtatacggtctctgaacggatgtagagtgaccgacgagattctacaccttgtccctaacaaggagacttttaggttaaccctgcgagccgtgaaactttgggcaaaaagaagagggatctatagcaatatgcttgggttcctgggcggggtctcttgggcgatgctagtcgctcgcacctgtcagctatatcccaatgccgccgcatccacactggtccacaaattttttttggtcttttcaaagtgggaatggcctaaccctgtcctgttgaagcagccagaggaatcgaatttgaacttacctgtgtgggatcccagggtcaacccctcagacaggtatcatctgatgccgatcatcactcctgcctatccccaacagaactctacctacaacgtcagtactagcacaaggaccgtgatggtggaggagtttaagcaggggttagccgtgaccgatgagatcctccaggggaagagcgattggagcaaactgttagagccccccaatttttttcaaaagtacaggcactacattgttcttacagcctccgcgtctaccgaggaaaaccatttggagtgggtcggtctggtggagtcaaaaataagagtcctggtgggcaatttggaacgcaacgaattcataacactggcccatgttaatccccaaagttttccaggcaacaaagaacatcataaggataataactatgtgtcaatgtggttcttaggcattatctttaggcgggtggagaatgctgagtctgtgaacattgatctgacgtacgatatccaatctttcactgacacggtctataggcaagcaaataatatcaacatgttaaaagaggggatgaagatcgaggcaacccatgtgaagaaaaagcaacttcaccattatctccctgcagaaatactccaaaagaagaagaagcagagtctaagtgacgtgaatcgtagttcaggtggactccagagtaagagactgagcctggactcatcttgcctggattcatcacgagacacggacaatgggacaccttttaattcgcccgcctctaaatctgatagtccatctgtgggcgaaaccgagcgcaatagtgcagagcccgcagcagtgatcgtggagaaacccctgagcgttcccccagcacaaggccttagtattcccgtgatcggggcaaaagtggattcgacagtgaagactgtgtctccccccactgtttgtactattcccaccgtggtgggtaggaacgtgatccctaggattactacacctcacaatcctgcccaaggacagcctcatttaaatggcatgtccaatataacaaaaaccgttactcctaagcggtctcactctccaagcatcgacggcacaccgaaacgtttgaaagatgttgagaagttcattcgcttggagagcactttcaaagacccgcgaacagccgaagagcgtaagcgcaagtcagtggatgcaatcgggggcgagtccatgcccattcccaccatcgatacctcacgcaagaagcgattacccagcaaagagctcccagattctagcagtccggtacccgctaacaatatccgtgtgataaagaactcaattcgcctgaccctcaacagatag

SEQ ID NO: 213552 - DNA, 4263 bp, Artificial Sequence
  derived and/or modified sequence
ctgagacctgcgagaggcaggctgggaagcggcgccatattggcgtcggccgcgctgtattgtcataaatagagccggttttgtggtgttttcactactcggttggatgcctcagccatagtaagtgggaaagtgagcgagcaagcgagctactagcgaccggaggaaagtgaacagggggagaagggaacagcaagaacaggactccagagcgataaacactcgctggagagggagacgcaggaagcgatgaaagagatgtctgcaaacaccgtgctggacagccagcgtcaacaaaagcattatggaattacctccccaattagtttggcatctcctaaagaaattgatcatatttacacacagaaattaattgacgccatgaaaccatttggagtgtttgaagatgaggaagaattgaaccacaggctggtggttcttggtaaattgaacaatttagtaaaagaatggatttctgatgtcagcgagagtaagaacctcccaccttctgttgtggctactgttggtggtaaaattttcacatttggatcctataggcttggagtacacaccaaaggagctgacattgatgcactttgtgtagctccaagacatgtggaaagatctgatttttttcagtctttttttgaaaaattgaaacatcaagatggcattagaaacttaagagctgtagaagatgcctttgtacctgttataaaatttgaatttgatggtattgaaattgatctagtctttgcaagactggcaatacaaaccatatcagataatttagatctaagagacgactctcgcctgagaagccttgatataaggtgtattcgcagcttaaatggttgtagagttactgatgaaattttgcatttagtgccaaataaagaaacttttagactcaccctaagagctgtcaaattatgggcaaaacgacgtggtatttattccaacatgctaggattccttggtggtgtctcctgggcaatgctagttgcaagaacttgccaattgtatccaaatgcagcagcatctactttagttcataagttctttttagttttttccaagtgggaatggccaaatcctgtgctgctgaagcaaccagaagaaagcaatttgaatttgcctgtctgggatcctcgggtaaatccatcagataggtatcatctcatgcccataatcacccctgcctacccacaacagaattctacgtataatgtgtccacatcaactcgaacagtaatggtagaagaatttaaacaaggtcttgcagtcacagatgaaattcttcaaggaaagtcagattggtccaaactacttgagccaccgaatttctttcaaaagtatagacattatatagtattgactgccagcgcatcaacagaagaaaaccatctagagtgggttggattagtagaatctaaaatccgtgtacttgttggaaacttggaacggaatgaatttattactcttgcccatgtgaatccccagtcattcccagggaataaggaacatcataaagacaacaattacgtatcaatgtggttccttgggataatttttcggagagtagaaaatgcagaaagtgtcaacatagacttgacatatgatatacagtcatttactgatacagtgtacagacaggcaaacaatataaatatgctaaaggagggaatgaaaattgaagcaactcatgtaaagaaaaaacaacttcaccactaccttcctgcagaaattcttcaaaagaagaaaaagcaaagtctctctgatgtcaatcgaagctcgggcggacttcaatccaaaagattgtctctggatagcagttgtctggatagctccagagacactgataatggaacaccttttaattctccagcgtccaagtctgatagcccttctgtaggagaaacagaaaggaatagtgctgagcctgctgctgtaattgtggagaagccactgagtgtaccaccagcccaaggactttccattccagtgattggcgcaaaagttgactctacagtaaaaactgtatcaccccccactgtgtgtaccattcctaccgtagtaggacgaaatgtcattcctagaatcacaacacctcacaaccctgcccagggacaaccgcatctgaatggaatgtcaaatataactaagactgttacacctaagagatcccattccccatccatagatgggactcctaagaggttgaaagacgtagaaaagtttattcgacttgaatcaacatttaaggacccccgcactgctgaagaaagaaaaagaaaatcagtggatgccattggaggagaatctatgcctattccaactattgatacatcacgcaaaaagagactacccagtaaagaactaccagattcatcatctccagttccagcaaacaacatccgtgtcatcaaaaattccattcgactgacccttaatcggtaaaagcagtgcctcctcacttaagtgaacaagcaatcatttagtggcatagatgcagccacttgttttttaaatagaagtggctgtcatacgtgaaataaggtgaaagtgacagccttcagtctaataaccttgaagtggtttttgaactgtcaaactttgacctgtagatgctgtagcattctctcactgattgctacatacacttctctgaggatcacctgctgtcaaattgccatctacagtattacagctttgcatttgggggttttactgccttaactttcaatgcttgttatgggaaccagttcttagccacttggacactgataacaagtcctgaactccttttttgttttgttttttgtgtttttctttttttgtcttatgttgtaatcattgtatagagctaaaaaaattgaaaacaaacaaaaaaattgtcttgtattttccaaatgttaatacatttactttagcattgaagccactttgaaacctgagataaatgaatgtgaggtatcttttctgctttcctcatttgtgtagatgtactgtctgttctgttgatttaaattatttttttccagattggcacatgaaatatttaaacttttttgtgtgcctttctgtccaaatgttgcatagttaccagggaagattagtccagtgattacataagagttgggcaccataaattctctatattttgcctcccatggaggcctttgaaatgcatctttattaaaaatcaaaatataaccaggatactgaaagtcagtatatgaatggtaaaattgttacatatcctatttcatgccattcttgttagttgactggtattttttactgaggagcaactcattccagcatcaacaataagataacctttaagtatggcacacttgtatttttgaggtgtaaaattaacttggcatgataattcctgatcattatttaccccacaacttcaaatagtttcttcacggactaggcatgcagaaataagcagtggattttattgaaacctaaaggcattttgaatgacattgttaccaaccattaattggctcaggacctttgtaatttttatttaactatatgagttgtctttttttacgctgcttttttcaatgcatttcttaatattttttaagtttcatgaatgcatgctcagtttattaaaatccataaccatgtaattcttgtaatatgttgattcagtgttttgtaaatgaagtcgtatgtattttcagagtatttttgtatgtactgtaagataccatcttttcaaagagaaacgtttaaaacctttattgtctctccttagtctaattttttaaatatggattatgcttgaattactatatttaaaatgaaaatgtatagattacacagccaggaatgctagtatctaccaccttctttagatttcactcagcatttagtaggtccagtaggaaaaacccaaaatggtacattgagtagtgtggggaagacacctcgtgtattataggactcacgggatgccatctagcaagtggagaaatagcagtccattttctcttgcaagccctttaccattgagttgaaattcttgaattgccagagagccgtatcctccaggtcccactcctgttcattgccccttaggtctccaaaatgtaaattctaatgtttaccttgtaccatggaaaacatgaaaagagtcttagaagtaaagaacaacaaggaaaaaaatgtttgttctattattccctttttatatagcagcaaaagataagaataaaatcacataaccaagttgaa

SEQ ID NO: 213553 - DNA, 2211 bp, Artificial Sequence
  derived and/or modified sequence
atgaaggagatgtctgccaacacagtgctggacagccagaggcagcagaagcactacggcatcaccagccccatcagcctggccagccccaaggagattgaccacatctacacccagaagctgattgatgccatgaagcccttcggcgtgtttgaagatgaggaggagctgaaccaccggctggtggtgctgggcaagctgaacaacctggtgaaggagtggatcagtgatgtgtctgagagcaagaacctgcccccatctgtggtggccaccgtgggcggcaagatcttcaccttcggcagctaccgcctgggcgtgcacaccaagggagctgacattgatgccctgtgtgtggcccccaggcatgtggagaggagtgacttcttccagagcttctttgagaagctgaagcaccaggacggcatccggaacctgcgggctgtggaggatgcctttgtgcctgtgatcaagtttgaatttgatggcattgaaattgacctggtgtttgcccggctggccatccagaccatcagtgacaacctggacctgagagatgacagccggctgcggagcctggacatccgctgcatccgcagcctgaatggctgccgggtgacagatgagatcctgcacctggtgcccaacaaggagaccttccggctgaccctgcgggctgtgaagctgtgggccaagaggcggggcatctacagcaacatgctgggcttcctgggcggcgtgtcctgggccatgctggtggcccggacctgccagctgtacccaaatgctgctgccagcaccctggtgcacaagttcttcctggtgttcagcaagtgggagtggcccaaccctgtgctgctgaagcagcctgaggagagcaacctgaacctgcctgtgtgggacccccgggtgaaccccagcgaccgctaccacctgatgcccatcatcaccccagcctacccccagcagaacagcacctacaacgtgtccaccagcaccaggacagtgatggtggaggagttcaagcagggcctggccgtgacagatgagatcctgcagggcaagagtgactggagcaagctgctggagccccccaacttcttccagaagtaccgccactacatcgtgctgacagccagcgccagcacagaggagaaccacctggagtgggtgggcctggtggagagcaagatccgggtgctggtgggcaacctggagagaaatgagttcatcaccctggcccacgtgaacccccagagcttccctggcaacaaggagcaccacaaggacaacaactacgtgtccatgtggttcctgggcatcatcttcagaagagtggagaatgctgagagcgtgaacatcgacctgacctatgacatccagagcttcacagacacagtgtaccggcaggccaacaacatcaacatgctgaaggagggcatgaagattgaggccacccacgtgaagaagaagcagctgcaccactacctgcctgctgagatcctgcagaagaagaagaagcagagcctgagtgatgtgaacagaagcagcggcggcctgcagagcaagaggctgagcctggacagcagctgcctggacagcagccgggacacagacaatggcacccccttcaacagccctgccagcaagagtgacagccccagcgtgggggagacagagaggaacagcgctgagcctgctgctgtgattgtggagaagcccctgtctgtgcccccagcccagggcctgagcatccctgtgattggagccaaggtggacagcacagtgaagacagtgagcccccccaccgtgtgcaccatccccaccgtggtgggcagaaatgtcatcccccgcatcaccaccccccacaacccagcccagggccagccccacctgaatggcatgagcaacatcaccaagacagtgacccccaagaggagccacagccccagcattgatggcacccccaagaggctgaaggatgtggagaagttcatccggctggagagcaccttcaaggaccccaggacagctgaggagaggaagaggaagtctgtggatgccatcggcggggagagcatgcccatccccaccatcgacaccagcaggaagaagaggctgcccagcaaggagctgcctgacagcagcagccctgtgcctgccaacaacatccgggtcatcaagaacagcatccggctgaccctgaacagatag

SEQ ID NO: 213554 - DNA, 2211 bp, Artificial Sequence
  derived and/or modified sequence
atgaaggagatgagcgccaacaccgtgctggacagccagcggcagcagaaacattatggaattacctctcctatctctttggcctcaccgaaggagattgaccacatttatacgcagaaactaattgatgctatgaagccatttggcgtgttcgaagatgaagaagaacttaaccatcggctcgttgtcttggggaaactgaataatctcgttaaagagtggatctctgatgttagtgagagcaagaaccttcccccgagcgtcgtcgcgactgttggcgggaaaatattcacgtttgggagctatagactgggtgtccataccaaaggagccgatatcgatgctctttgcgtggccccgaggcacgtggagcgcagcgacttcttccaaagcttctttgagaagctcaagcaccaggacggcattcgaaacttgcgggccgtcgaagacgcatttgtgcctgtcattaaattcgagtttgacggcattgaaatcgacttagtgttcgcaaggctcgcaatccaaacgatcagcgacaacctcgacctccgggacgatagtagacttagatcactggatatacgttgtatcaggagcctgaacggatgtcgcgtcactgacgaaatactccacctggtgcccaataaggaaaccttcagacttacattgcgtgccgtgaagctgtgggcaaagcggaggggcatctacagcaatatgctggggttcttgggaggtgttagctgggctatgctggtcgctcgtacatgccagctatatccaaacgctgctgcctcaaccttagtgcacaagttcttccttgtcttcagcaaatgggagtggcctaatccggtccttttgaagcagccagaggaaagcaacctgaacctgccagtgtgggacccgcgggtcaacccaagtgatagatatcacctgatgcctataattacacccgcctaccctcaacagaattccacgtataacgttagcacgagtaccagaactgtgatggtcgaagaatttaagcagggcctggcagtcacagatgagattctgcagggaaaaagtgattggagcaagttgctggaacccccaaatttcttccagaaataccgccactacatcgtattaacggcgtcggcttctacggaggagaatcacctggagtgggtaggcctggtggaaagcaaaattcgggtgttggtcggaaatcttgagaggaacgaatttattacgttagcgcatgtgaatccccagtctttcccgggaaacaaagagcatcacaaggataacaactacgtatctatgtggttcctagggataattttccgcagagtggaaaacgcagaaagcgtgaacatcgatctaacctatgatatccagagcttcaccgacacagtttaccgccaggctaataatataaacatgctgaaagagggcatgaaaatagaggcaactcatgtcaagaagaagcagctccaccattatctcccagccgagatactccagaaaaagaaaaaacaaagtctatctgacgtcaacaggtcttccggcggccttcagtccaagagactgtccctggattctagctgtctggattcgagtcgagacacagacaacggcactcctttcaactcccccgcgagtaagtctgacagccctagtgtgggggagaccgagaggaattcagcggagcccgccgcagtgattgtagaaaagcccctgtctgttccaccagcgcaggggctgagtatccccgtgatcggtgcgaaggtggattctaccgttaagacagtcagcccacccaccgtctgcacaattccaaccgtggtaggacggaacgtaattcccaggattaccacaccacacaatccagcccagggacagccccatttaaatggtatgagcaacatcacaaagactgtcactcctaagcgtagccactcaccatctatcgatggcactcctaagagactgaaggatgttgagaaattcatcagactggaaagcacgttcaaagacccgcgtactgccgaagagcggaaacgtaaatctgtggatgccatcggtggggagtccatgcctattccaacaatcgatacctccaggaagaaaagactgccatctaaggagctgccggattcttccagccctgtgcccgcgaacaacattcgcgtaataaaaaatagcatcagattaacactaaatagatag

SEQ ID NO: 213555 - DNA, 2211 bp, Artificial Sequence
  derived and/or modified sequence
atgaaggagatgtctgctaacaccgtgcttgacagccaacggcagcaaaagcattatggaattaccagcccgatctccctcgcctcacctaaagaaattgaccatatttatacacagaaactcatcgatgctatgaagccattcggcgtttttgaggacgaggaagaacttaaccatcgactggtcgtgcttggcaagctgaacaatttggtgaaggaatggatttccgatgtgagtgaaagcaagaatctacctccttctgtggtggcaaccgtggggggaaaaatcttcaccttcggctcctacagactgggcgtgcacaccaagggagcggacattgatgccctttgcgtggctccgagacatgtggaacgctctgatttcttccagtccttcttcgagaagctcaagcatcaggacgggatacgtaacttacgagccgtggaggacgcattcgtacctgtaatcaagtttgaattcgacggtatcgagatcgatctcgtgttcgcgaggctcgccattcagaccataagcgacaacctggatctgcgggacgatagcaggttgagaagtcttgatataaggtgtatccgctctctgaacggctgtcgggtgactgatgagattctgcacctcgtccctaacaaggagacttttcggctgaccctccgggcagttaagctatgggcgaagcggcgtggtatctattcaaacatgcttggatttctggggggtgtttcctgggccatgctcgtcgccaggacctgccagctctacccgaatgccgctgcttccactttggtgcacaagttttttctcgtatttagcaaatgggagtggccaaatcctgtgctcctgaaacagccagaagagtcaaatctgaatcttcccgtgtgggaccccagagtgaacccttctgatcggtaccacctaatgcccattatcacccccgcttatccacagcagaactctacgtacaatgtgtccacaagcacaaggactgtaatggtggaggagtttaaacagggacttgccgtgacagatgagatcttgcagggcaagagtgattggtctaaactcttagaaccaccaaatttcttccagaagtataggcactatattgtccttacagcatccgcttccacagaagagaatcacctggagtgggttgggctcgtggaaagtaagattcgtgtgctggtcggtaacctggagcgtaatgagttcattacgttggcgcacgttaacccacagagtttccccggaaacaaagagcaccataaggacaacaactacgttagcatgtggttcttagggataatcttcaggagagtggaaaatgctgagagcgtgaacatcgatctgacctatgatattcagtcgtttaccgatacggtttaccggcaggcaaacaacatcaatatgctcaaagagggcatgaagattgaagctacccacgttaaaaaaaaacaactccaccattatctccccgctgaaatcctccagaagaaaaaaaagcagagcttgtcagacgttaacaggagctctggcggactgcagtctaagagactgagtctggacagcagctgcctggatagcagtcgcgatacggacaatggcactccctttaacagtccggcatctaagtcggattccccgtctgtaggtgaaacagagaggaactctgctgagccagccgctgtgattgtcgaaaagcctctgtcagtgcccccagcacaggggctttccatccctgtcattggagccaaggtggattcaacagtgaagacagttagtcctcctaccgtgtgtactattccaacagtggtcggcagaaatgtgattccgagaattacgaccccacacaaccccgcacaggggcagccccaccttaatggaatgtctaatattaccaagacagtcacccccaaacggtcccacagccccagcattgatggaacgcccaaaaggctgaaggacgtggaaaaattcattcgactggagtccacattcaaagatccccgtactgcagaggaacgaaaacgaaagtctgtggacgcgataggcggagaaagtatgcctataccgaccatcgatacaagccggaaaaagagactgccatctaaagaattacccgacagctcctccccagtaccagctaacaatatccgagttatcaagaattcaatccggttgactcttaacagatag

SEQ ID NO: 213556 - DNA, 2211 bp, Artificial Sequence
  derived and/or modified sequence
atgaaggagatgagcgccaacaccgtgctggacagccagagacagcagaagcactacggcatcaccagccccatcagcctggccagccccaaggagatcgaccacatctacacccagaagctgatcgacgccatgaagcccttcggcgtgttcgaggacgaggaggagctgaaccacagactggtggtgctgggcaagctgaacaacctggtgaaggagtggatcagcgacgtgagcgagagcaagaacctgccccccagcgtggtggccaccgtgggcggcaagatcttcaccttcggcagctacagactgggcgtgcacaccaagggcgccgacatcgacgccctgtgcgtggcccccagacacgtggagagaagcgacttcttccagagcttcttcgagaagctgaagcaccaggacggcatcagaaacctgagagccgtggaggacgccttcgtgcccgtgatcaagttcgagttcgacggcatcgagatcgacctggtgttcgccagactggccatccagaccatcagcgacaacctggacctgagagacgacagcagactgagaagcctggacatcagatgcatcagaagcctgaacggctgcagagtgaccgacgagatcctgcacctggtgcccaacaaggagaccttcagactgaccctgagagccgtgaagctgtgggccaagagaagaggcatctacagcaacatgctgggcttcctgggcggcgtgagctgggccatgctggtggccagaacctgccagctgtaccccaacgccgccgccagcaccctggtgcacaagttcttcctggtgttcagcaagtgggagtggcccaaccccgtgctgctgaagcagcccgaggagagcaacctgaacctgcccgtgtgggaccccagagtgaaccccagcgacagataccacctgatgcccatcatcacccccgcctacccccagcagaacagcacctacaacgtgagcaccagcaccagaaccgtgatggtggaggagttcaagcagggcctggccgtgaccgacgagatcctgcagggcaagagcgactggagcaagctgctggagccccccaacttcttccagaagtacagacactacatcgtgctgaccgccagcgccagcaccgaggagaaccacctggagtgggtgggcctggtggagagcaagatcagagtgctggtgggcaacctggagagaaacgagttcatcaccctggcccacgtgaacccccagagcttccccggcaacaaggagcaccacaaggacaacaactacgtgagcatgtggttcctgggcatcatcttcagaagagtggagaacgccgagagcgtgaacatcgacctgacctacgacatccagagcttcaccgacaccgtgtacagacaggccaacaacatcaacatgctgaaggagggcatgaagatcgaggccacccacgtgaagaagaagcagctgcaccactacctgcccgccgagatcctgcagaagaagaagaagcagagcctgagcgacgtgaacagaagcagcggcggcctgcagagcaagagactgagcctggacagcagctgcctggacagcagcagagacaccgacaacggcacccccttcaacagccccgccagcaagagcgacagccccagcgtgggcgagaccgagagaaacagcgccgagcccgccgccgtgatcgtggagaagcccctgagcgtgccccccgcccagggcctgagcatccccgtgatcggcgccaaggtggacagcaccgtgaagaccgtgagcccccccaccgtgtgcaccatccccaccgtggtgggcagaaacgtgatccccagaatcaccaccccccacaaccccgcccagggccagccccacctgaacggcatgagcaacatcaccaagaccgtgacccccaagagaagccacagccccagcatcgacggcacccccaagagactgaaggacgtggagaagttcatcagactggagagcaccttcaaggaccccagaaccgccgaggagagaaagagaaagagcgtggacgccatcggcggcgagagcatgcccatccccaccatcgacaccagcagaaagaagagactgcccagcaaggagctgcccgacagcagcagccccgtgcccgccaacaacatcagagtgatcaagaacagcatcagactgaccctgaacagatag

SEQ ID NO: 213557 - protein, 262 aa, Artificial Sequence
  derived and/or modified sequence
MAAPSGTVSDSESSNSSSDAEELERCREAAMPAWGLEQRPHVAGKPRAGAANSQLSTSQPSLRHKVNEHEQDGNELQTTPEFRAHVAKKLGALLDSFITISEAAKEPAKAKVQKVALEDDGFRLFFTSVPGGREKEESPQPRRKRQPSSSSEDSDEEWRRCREAAVSASDILQESAIHSPGTVEKEAKKKRKLKKKAKKVASVDSAVAATTPTSMATVQKQKSGELNGDQVSLGTKKKKKAKKASETSPFPPAKSATAIPAN

SEQ ID NO: 213558 - protein, 232 aa, Artificial Sequence [sequence omitted]

SEQ ID NO: 213559 - DNA, 789 bp, Artificial Sequence
  derived and/or modified sequence
atggctgctcccagcggaaccgtgtcagattctgaaagctccaattcctcatcggacgccgaagaactagaaaggtgcagggaagcggccatgccggcctggggactggagcagcgtccacacgtcgctgggaagcctcgtgcgggagctgccaattcacagttgtccacatcacaaccatctcttcggcacaaggtgaacgagcatgaacaagacggcaacgaacttcagaccacacccgagtttagggcacatgtagctaagaaactgggggctttgctggacagcttcatcactataagcgaggcggctaaagaaccagctaaagctaaggtgcagaaggtggccctcgaggatgatgggtttcgcctgtttttcacatccgtgcccggtggaagggagaaggaggagagccctcagcctcgccggaagcgacagccgtccagcagctctgaagactctgacgaggagtggcggcgatgtagggaggctgccgtgagcgcttccgatatcttgcaggaatctgccattcactcccctgggaccgtagaaaaagaggctaaaaagaagcggaagttaaagaagaaggccaaaaaggttgcaagcgtagacagtgccgtggccgccactacaccaaccagcatggccacagtccagaaacaaaaatctggagaacttaacggcgatcaagtaagcctggggacgaagaaaaagaagaaggccaaaaaagcttcagagacctccccttttcccccagccaagtccgctaccgctattcccgccaactag

SEQ ID NO: 213560 - DNA, 699 bp, Artificial Sequence
  derived and/or modified sequence
atgccggcctggggcctcgaacaacgcccacatgttgctggcaagccgcgcgccggtgcagccaattctcaattgagcacaagccagccctctttacgacacaaggttaacgaacacgagcaggacgggaacgaattacaaacaacacctgagttccgagcacatgtagcaaaaaagttgggagcactgttggactcttttattactatcagcgaagctgccaaggaaccggcgaaagctaaggttcagaaggtcgccctggaggatgatggctttcgcttattttttacatccgtgccaggtggccgcgaaaaggaagaatctccacagccaagacgcaagcgacagccgagtagcagcagcgaggacagtgacgaagaatggcgcaggtgtcgcgaggcggctgttagtgcaagtgacatactgcaagagtctgctatacactcccccgggaccgtcgagaaagaggcaaagaaaaagaggaagttaaagaagaaagctaagaaggtcgcaagtgtagattctgccgtggccgctacaacccccacctcgatggcaacagtccagaagcagaagagcggagagttgaatggagaccaagtgtctcttgggactaagaagaagaagaaggctaaaaaagcttccgagaccagtccgttccctcctgctaagagcgccaccgccatcccggcaaattag

SEQ ID NO: 213561 - DNA, 789 bp, Artificial Sequence
  derived and/or modified sequence
atggccgcccccagcggcaccgtgtctgattctgagagcagcaacagcagcagtgatgctgaggagctggagcgctgccgggaggccgccatgcctgcctggggcctggagcagaggcctcatgtggccggcaagccccgggccggggccgccaacagccagctgagcaccagccagcccagcctgcggcacaaggtgaatgaacatgagcaggatggaaatgagctgcagaccaccccagagttccgggcccacgtggccaagaagctgggcgccctgctggacagcttcatcaccatcagcgaggccgccaaggagcccgccaaggccaaggtgcagaaggtggccctggaggatgatggcttccgcctcttcttcacctctgtgcctgggggccgggagaaggaggagagcccccagcccaggaggaagaggcagcccagcagcagcagcgaggacagtgatgaggagtggaggcgctgccgggaggccgctgtgtctgccagtgacatcctgcaggagagcgccatccacagccctggcaccgtggagaaggaggccaagaagaagaggaagctgaagaagaaggccaagaaggtggcctctgtggacagcgctgtggccgccaccacccccacctccatggccaccgtgcagaagcagaagtctggagagctgaatggagaccaggtgtccctgggcaccaagaagaagaagaaggccaagaaggccagcgagaccagccccttccccccagccaagagcgccacagccatcccagccaactag

SEQ ID NO: 213562 - DNA, 699 bp, Artificial Sequence
  derived and/or modified sequence
atgcctgcctggggcctggagcagaggcctcatgtggccggcaagccccgggccggggccgccaacagccagctgagcaccagccagcccagcctgcggcacaaggtgaatgaacatgagcaggatggaaatgagctgcagaccaccccagagttccgggcccacgtggccaagaagctgggcgccctgctggacagcttcatcaccatcagcgaggccgccaaggagcccgccaaggccaaggtgcagaaggtggccctggaggatgatggcttccgcctcttcttcacctctgtgcctgggggccgggagaaggaggagagcccccagcccaggaggaagaggcagcccagcagcagcagcgaggacagtgatgaggagtggaggcgctgccgggaggccgctgtgtctgccagtgacatcctgcaggagagcgccatccacagccctggcaccgtggagaaggaggccaagaagaagaggaagctgaagaagaaggccaagaaggtggcctctgtggacagcgctgtggccgccaccacccccacctccatggccaccgtgcagaagcagaagtctggagagctgaatggagaccaggtgtccctgggcaccaagaagaagaagaaggccaagaaggccagcgagaccagccccttccccccagccaagagcgccacagccatcccagccaactag

SEQ ID NO: 213563 - DNA, 789 bp, Artificial Sequence
  derived and/or modified sequence
atggccgcccccagcggcaccgtgagcgacagcgagagcagcaactcgtcctctgatgcggaggagctggaacggtgtcgcgaagccgctatgccggcttggggtctcgaacagaggcctcacgtggcaggtaagcctagggcaggagccgccaactcccagctgtctacttcccagccaagcctcagacacaaggtgaatgaacatgaacaggacggaaacgagcttcagaccacccccgaatttcgggcgcatgtggccaagaaactaggagctctgctcgattcgtttattaccatttctgaggcagctaaagaacctgctaaggctaaagttcagaaggtggccttggaagacgacgggtttaggctttttttcactagtgtgcctggcgggagggaaaaagaggaaagtccacagcctcgccggaagcgtcagcccagctcctcatccgaggacagtgatgaggagtggcgacggtgtagggaggccgcggtctcagcttcagacatccttcaggagagcgccatccacagccccggcaccgtggagaaggaggctaagaagaaacgaaagcttaagaagaaagctaaaaaggtcgcgagtgttgatagtgccgtcgccgccaccaccccaacctcgatggccacggttcagaaacagaaaagtggggagttaaacggagaccaggtgagccttgggacgaaaaagaaaaaaaaagccaagaaagcttcagagacaagcccattcccgccagccaagtccgcgacagccattccagccaactag

SEQ ID NO: 213564 - DNA, 699 bp, Artificial Sequence
  derived and/or modified sequence
atgcccgcctggggcctggagcagcggccccacgtggccggcaagccccgggctggggctgccaactcccagctgagtacttctcagccatctctgcggcataaagtgaacgaacacgaacaggacggaaacgaactgcagacgacgcctgaatttagggcacatgtggcgaaaaagcttggagcgctcttggattcttttatcaccatctcagaggccgcgaaggagcctgccaaggctaaagtacagaaagtggccttggaagatgatggattcaggttgttcttcaccagtgttccgggtggccgggagaaagaagagagtccacaaccaaggcggaagaggcaaccctcctcctcatctgaagacagcgacgaggagtggcgcagatgtagagaagctgctgtctcagcatccgatatcctccaagaatccgccattcactcaccggggactgtagagaaggaagccaagaagaaacgcaagctcaaaaagaaagctaaaaaggtggcctccgtggatagcgccgtggcggccacaactccgacatctatggcgactgtgcagaaacagaagagcggagagttgaacggcgatcaggtatccctggggacgaagaagaagaagaaggccaagaaagcatcagagacctcgccctttcctccggccaaatctgccacagccatccccgccaactag

SEQ ID NO: 213565 - DNA, 789 bp, Artificial Sequence
  derived and/or modified sequence
atggccgcaccatcagggacagttagcgacagcgagtctagcaactcaagcagtgatgctgaagagctggagcgctgtcgcgaggcagccatgcccgcatgggggctcgagcagaggcctcacgttgccggtaagcccagggccggagccgctaatagtcagctcagtactagtcagccatctcttcggcacaaggtgaacgagcacgagcaagatggaaacgaactacaaacaacccctgaatttcgggctcacgtcgccaagaaattaggtgcactcctggattcgtttataacgattagcgaagcggcaaaagagcccgcaaaagcaaaggtgcagaaggtagccctggaagatgatggatttcggctcttttttacctcagtgcccggaggccgagagaaggaagaatccccacaaccgcgacgcaaaagacagccgtcgtcctccagcgaggatagcgacgaggaatggcggcgatgtcgggaggcggcagtcagcgcctcagatattctgcaggaatcagccatacactctccaggcaccgtggagaaagaggccaagaaaaaacgtaaacttaagaaaaaggccaagaaggtggcctctgttgattccgctgtggccgcaactacaccaacttcaatggctaccgtccagaaacaaaagtccggcgaattgaacggtgaccaggtgagtctgggtacaaaaaaaaagaagaaggccaaaaaggcttccgaaacctccccctttccccctgcaaagagtgctaccgcaattcctgcaaattag

SEQ ID NO: 213566 - DNA, 699 bp, Artificial Sequence
  derived and/or modified sequence
atgccagcgtggggtttggaacagaggccacacgtggctggaaaacctcgagctggcgcagcaaactcccagttaagtacaagccaaccatcgctcaggcataaagtgaacgagcacgaacaggacggcaatgaacttcaaaccactcctgaattccgcgctcatgtggctaaaaagctgggcgctttattggacagctttattaccattagcgaggcagccaaggagccggcaaaagccaaagtccagaaagtcgccttagaagatgatggcttcaggttgttcttcacctcagttcccggaggcagagagaaagaagagtctccgcagcctcgccgaaagaggcagccgtctagcagctcagaagactctgatgaggagtggaggcgctgtcgggaggctgcagtgtcagcaagcgacattctccaggagagcgccatccacagccccggaacggttgaaaaggaagcgaaaaagaagagaaaactcaagaaaaaagcgaaaaaggtcgcatctgtggatagcgccgtagctgcaaccaccccaacatcgatggccacagttcagaaacaaaaaagcggtgagcttaatggggaccaggtcagcttggggactaaaaagaaaaaaaaggccaaaaaggcctccgagacctccccatttcctcccgctaagtccgccacagccattccagccaactag

SEQ ID NO: 213567 - DNA, 1920 bp, Artificial Sequence
  derived and/or modified sequence
acaatcctttgcggtggttcaagatggcggcgcccagtggcacagtgagcgattcggaaagtagtaacagcagtagcgatgcggaggagctggagcggtgccgcgaggcggcaatgccggcttggggcttggagcaacgcccgcacgtggcagggaagccaagagccggtgctgcaaatagccagttgtcaacctcccaaccgagcctcaggcataaggtgaatgagcatgaacaagatggcaacgagcttcagaccacccctgaattccgagcccacgtagccaagaagctgggagccctgctggacagcttcattaccatctcagaagcagcaaaggagccagcaaaagctaaggtacagaaagtcgctttggaggatgatggtttccgccttttcttcacatctgtccctggaggccgtgagaaggaagagtctccccaaccccgccgaaagcgacagccctccagctccagtgaggacagtgacgaggagtggcggcggtgccgggaggcagctgtgtcggcgtccgacatcctacaggagtcagccatccacagccctggaacagtggagaaggaggcaaagaagaaaaggaagttgaaaaagaaagccaagaaggtggccagtgtcgactcggctgtcgctgccaccacccccaccagcatggccacagtccagaagcagaagtcaggtgagctcaacggggaccaggtgtcgcttgggaccaaaaagaagaaaaaggcaaagaaggccagcgagacctctccattcccaccagcaaagagtgctacagctatacctgcaaactgaacccagccatgggcacagggctcagccagctccaaggacaaggtgtcccccccaccctggggacaaggcatttccaagccccacctccctctccaagttcaaggactgggctggcaaacccagactgcccatgagaccctgatggtgatgaaggcttgctcgagagttgggccaaaaaagtggctgtagggtgagaagaccaatcaaggcctgcccctctgtgctcccacggagggctggcgggggcgctgtggttccagaacatttcatgacctcaggaaaaaaggaaccttccagttatttgagactagtggccaagtggtgaaacctccatctccctagaactgtctgaggtgggcaggggaagggagaccttccccaccacctccttagcctggtgtgagaaacagtttttagaaaatgagagaagggatccccaagaggccaaggcccagagaaacttttgttcttctctccttagcccacatagacttcacagaatcgtctgagaaaggagagctttttcacccctggctttctagaattttctttgtctgcatttgtgaatataccacacatgatggtgtctctgagccgaccagattatggaaactcaattgtcagaggacccaaaacaaaacttagagtgatttggatattgcctctctgtcaatgctgaaccttaagacattttaagtaaacatcctcctcctctctacacccccaggatttgtgcgttcaccccacccaagacttcaggaagtgtcatagcactcgtggactaggtttcatgggacaaaggcattctgcaagaagtagaagcttgtggccgggtgcagtggctcatgcctgtaatccaagcattttgagaggccaaggaggtggatcaattgaggccaggagtttgagaccagcctggccaacatggcgagaccccatctctactaaaaatacaaaaattagctgagcatgttgacacacgcccgtaatcccagctactcaggaggctgaggtgggagaatcgcttgaacccaggaggtgcaggttgcagtgagccgagattgcgccactgcactctagcctaagcaatggagcaagaccctatctc

SEQ ID NO: 213568 - DNA, 2515 bp, Artificial Sequence
  derived and/or modified sequence
gcggtggttcaagatggcggcgcccagtggcacagtgagcgattcggaaagtagtaacagcagtagcgatgcggaggagctggagcggtgccgcgaggcggcaatgccggcttggggcttggagcaacgcccgcacgtggcagggaagccaagagccggtgctgcaaatagccagttgtcaacctcccaaccgagcctcaggcataaggtgaatgagcatgaacaagatggcaacgagcttcagaccacccctgaattccgagcccacgtagccaagaagctgggagccctgctggacagcttcattaccatctcagaagcagcaaaggagccagcaaaagctaaggtacagaaagtcgctttggaggatgatggtttccgccttttcttcacatctgtccctggaggccgtgagaaggaagagtctccccaaccccgccgaaagcgacagccctccagctccagtgaggacagtgacgaggagtggcggcggtgccgggaggcagctgtgtcggcgtccgacatcctacaggagtcagccatccacagccctggaacagtggagaaggaggcaaagaagaaaaggaagttgaaaaagaaagccaagaaggtggccagtgtcgactcggctgtcgctgccaccacccccaccagcatggccacagtccagaagcagaagtcaggtgagctcaacggggaccaggtgtcgcttgggaccaaaaagaagaaaaaggcaaagaaggccagcgagacctctccattcccaccagcaaagagtgctacagctatacctgcaaactgaacccagccatgggcacagggctcagccagctccaaggacaaggtgtcccccccaccctggggacaaggcatttccaagccccacctccctctccaagttcaaggactgggctggcaaacccagactgcccatgagaccctgatggtgatgaaggcttgctcgagagttgggccaaaaaagtggctgtagggtgagaagaccaatcaaggcctgcccctctgtgctcccacggagggctggcgggggcgctgtggttccagaacatttcatgacctcaggaaaaaaggaaccttccagttatttgagactagtggccaagtggtgaaacctccatctccctagaactgtctgaggtgggcaggggaagggagaccttccccaccacctccttagcctggtgtgagaaacagtttttagaaaatgagagaagggatccccaagaggccaaggcccagagaaacttttgttcttctctccttagcccacatagacttcacagaatcgtctgagaaaggagagctttttcacccctggctttctagaattttctttgtctgcatttgtgaatataccacacatgatggtgtctctgagccgaccagattatggaaactcaattgtcagaggacccaaaacaaaacttagagtgatttggatattgcctctctgtcaatgctgaaccttaagacattttaagtaaacatcctcctcctctctacacccccaggatttgtgcgttcaccccacccaagacttcaggaagtgtcatagcactcgtggactaggtttcatgggacaaaggcattctgcaagaagtagaagcttgtggccgggtgcagtggctcatgcctgtaatccaagcattttgagaggccaaggaggtggatcaattgaggccaggagtttgagaccagcctggccaacatggcgagaccccatctctactaaaaatacaaaaattagctgagcatgttgacacacgcccgtaatcccagctactcaggaggctgaggtgggagaatcgcttgaacccaggaggtgcaggttgcagtgagccgagattgcgccactgcactctagcctaagcaatggagcaagaccctatctcaaaaaaaaaaaaagaaaaagaaaaagaaaagaagtagaagctcatggccagggatggtggctcacacctgtaatcccagcactttgggaggccgaggcaggtggatcacttgagccgagttccagaccagcctaggcaacatggtgaaacctcgtctctataaaaaaaagaatacaaaaattagttgggcatggtagtgagcgcctgtgaggctgcttgtgaggctgaggtgggaggatccctttagtccaggagttcaaggctgcagtgagctgtataatgccactgcagtccagcctgggtgacagtgagaccctgtctccaaaacaaaatttttttaaaaagtagaagcttgaggttaagatgaaatctggctttgtcattagagtctcagcagagcaagaaaagcagagatgtggggtgtgagagcgtgggtgctggagcctgtctcctcttcgcaggcctctggcctgccccagcctcccgctacctgcccaaaccccatctgaatgatttgtggacaagcaagaagtttccaccgcatttctccttgactttactaaaagttaaataaacgtgccactcgccccggctggctacaagct

SEQ ID NO: 213569 - DNA, 789 bp, Artificial Sequence
  derived and/or modified sequence
atggccgcccccagcggcaccgtgagcgacagcgagagcagcaacagcagcagcgacgccgaggagctggagagatgcagagaggccgccatgcccgcctggggcctggagcagagaccccacgtggccggcaagcccagagccggcgccgccaacagccagctgagcaccagccagcccagcctgagacacaaggtgaacgagcacgagcaggacggcaacgagctgcagaccacccccgagttcagagcccacgtggccaagaagctgggcgccctgctggacagcttcatcaccatcagcgaggccgccaaggagcccgccaaggccaaggtgcagaaggtggccctggaggacgacggcttcagactgttcttcaccagcgtgcccggcggcagagagaaggaggagagcccccagcccagaagaaagagacagcccagcagcagcagcgaggacagcgacgaggagtggagaagatgcagagaggccgccgtgagcgccagcgacatcctgcaggagagcgccatccacagccccggcaccgtggagaaggaggccaagaagaagagaaagctgaagaagaaggccaagaaggtggccagcgtggacagcgccgtggccgccaccacccccaccagcatggccaccgtgcagaagcagaagagcggcgagctgaacggcgaccaggtgagcctgggcaccaagaagaagaagaaggccaagaaggccagcgagaccagccccttcccccccgccaagagcgccaccgccatccccgccaactag

SEQ ID NO: 213570 - DNA, 699 bp, Artificial Sequence
  derived and/or modified sequence
atgcccgcctggggcctggagcagagaccccacgtggccggcaagcccagagccggcgccgccaacagccagctgagcaccagccagcccagcctgagacacaaggtgaacgagcacgagcaggacggcaacgagctgcagaccacccccgagttcagagcccacgtggccaagaagctgggcgccctgctggacagcttcatcaccatcagcgaggccgccaaggagcccgccaaggccaaggtgcagaaggtggccctggaggacgacggcttcagactgttcttcaccagcgtgcccggcggcagagagaaggaggagagcccccagcccagaagaaagagacagcccagcagcagcagcgaggacagcgacgaggagtggagaagatgcagagaggccgccgtgagcgccagcgacatcctgcaggagagcgccatccacagccccggcaccgtggagaaggaggccaagaagaagagaaagctgaagaagaaggccaagaaggtggccagcgtggacagcgccgtggccgccaccacccccaccagcatggccaccgtgcagaagcagaagagcggcgagctgaacggcgaccaggtgagcctgggcaccaagaagaagaagaaggccaagaaggccagcgagaccagccccttcccccccgccaagagcgccaccgccatccccgccaactag

SEQ ID NO: 213571 - protein, 1088 aa, Artificial Sequence
  derived and/or modified sequence
MALHFQSLAELEVLCTHLYIGTDLTQRIEAEKALLELIDSPECLSKCQLLLEQGTTSYAQLLAATCLSKLVSRVSPLPVEQRMDIRNYILNYVASQPKLAPFVIQALIQVIAKITKLGWFEVQKDQFVFREIIADVKKFLQGTVEHCIIGVIILSELTQEMNLVDYSRPSAKHRKIATSFRDTSLKDVLVLACSLLKEVFAKPLNLQDQCQQNLVMQVLKLVLNCLNFDFIGSSADESADDLCTVQIPTTWRTIFLEPETLDLFFNLYHSLPPLLSQLALSCLVQFASTRRSLFNSPERAKYLGNLIKGVKRILENPQGLSDPGNYHEFCRFLARLKTNYQLGELVMVKEYPEVIRLIANFTITSLQHWEFAPNSVHYLLTLWQRMVASVPFVKSTEPHLLDTYAPEITKAFITSRLDSVAIVVRDHLDDPLDDTATVFQQLEQLCTVSRCEYEKTCALLVQLFDQNAQNYQKLLHPYSGVTVDITIQEGRLAWLVYLVGTVVGGRLTYTSTDEHDAMDGELSCRVFQLISLMDTGLPRCCNEKIELAILWFLDQFRKTYVGDQLQRTSKVYARMSEVLGITDDNHVLETFMTKIVTNLKYWGRYEPVISRTLQFLNDLSVGYILLKKLVKIDAVKFMLKNHTSEHFPFLGISDNHSLSDFRCRTTFYTALTRLLMVDLGEDEDEFENFMLPLTVAFETVLQIFNNNFKQEDVKRMLIGLARDLRGIAFALNTKTSYTMLFDWMYPTYLPLLQNAVERWYGEPTCTTPILKLMAELMQNRSQRLNFDVSSPNGILLFREASKMVCTYGNQILSLGSLSKDQIYPMKLKGISICYSALKSALCGNYVSFGVFKLYGDNHFDNVLQAFVKMLLSVSHSDLLQYRKLSQSYYPLLECLTQDHMSFIINLEPPVLMYVLTSISEGLTTLDTVVSSSCCTSLDYIVTYLFKHIAKEGKKPLRCREATQAGQRLLHFMQQNPDVLQQMMSVLMNTIVFEDCRNQWSVSRPLLGLILLNEKYFSELRASLINSQPLPKQEVLAQCFRNLMEGVEQNLSVKNRDRFTQNLSVFRRDVAEALRSDGNTEPCSLDMMS

SEQ ID NO: 213572 - DNA, 3267 bp, Artificial Sequence
  derived and/or modified sequence
atggccttacatttccagtctctggcggaactcgaagtgttgtgtacacacctgtacattggcactgatttgacacagaggatcgaggccgagaaggccctgctggagttaatcgactccccagaatgtctgtctaaatgccagttgctgctcgaacagggcaccacctcatacgctcagttgttggcagccacatgtctctcgaagttggtgagccgcgtgagtccgctgcctgtagagcagcgtatggatattcgaaactacattttgaactatgttgcctcccagcccaagttggctccgtttgtgattcaggcccttattcaggtcattgcaaagataaccaaactgggctggttcgaggttcagaaagatcaatttgtcttccgtgagatcatcgccgacgtcaaaaagttcctccaaggcacagtggaacattgtatcattggggtgattatcctcagcgagctcacccaagagatgaacctcgtagactactcgcgccccagcgctaagcacaggaagattgccactagctttcgagatacctcccttaaggacgttctcgtgctggcgtgtagcctgctgaaggaggtattcgctaaacctctaaacctccaggaccagtgccaacaaaacctcgtgatgcaggttttgaagctcgtcttgaattgcctgaactttgacttcatagggagctctgccgacgaatcagcagacgacctttgtacagtccagatcccaactacatggagaacaatcttcctggagccagaaacactggatctttttttcaacctttaccacagtctacccccgctccttagccagcttgcgctgtcgtgcctggtgcagttcgcttccacccggcgctctttattcaactcgcccgagagggccaagtaccttggaaacctgattaagggcgtgaaaagaatcttggaaaacccccaggggctgtccgacccaggcaactaccacgagttttgccggttcctcgcccgactgaagacaaactatcagctcggcgagctggtcatggtgaaggaatacccagaagtcatccggcttatagccaatttcacaatcacttcactgcagcactgggagttcgccccgaattcagtgcactatctgctgacactgtggcagcgcatggtggcatccgttcctttcgtaaaatcaaccgaaccccatctgctagacacttatgctccagaaatcacaaaggccttcatcaccagtcggttagattccgtcgccattgtcgtgcgggatcacctcgacgatcccctcgacgacaccgcaactgtgttccagcagcttgaacagctgtgcacggtgtcccgctgtgagtatgagaaaacatgtgctctgttggtccagttgtttgatcagaacgctcagaactaccagaaattgcttcacccctactcaggggtcacagtcgatattacgatacaggagggccgtctagcctggcttgtgtacctggtgggaaccgtagttggcggacgcctgacctacacgtcaacggatgagcatgacgcaatggatggcgaactgtcttgcagggttttccagctgatcagcctgatggataccggcttgccgagatgctgtaacgagaaaattgagctggccatcctctggttcttggatcagtttcgtaagacatatgttggcgaccagttacaaaggacttccaaggtgtatgcaagaatgagtgaagtgctgggaatcaccgacgataatcatgttcttgagactttcatgacgaaaatcgtcaccaatctaaagtactggggccggtatgagccagtcatctcgcgcaccctccagtttctgaatgacctttcagtaggttatattttgctaaagaaactagtgaaaatagacgcagtgaagtttatgctaaagaaccacacatctgaacactttccatttctgggtattagtgacaatcacagcctgagcgatttcagatgcagaacgaccttttacactgcgctaacacgactgctgatggtggacctcggggaggatgaagatgagtttgaaaatttcatgctgccccttactgttgcctttgagaccgtccttcagatctttaataataattttaaacaagaagacgtaaaacgcatgctgatcgggctggcacgggatttgagaggaatcgcctttgctttgaatacaaaaacaagttacaccatgctgttcgactggatgtatcctacgtacctgcctttattacagaacgccgttgaaagatggtacggagagccgacttgtacaacccctatcttgaaactcatggctgaactcatgcagaataggagtcaaaggctgaattttgacgtgagctcaccaaatgggatcctgctgtttcgggaagcctccaagatggtatgcacttatggcaaccaaattctttcccttggtagcctaagtaaagaccagatataccctatgaagttaaaagggatttctatctgttatagtgcactcaagagcgctctgtgtgggaattatgtgtcctttggggtgttcaaactctacggggataaccacttcgataacgtgttgcaggcctttgtgaagatgctcctctccgtgagtcacagcgatctgctgcagtaccgcaagctctcacagagctactacccacttctggaatgtcttacacaggaccacatgtccttcataataaacttagagccccctgttcttatgtacgtactcacttctatcagcgagggtctgacgaccctggacaccgtggtgtcttcgtcctgctgcacttcactcgattacatcgtgacctacctgttcaagcatatagccaaggagggaaagaaaccactgcgctgcagagaagcaacccaggccggacagcggcttctgcacttcatgcaacagaatcctgatgtccttcaacaaatgatgtccgtactcatgaacactatcgtgttcgaggactgtaggaatcagtggagcgtgagcagacccctcttagggctaattcttctcaatgagaaatacttttccgaactacgggcatctctgattaatagccagccactaccaaaacaagaggttctcgcccagtgttttaggaatctgatggagggagtagaacagaacctgagcgtgaagaaccgggaccgctttacgcagaaccttagcgtctttcgccgggacgtcgcggaagcactccggagcgatgggaacaccgaaccttgcagcctggatatgatgtcatag

SEQ ID NO: 213573 - DNA, 3267 bp, Artificial Sequence
  derived and/or modified sequence
atggccctgcacttccagagcctggccgagctggaggtgctgtgcacccacctgtacatcggcacagacctgacccagagaattgaggccgagaaggccctgctggagctgattgacagccctgagtgcctgagcaagtgccagctgctgctggagcagggcaccaccagctatgcccagctgctggccgccacctgcctgagcaagctggtgtcccgggtgagccccctgcctgtggagcagaggatggacatccggaactacatcctgaactacgtggccagccagcccaagctggcccccttcgtcatccaggccctgatccaggtgattgccaagatcaccaagctgggctggtttgaggtgcagaaggaccagtttgtgttccgggagatcatcgcagatgtgaagaagttcctgcagggcaccgtggagcactgcatcattggagtcatcatcctgtctgagctgacccaggagatgaacctggtggactacagccggcccagcgccaagcacaggaagatcgccaccagcttccgggacaccagcctgaaggatgtgctggtgctggcctgcagcctgctgaaggaggtgtttgccaagcccctgaacctgcaggaccagtgccagcagaacctggtgatgcaggtgctgaagctggtgctgaactgcctgaactttgacttcatcggcagcagcgcagatgagagcgcagatgacctgtgcaccgtgcagatccccaccacctggaggaccatcttcctggagcctgagaccctggacctcttcttcaacctgtaccacagcctgccccccctgctgagccagctggccctgagctgcctggtgcagtttgccagcacccggcgcagcctcttcaacagccctgagcgggccaagtacctgggcaacctgatcaagggcgtgaagaggatcctggagaacccccagggcctgagtgaccccggcaactaccacgagttctgccgcttcctggcccggctgaagaccaactaccagctgggggagctggtgatggtgaaggagtacccagaggtgatccgcctcatcgccaacttcaccatcaccagcctgcagcactgggagtttgcccccaacagcgtgcactacctgctgaccctgtggcagaggatggtggcctctgtgccctttgtgaagagcacagagccccacctgctggacacctacgcccctgagatcaccaaggccttcatcaccagccggctggacagcgtggccatcgtggtgcgggaccacctggatgaccccctggatgacacagccaccgtcttccagcagctggagcagctgtgcaccgtgagccgctgtgaatatgagaagacctgtgccctgctggtgcagctgtttgaccagaatgcccagaactaccagaagctgctgcacccctacagcggcgtgacagtggacatcaccatccaggagggccgcctggcctggctggtgtacctggtgggcaccgtggtgggcggccgcctgacctacaccagcacagatgaacatgatgccatggatggagagctgagctgcagggtcttccagctgatcagcctgatggacaccggcctgccccgctgctgcaatgagaagattgagctggccatcctgtggttcctggaccagttcaggaagacctacgtgggggaccagctgcagaggaccagcaaggtgtatgccaggatgtctgaggtgctgggcatcacagatgacaaccacgtgctggagaccttcatgaccaagatcgtgaccaacctgaagtactggggccgctatgagcctgtgatcagcaggaccctgcagttcctgaatgacctgtctgtgggctacatcctgctgaagaagctggtgaagattgatgctgtgaagttcatgctgaagaaccacaccagcgagcacttccccttcctgggcatcagtgacaaccacagcctgagtgacttccgctgcaggaccaccttctacacagccctgacccggctgctgatggtggacctgggagaagatgaagatgaatttgagaacttcatgctgcccctgactgtggcctttgaaacagtgctgcagatcttcaacaacaacttcaagcaggaggatgtgaagaggatgctgattggcctggcccgggacctgcggggcatcgcctttgccctgaacaccaagaccagctacaccatgctgtttgactggatgtaccccacctacctgcccctgctgcagaatgctgtggagcgctggtacggggagcccacctgcaccacccccatcctgaagctgatggccgagctgatgcagaacagaagccagaggctgaactttgatgtgagcagccccaacggcatcctgctcttccgggaggccagcaagatggtgtgcacctacggcaaccagatcctgagcctgggcagcctgagcaaggaccagatctaccccatgaagctgaagggcatcagcatctgctacagcgccctgaagagcgccctgtgtggcaactacgtgtcctttggagtcttcaagctgtatggagacaaccactttgacaacgtgctgcaggcctttgtgaagatgctgctgtctgtgagccacagcgacctgctgcagtacaggaagctgagccagagctactaccccctgctggagtgcctgacccaggaccacatgtccttcatcatcaacctggagccccctgtgctgatgtatgtgctgaccagcatcagcgagggcctgaccaccctggacacagtggtgagcagcagctgctgcaccagcctggactacatcgtgacctacctgttcaagcacatcgccaaggagggcaagaagcccctgcgctgccgggaggccacccaggccggccagaggctgctgcacttcatgcagcagaacccagatgtgctgcagcagatgatgtctgtgctgatgaacaccatcgtgtttgaggactgcaggaaccagtggagcgtgtcccggcccctgctgggcctcatcctgctgaatgagaagtacttcagcgagctgcgggccagcctcatcaacagccagcccctgcccaagcaggaggtgctggcccagtgcttcaggaacctgatggagggcgtggagcagaacctgtctgtgaagaacagagaccgcttcacccagaacctgtctgtgttcagaagagatgtggccgaggccctgcggagtgatggcaacacagagccctgcagcctggacatgatgtcctag

SEQ ID NO: 213574 - DNA, 3267 bp, Artificial Sequence
  derived and/or modified sequence
atggccctgcacttccagagcctggccgagctggaggtgctgtgcacccatttatacattggcaccgaccttactcagagaattgaggccgaaaaggctttgctggagcttatcgattcaccagaatgtctatctaagtgtcagcttctactggaacagggcaccacgtcttatgcacagttgctggccgccacttgtctgagcaagctcgttagcagagtgagtccacttcccgtggaacagcgcatggatatccgcaactacattctcaactatgttgctagccagccaaagctggctccttttgtgattcaagcactgattcaggttattgctaagattaccaagctgggttggttcgaggttcagaaagaccagttcgttttccgggagattattgccgacgtcaagaagttccttcaggggaccgtcgagcactgcatcatcggcgtgatcatcctctctgagcttacacaggagatgaacctggtggactactctaggcctagcgcgaaacatcgcaagattgccaccagtttcagggatactagcctgaaggatgtgttggtcctggcatgttctctcctgaaggaagtgttcgccaagcctctgaacctccaggaccagtgccagcaaaacctggtgatgcaggtcctgaaattagtgctgaattgcctgaacttcgatttcatcgggtcttctgctgacgagtccgccgatgatctctgtaccgtgcagatccccactacgtggcgcaccatattcctggaacccgagacccttgacttgttcttcaatctataccactcgttgccgcccctcctttcccagttagctctgagctgtctggtgcaattcgcttccacacggcggtcactcttcaactctccggaaagagcgaaatatctaggcaacctgattaaaggagtaaagcgcatcttagagaatcctcagggcctcagcgacccaggaaactaccacgagttttgtcggtttttggctcggcttaagaccaactaccagctgggcgagctcgtaatggtgaaagagtatccggaggtgatcaggctaattgctaacttcactatcacctccctgcagcactgggaattcgccccaaattccgtccactatttgctgactctatggcagagaatggtggcctcagtccccttcgttaaatcaaccgagcctcacctgctggatacctacgcaccggagatcaccaaggctttcataacttccagactggatagtgttgctatcgtggtgagagaccacctggacgaccccctggacgacactgcgacagtatttcagcaactggaacaactgtgcacagtcagccggtgtgagtacgaaaagacttgcgcactgctggttcaactttttgatcaaaatgcgcagaattaccagaagctgcttcacccttattctggcgtgaccgtggacatcaccattcaggaagggaggctggcatggctggtgtaccttgtcggcactgtggttgggggaagactgacctacacctctactgacgaacacgacgcgatggacggcgaattgtcttgccgggtgtttcagctaatcagtttaatggatacaggtctcccaaggtgttgtaacgagaagatagaacttgccatcctctggtttctggatcagttcagaaaaacctacgtgggggatcaattgcaacggacctcaaaggtgtacgctcggatgtccgaagtgctcgggatcacagacgataaccacgtactggaaaccttcatgacaaagatcgtgaccaacttaaaatactgggggcggtacgaacccgtgatcagccgcacccttcaatttctcaacgacctcagtgtcggatacatccttctgaagaagctggtgaagatagacgcagtgaagttcatgctgaaaaatcacacgtctgagcatttcccatttctcgggattagcgacaatcatagcctgagtgattttcgctgccggactactttttacactgctttgactcgccttttgatggtcgacctgggggaggacgaggacgaattcgaaaactttatgctgccccttacagtcgcttttgagaccgtcctccaaatctttaataacaactttaagcaggaggatgtgaaacgcatgcttattggccttgccagggatttaagagggatcgcatttgccctgaacaccaagacatcttacaccatgctgttcgattggatgtatccaacttacttgcctctgcttcagaacgccgtggagcgatggtatggcgaacctacttgcaccacacccattctgaagctgatggcagaattgatgcagaaccgttcacagcgcctcaactttgacgtgtcaagccctaacggcatcctcctgttccgcgaggctagcaagatggtgtgcacatacggcaatcagatcctctctttgggctctctgtccaaggaccagatttatccgatgaaactgaaaggtatctccatttgctattctgcactgaaatcagcattgtgtgggaactacgtgagcttcggagtattcaaattatatggcgacaatcattttgacaatgtgctgcaggcatttgttaaaatgctgctgagcgtgtctcattcagatctgctccaataccggaaactgagccagagctactatcctctgctggaatgtctcactcaagaccacatgagctttataattaacctggagccgccggtcctgatgtatgtgctgaccagtatctccgagggccttactacactggacacagtggtgtcatcgagctgttgcacatccctcgactatatagtaacatacttgtttaagcatattgcaaaagaagggaagaaacctctgcggtgccgcgaggctactcaggcgggtcagcggctactgcacttcatgcaacagaatccggacgtattacagcagatgatgtctgtcttgatgaataccatcgtatttgaagattgtcgcaaccagtggagcgtctcacggccgctgttaggtctgatcttattgaatgaaaagtacttcagcgagctaagggcctctttgatcaattcccagccattgcccaagcaggaagtgctcgctcagtgcttccgaaaccttatggagggagttgagcagaacctttctgtcaagaatagagaccggttcacccagaatctgtcggtttttcgccgcgatgtagcagaagctcttagaagcgatggcaacacagaaccctgttctctcgacatgatgtcatag

SEQ ID NO: 213575 - DNA, 3267 bp, Artificial Sequence
  derived and/or modified sequence
atggcactgcattttcagtcactggccgagctagaagttctgtgcactcatctgtatattggtacagatttaacacagagaatcgaagccgagaaagccctgctggagctcatcgattcgccagagtgcctaagtaagtgtcagctgctgctggaacagggcactacctcctatgcccaattgctggcggctacttgtctcagtaagctagtgtctcgggtgagccctttaccagttgagcaacgcatggatatccgcaactacattctgaattatgttgccagtcagccaaagttggccccattcgtgatccaggccctgatacaagtgattgctaagatcactaaacttgggtggttcgaggtgcagaaagaccaattcgtgttcagagagattatcgctgatgtaaaaaaatttctgcagggcactgtcgagcattgtatcatcggcgtcataatccttagtgaactgacccaagagatgaacttagtggattacagccggccttctgcaaagcacagaaagatcgctacctccttcagggatacttccctgaaagatgtgttagtgctggcatgctctctcttgaaggaggtctttgccaagccactcaacctccaggaccagtgccaacagaatttagtcatgcaggtactcaaattggtcttgaactgcctgaattttgatttcatcggaagctctgccgatgagtcggcggacgacctgtgcaccgttcagattcccactacttggagaactatctttctggagcccgagactctcgatttgttttttaatttatatcatagtctacccccactgctttctcagctcgccctgtcatgtctcgtccaattcgcgagcaccaggagatccttatttaattctccagaaagggccaagtacctcgggaatctaatcaagggcgtgaagaggatactagaaaatcctcagggtctgagtgacccgggtaactaccatgagttctgccgctttcttgctcggctgaaaactaactaccagctgggggaactggtgatggtgaaagagtacccggaagtgatacggctaatagccaattttactatcacatccttacagcactgggagtttgctcccaattcagtccattacctcctcactctgtggcaaaggatggtcgcatccgtgccatttgtgaagagtaccgagccccatctgctggacacgtatgcccctgaaatcaccaaagcttttattacttctcgccttgatagcgtggccatcgtggtccgcgaccacctggatgaccctctcgatgataccgctactgtcttccaacagctcgaacagttgtgcacagtgagtcggtgtgagtatgagaagacttgcgccctgctcgtccagctattcgaccaaaatgcacaaaactaccagaagctgctgcacccttacagcggggttaccgtggacataacgatccaggaggggaggctggcctggctagtctacttagtggggaccgtcgtagggggaagactcacatatacctccacagacgagcacgacgcaatggatggcgagctgtcctgtagagttttccaactgatttcgctcatggatactggactgccccgatgctgcaatgagaagattgagctcgccatcctgtggttcctggatcagttccgcaaaacctatgtcggagatcagttgcaacggacatccaaggtgtacgcaagaatgagtgaggtgctcggcatcactgatgacaaccatgttctggagacgttcatgacaaagatcgtgacgaacctcaagtactgggggcgatacgaacccgtaatttcacggactctgcagttcttgaacgacttgtctgttgggtacatcctgctcaaaaagctcgtgaagatagacgcagtgaaatttatgctgaagaaccacactagcgagcactttcccttcttggggattagcgacaatcactcgctctctgatttccgttgtaggaccacattttatactgccctgactcgcttgcttatggtggacctaggagaggacgaggatgaatttgagaattttatgctcccattgaccgtggcctttgaaacagttctacagatcttcaacaacaactttaagcaggaagacgttaagagaatgctgatcggactagcgagagatctcagggggatcgcttttgcgctcaacactaaaaccagctacacaatgctttttgactggatgtaccctacttacctgcccttgcttcaaaatgccgtggaacgctggtacggcgaaccaacctgcactaccccaatcctgaagcttatggccgagctgatgcaaaatcggtcccagaggctgaactttgatgtaagctcccctaatggcatcctactgtttagagaggcttctaagatggtgtgtacatacgggaatcagatcttgtcactgggatcattgtccaaagaccaaatctatccaatgaaactgaagggaataagcatctgttactcggctctgaagtcagcactgtgcggcaattacgtgtccttcggtgtctttaagctctatggggacaaccacttcgataatgtgcttcaggcctttgtgaagatgctgcttagtgtttcccatagtgacctgctgcagtataggaagttgtcacaatcctactacccattgctggagtgtctcactcaggatcatatgtcctttattatcaatctggaaccgccagtgttaatgtatgtcctgacttccatttcggagggtctaactaccctcgataccgtcgtgagcagctcctgttgcacatcgctcgattacattgtgacctacctttttaagcatatcgcaaaggagggaaaaaagcccctgcgatgtagagaagcgacacaagctggtcagaggcttctacatttcatgcagcagaatcccgatgtgctacagcagatgatgtcagtgctcatgaacacaatcgttttcgaagactgccggaaccagtggagcgtgtccaggcccctcctgggcttgattctgctgaatgagaaatacttttcagagctgcgggcatccctaatcaactcccaaccgcttcctaaacaagaggtccttgctcagtgctttagaaatctgatggaaggcgtggagcaaaatctgtccgttaagaatcgtgatagatttacccagaatttatctgtatttcgaagggacgtcgctgaggcactacggtctgatggcaacaccgaaccttgtagtctagacatgatgagctag

SEQ ID NO: 213576 - DNA, 4588 bp, Artificial Sequence
  derived and/or modified sequence
ctccagcgcttcgaatgcggacgcgaagcctggctgaggctgcgaaggacgagcggcgcagggaccccgcgggcgtctggggcttccgcggcgcccgcctctgctccctcccctcgggcgctgggtgccgaccggccggctggccggcgccgcctcctgggaagatggcgctgcacttccagagtttggctgaattggaagtgttatgtactcatctctacatagggactgatcttacacaaagaatagaggctgagaaagcactcttggaacttattgacagtccagaatgtctcagcaagtgtcaacttttattagaacaaggaacaacatcctatgctcagctccttgcagcaacatgtctttcaaaacttgtcagccgagtcagtcctttacctgttgagcagaggatggacatcagaaactacattctgaattacgtggcatcacagcccaagctggctccctttgtcatccaagctcttattcaagtcattgctaaaatcactaagttggggtggtttgaggttcagaaagaccaatttgtcttcagagaaattattgctgatgtgaagaagtttctccagggtactgtggaacactgcataataggagtaataatcctttctgaattgactcaggaaatgaacctggttgattattctagaccttcagcaaaacacaggaaaatagctacctcatttcgtgatacttctctcaaagacgttttagtgctagcatgctctcttttaaaagaggtgtttgccaaacctttaaatcttcaggatcaatgtcagcaaaatctggtaatgcaggtcttgaaactggtccttaactgccttaactttgacttcattggcagttcagcagatgaatctgcagatgatctttgcacggtgcagattccaacaacttggagaacaattttcctggaaccagaaacattggatcttttcttcaatttgtatcattcacttccaccactactatctcagttagcactttcatgtttagttcagtttgcttcgacaagaaggtccttatttaacagtcctgaacgtgccaagtaccttggtaatttaattaagggagtaaaaaggatacttgaaaaccctcagggtttgtctgatccaggtaattatcatgaattttgtcgatttttggctcgtttaaagacaaattatcagctgggagaattagttatggtgaaggaatatcctgaagttattagattgattgctaattttaccattactagcctacagcactgggaatttgctcctaacagtgttcattatttattaactctgtggcaaaggatggtagcatctgttccttttgtgaaatcaactgaaccccacctattagacacttatgcaccagaaatcacgaaggcctttatcacttctcggttggactctgttgccatagttgtgagagatcacttagatgatccactggatgatactgccactgtgtttcagcagttggagcagttgtgcacggtcagcagatgtgaatatgaaaagacatgtgctcttcttgtgcagttattcgaccaaaatgcacagaattaccaaaaacttctgcatccatattctggtgtaactgtggacatcaccattcaggaaggacgtcttgcatggctggtatacttagttgggacagttgtaggaggaagattaacatataccagtacagatgagcatgatgctatggatggagaattatcctgtcgagtttttcagcttatatctttaatggataccggattgcctcgatgttgtaatgagaaaatagagcttgcaattctgtggttcttggatcagtttcgtaaaacatatgttggtgatcaacttcaaagaacctcaaaggtatatgctcgtatgtcagaagtcttaggaataacagatgacaaccacgttctagagacgttcatgacaaaaattgttacaaaccttaaatactggggaagatatgagcctgtaatttcaaggactcttcagttcctaaatgacctttctgttggttatatccttttaaaaaaacttgtgaagatagatgctgtgaaattcatgctaaaaaaccacacgagtgaacacttcccttttcttggcatcagtgacaatcatagtctcagcgacttcaggtgtcgaacaaccttctacacagcgctcactcgccttctgatggtagatctgggtgaagatgaggatgaatttgagaatttcatgctgcctcttacagttgcttttgaaacagtattacaaatattcaacaacaactttaaacaagaagatgtaaagcgtatgttgatcgggctggcaagagatcttcgagggattgcctttgcactgaacacaaagaccagctacaccatgctgtttgactggatgtacccaacgtaccttccccttcttcagaatgctgttgaacggtggtatggagagccaacatgtacaactcccatcttgaaacttatggcagaacttatgcaaaacagatcccagcgtttgaattttgatgtatcatctcctaatggaattcttctcttcagagaagctagtaaaatggtttgcacttatggtaatcagatcctgtcccttgggagcctctcaaaagatcagatttatccaatgaaactcaagggcatctccatctgctattcagctctcaagtctgccttgtgtggaaattatgtcagctttggcgtcttcaagttgtatggggacaaccattttgacaatgtactccaggcttttgtcaaaatgctgctgtcagtgtcccacagtgacttgctacaataccggaaactgagccagtcttattatccactcctggaatgtctcactcaggaccatatgagcttcatcatcaacttagagcctcctgtactcatgtatgttctcacatctatctcagagggactcactactcttgatacagttgtctcctccagctgctgtaccagtttagactacatcgtcacctacctcttcaagcacatagcaaaagagggcaagaagccacttcgatgcagagaggctacccaggctggtcagagactattacattttatgcagcaaaacccagatgtcctgcagcagatgatgtctgtcctcatgaacaccattgtctttgaagactgtcggaaccagtggtcagtatccaggcctctcctggggctcatcctgctcaatgagaagtatttcagtgaactgagagcaagtttgataaacagccagcccctccccaagcaggaggtccttgcccagtgcttcagaaacctaatggaaggagtggagcagaacctgtccgtcaagaacagagacaggttcacccaaaatctgtctgtattcagaagagatgtggcagaggcgttgcgcagtgatggcaacactgaaccatgcagtctcgacatgatgagctgacccgacttttctgaccatgtgcggagcagcctttatcaagagactcctgaaggtctgggtctcaggacagtgatgttggctagcccaggggaatgtatttttcaaaacatacaagcaacagcaaaagccctaacttcttatacgtctagcctaattataagaatttctaacagtaccagtgtaaattcagtcttttctctgaaaagcaaaggatgtgttttcagtctttctatcaaatattatctttgttctcctaatgctctgaaaggatgtagaaacaatatttaaccaaagaacgtaataaaccaggtttgcacctaagtgtgtactagtttatggttctgcagtcaaggttgtcaatttgttggagatgcagccttcaccatggatcctggattgagacgaatgccattggaacctgttaaatgagtagtttgttatgtgtctggaagaagcagcgttagggactttgggctgtgagcatttagaacgagcctggaagcactacagagcatcccacaggaccacacgcaggcctccctgcctcagctgcatctgataaagttgagagacagtaacacaattaaatgacttagaaacaatgtttgcttttcactggcataaatctgaagtggttcagtctagaagaattaagctgtgcaattactgcctgcagagatatttcttcaggaggagtcatgtagccccagtcagaagttctgggtggtgccagcacccagtcctctgcctccatttaatttttaagagaaggtgaaggtaactattagaatataatatttgaagcagctctgccttcttagggctacccaaaacagttctaggtgctaaaattcagattttcagaggatgagaaatagctggtttccaactctccacaaaaactcttattactgttgggacttgggattctgactcaccccaaacccagaacatgaagaagacctttacagtttgtgctctactgttactaggctattaatttgagatcgtccactgtcaagtgttttactatctcactgctgtttttatgattcaggcttataacaaatattgtatcctttatttctgataagacatgaaaggttggccttactgttgaacaataagtaaatccacaggctcctgttgtaatctca

SEQ ID NO: 213577 - DNA, 3267 bp, Artificial Sequence
  derived and/or modified sequence
atggccctgcacttccagagcctggccgagctggaggtgctgtgcacccacctgtacatcggcaccgacctgacccagagaatcgaggccgagaaggccctgctggagctgatcgacagccccgagtgcctgagcaagtgccagctgctgctggagcagggcaccaccagctacgcccagctgctggccgccacctgcctgagcaagctggtgagcagagtgagccccctgcccgtggagcagagaatggacatcagaaactacatcctgaactacgtggccagccagcccaagctggcccccttcgtgatccaggccctgatccaggtgatcgccaagatcaccaagctgggctggttcgaggtgcagaaggaccagttcgtgttcagagagatcatcgccgacgtgaagaagttcctgcagggcaccgtggagcactgcatcatcggcgtgatcatcctgagcgagctgacccaggagatgaacctggtggactacagcagacccagcgccaagcacagaaagatcgccaccagcttcagagacaccagcctgaaggacgtgctggtgctggcctgcagcctgctgaaggaggtgttcgccaagcccctgaacctgcaggaccagtgccagcagaacctggtgatgcaggtgctgaagctggtgctgaactgcctgaacttcgacttcatcggcagcagcgccgacgagagcgccgacgacctgtgcaccgtgcagatccccaccacctggagaaccatcttcctggagcccgagaccctggacctgttcttcaacctgtaccacagcctgccccccctgctgagccagctggccctgagctgcctggtgcagttcgccagcaccagaagaagcctgttcaacagccccgagagagccaagtacctgggcaacctgatcaagggcgtgaagagaatcctggagaacccccagggcctgagcgaccccggcaactaccacgagttctgcagattcctggccagactgaagaccaactaccagctgggcgagctggtgatggtgaaggagtaccccgaggtgatcagactgatcgccaacttcaccatcaccagcctgcagcactgggagttcgcccccaacagcgtgcactacctgctgaccctgtggcagagaatggtggccagcgtgcccttcgtgaagagcaccgagccccacctgctggacacctacgcccccgagatcaccaaggccttcatcaccagcagactggacagcgtggccatcgtggtgagagaccacctggacgaccccctggacgacaccgccaccgtgttccagcagctggagcagctgtgcaccgtgagcagatgcgagtacgagaagacctgcgccctgctggtgcagctgttcgaccagaacgcccagaactaccagaagctgctgcacccctacagcggcgtgaccgtggacatcaccatccaggagggcagactggcctggctggtgtacctggtgggcaccgtggtgggcggcagactgacctacaccagcaccgacgagcacgacgccatggacggcgagctgagctgcagagtgttccagctgatcagcctgatggacaccggcctgcccagatgctgcaacgagaagatcgagctggccatcctgtggttcctggaccagttcagaaagacctacgtgggcgaccagctgcagagaaccagcaaggtgtacgccagaatgagcgaggtgctgggcatcaccgacgacaaccacgtgctggagaccttcatgaccaagatcgtgaccaacctgaagtactggggcagatacgagcccgtgatcagcagaaccctgcagttcctgaacgacctgagcgtgggctacatcctgctgaagaagctggtgaagatcgacgccgtgaagttcatgctgaagaaccacaccagcgagcacttccccttcctgggcatcagcgacaaccacagcctgagcgacttcagatgcagaaccaccttctacaccgccctgaccagactgctgatggtggacctgggcgaggacgaggacgagttcgagaacttcatgctgcccctgaccgtggccttcgagaccgtgctgcagatcttcaacaacaacttcaagcaggaggacgtgaagagaatgctgatcggcctggccagagacctgagaggcatcgccttcgccctgaacaccaagaccagctacaccatgctgttcgactggatgtaccccacctacctgcccctgctgcagaacgccgtggagagatggtacggcgagcccacctgcaccacccccatcctgaagctgatggccgagctgatgcagaacagaagccagagactgaacttcgacgtgagcagccccaacggcatcctgctgttcagagaggccagcaagatggtgtgcacctacggcaaccagatcctgagcctgggcagcctgagcaaggaccagatctaccccatgaagctgaagggcatcagcatctgctacagcgccctgaagagcgccctgtgcggcaactacgtgagcttcggcgtgttcaagctgtacggcgacaaccacttcgacaacgtgctgcaggccttcgtgaagatgctgctgagcgtgagccacagcgacctgctgcagtacagaaagctgagccagagctactaccccctgctggagtgcctgacccaggaccacatgagcttcatcatcaacctggagccccccgtgctgatgtacgtgctgaccagcatcagcgagggcctgaccaccctggacaccgtggtgagcagcagctgctgcaccagcctggactacatcgtgacctacctgttcaagcacatcgccaaggagggcaagaagcccctgagatgcagagaggccacccaggccggccagagactgctgcacttcatgcagcagaaccccgacgtgctgcagcagatgatgagcgtgctgatgaacaccatcgtgttcgaggactgcagaaaccagtggagcgtgagcagacccctgctgggcctgatcctgctgaacgagaagtacttcagcgagctgagagccagcctgatcaacagccagcccctgcccaagcaggaggtgctggcccagtgcttcagaaacctgatggagggcgtggagcagaacctgagcgtgaagaacagagacagattcacccagaacctgagcgtgttcagaagagacgtggccgaggccctgagaagcgacggcaacaccgagccctgcagcctggacatgatgagctag

SEQ ID NO: 213578 - protein, 823 aa, Artificial Sequence
  derived and/or modified sequence
MSRRKQGNPQHLSQRELITPEADHVEAAILEEDEGLEIEEPSGLGLMVGGPDPDLLTCGQCQMNFPLGDILVFIEHKRKQCGGSLGACYDKALDKDSPPPSSRSELRKVSEPVEIGIQVTPDEDDHLLSPTKGICPKQENIAGKDEPSSYICTTCKQPFNSAWFLLQHAQNTHGFRIYLEPGPASSSLTPRLTIPPPLGPEAVAQSPLMNFLGDSNPFNLLRMTGPILRDHPGFGEGRLPGTPPLFSPPPRHHLDPHRLSAEEMGLVAQHPSAFDRVMRLNPMAIDSPAMDFSRRLRELAGNSSTPPPVSPGRGNPMHRLLNPFQPSPKSPFLSTPPLPPMPPGGTPPPQPPAKSKSCEFCGKTFKFQSNLIVHRRSHTGEKPYKCQLCDHACSQASKLKRHMKTHMHKAGSLAGRSDDGLSAASSPEPGTSELAGEGLKAADGDFRHHESDPSLGHEPEEEDEEEEEEEEELLLENESRPESSFSMDSELSRNRENGGGGVPGVPGAGGGAAKALADEKALVLGKVMENVGLGALPQYGELLADKQKRGAFLKRAAGGGDAGDDDDAGGCGDAGAGGAVNGRGGGFAPGTEPFPGLFPRKPAPLPSPGLNSAAKRIKVEKDLELPPAALIPSENVYSQWLVGYAASRHFMKDPFLGFTDARQSPFATSSEHSSENGSLRFSTPPGDLLDGGLSGRSGTASGGSTPHLGGPGPGRPSSKEGRRSDTCEYCGKVFKNCSNLTVHRRSHTGERPYKCELCNYACAQSSKLTRHMKTHGQIGKEVYRCDICQMPFSVYSTLEKHMKKWHGEHLLTNDVKIEQAERS

SEQ ID NO: 213579 - DNA, 7603 bp, Artificial Sequence
  derived and/or modified sequence
ttttcttgcttttcttcccttttttttctttttgcaaacaaaacaaaaaacagcatagaagaaagagcaaaataaagaagaagaagaggaggaagagagggaaagagaggaagggaaaaaaaacaccaacccgggcagaggaggaggtgcggcggcggcggcggcggcggcagcggcggcagcggcgcggcggcggctcggaccccctcccccggctccccccatcagtgcagctctccgggcgatgccagaatagatgccggggcaatgtcccgccgcaaacagggcaacccgcagcacttgtcccagagggagctcatcaccccagaggctgaccatgtggaggccgccatcctcgaagaagacgagggtctggagatagaggagccaagtggcctggggctgatggtgggtggccccgaccctgacctgctcacctgtggccagtgtcaaatgaacttccccttgggggacatcctggtttttatagagcacaaaaggaagcagtgtggcggcagcttgggtgcctgctatgacaaggccctggacaaggacagcccgccaccctcctcacgctccgagctcaggaaagtgtccgagccggtggagatcgggatccaagtcacccccgacgaagatgaccacctgctctcacccacgaaaggcatctgtcccaagcaggagaacattgcaggtaaagatgagccttccagctacatttgcacaacatgcaagcagcccttcaacagcgcgtggttcctgctgcagcacgcgcagaacacgcacggcttccgcatctacctggagcccgggccggccagcagctcgctcacgccgcggctcaccatcccgccgccgctcgggccggaggccgtggcgcagtccccgctcatgaatttcctgggcgacagcaaccccttcaacctgctgcgcatgacgggccccatcctgcgggaccacccgggcttcggcgagggccgcctgccgggcacgccgcctctcttcagtcccccgccgcgccaccacctggacccgcaccgcctcagtgccgaggagatggggctcgtcgcccagcaccccagtgccttcgaccgagtcatgcgcctgaaccccatggccatcgactcgcccgccatggacttctcgcggcggctccgcgagctggcgggcaacagctccacgccgccgcccgtgtccccgggccgcggcaaccctatgcaccggctcctgaaccccttccagcccagccccaagtccccgttcctgagcacgccgccgctgccgcccatgccccctggcggcacgccgcccccgcagccgccagccaagagcaagtcgtgcgagttctgcggcaagaccttcaagttccagagcaatctcatcgtgcaccggcgcagtcacacgggcgagaagccctacaagtgccagctgtgcgaccacgcgtgctcgcaggccagcaagctcaagcgccacatgaagacgcacatgcacaaggccggctcgctggccggccgctccgacgacgggctctcggccgccagctcccccgagcccggcaccagcgagctggcgggcgagggcctcaaggcggccgacggtgacttccgccaccacgagagcgacccgtcgctgggccacgagccggaggaggaggacgaggaggaggaggaggaggaggaggagctgctactggagaacgagagccggcccgagtcgagcttcagcatggactcggagctgagccgcaaccgcgagaacggcggtggtggggtgcccggggtcccgggcgcggggggcggcgcggccaaggcgctggctgacgagaaggcgctggtgctgggcaaggtcatggagaacgtgggcctaggcgcactgccgcagtacggcgagctcctggccgacaagcagaagcgcggcgccttcctgaagcgtgcggcgggcggcggggacgcgggcgacgacgacgacgcgggcggctgcggggacgcgggcgcgggcggcgcggtcaacgggcgcgggggcggcttcgcgccaggcaccgagcccttccccgggctcttcccgcgcaagcccgcgccgctgcccagccccgggctcaacagcgccgccaagcgcatcaaggtggagaaggacctggagctgccgcccgccgcgctcatcccgtccgagaacgtgtactcgcagtggctggtgggctacgcggcgtcgcggcacttcatgaaggaccccttcctgggcttcacggacgcacgacagtcgcccttcgccacgtcgtccgagcactcgtccgagaacggcagcctgcgcttctccacgccgcccggggacctgctggacggcggcctctcgggccgcagcggcacggccagcggaggcagcaccccgcacctgggcggcccgggccccgggcggcccagctccaaggagggccgccgcagcgacacgtgcgagtactgcggcaaggtgttcaagaactgcagcaacttgacggtgcaccggcggagccacaccggcgagcggccttacaagtgcgagctgtgcaactacgcgtgcgcgcagagcagcaagctcacgcgccacatgaagacgcacgggcagatcggcaaggaggtgtaccgctgcgacatctgccagatgcccttcagcgtctacagcaccctggagaaacacatgaaaaagtggcacggcgagcacttgctgactaacgacgtcaaaatcgagcaggccgagaggagctaagcgcgcgggccccggcgccccgcacctgtacagtggaaccgttgccaaccgagagaatgctgacctgacttgcctccgtgtcaccgccaccccgcaccccgcgtgtccccggggcccaggggaggcggcactccaacctaacctgtgtctgcgaagtcctatggaaacccgagggttgattaaggcagtacaaattgtggagccttttaactgtgcaataatttctgtatttattgggttttgtaatttttttggcatgtgcaggtactttttattattattttttctgtttgaattcctttaagagattttgttgggtatccatcccttctttgttttttttttaacccggtagtagcctgagcaatgactcgcaagcaatgttagaggggaagcatatcttttaaattataatttggggggaggggtggtgctgcttttttgaaatttaagctaagcatgtgtaatttcttgtgaagaagccaacactcaaatgacttttaaagttgtttactttttcattccttccttttttttgtcctgaaataaaaagtggcatgcagttttttttttaattattttttaattttttttttggtttttgtttttggggtggggggtgtggatgtacagcggataacaatctttcaagtcgtagcactttgtttcagaactggaatggagatgtagcactcatgtcgtcccgagtcaagcggccttttctgtgttgatttcggctttcatattacataagggaaaccttgagtggtggtgctgggggaggcaccccacagactcagcgccgccagagatagggtttttggagggctcctctgggaaatggcccgacagcattctgaggttgtgcatgaccagcagatactatcctgttggtgtgccctggggtgccatggctgctattcgctgtagattaggctacataaaatgggctgagggtacctttttggggagatggggtggcctgcagtgacacagaaaggaagaaactagcggtgttcttttaggcgttttctggcttgacggcttctctctttttttaaatcacccccaccacataaatctcaaatcctatgttgctacaaggggtcatccatcatttcccaagcagacgaatgccctaattaattgaagttagtgttctctcatttaatgcacactgatgatattgtagggatgggtggggtggggatcttgcaaatttctattctcttttactgaaaaagcaggggatgagttccatcagaaggtgcccagcgctacttcccaggtttttattttttttttcctatctcattaggttggaaggtactaaatattgaactgttaagattagacatttgaattctgttgacccgcactttaaagcttttgtttgcatttaaattaaatggcttctaaacaagaaattgcagcatattcttctctttggcccagaggtgggttaaactgtaagggacagctgagattgagtgtcagtattgctaagcgtggcattcacaatactggcactataaagaacaaaataaaataataatttataggacagtttttctactgccattcaatttgatgtgagtgccttgaaaactgatcttcctatttgagtctcttgagacaaatgcaaaactttttttttgaaatgaaaagactttttaaaaaagtaaaacaagaaaagtacattctttagaaactaacaaagccacatttactttaagtaaaaaaaaaaaaaattctggttgaagatagaggatatgaaatgccataagacccaatcaaatgaagaaataaacccagcacaaccttggacatccattagctgaattatcctcagccccttttgtttttgggacaacgctgcttagatatggagtggaggtgatttactgctgaattaaaactcaagtgacacaagttacaagttgatatcgttgaatgaaaagcaaaacaaaaacaattcaggaacaacggctaattttttctaaagttaaatttagtgcactctgtcttaaaaatacgtttacagtattgggtacatacaagggtaaaaaaaaaattgtgtgtatgtgtgttggagcgatctttttttttcaaagtttgcttaataggttatacaaaaatgccacagtggccgcgtgtatattgttttcttttggtgacggggttttagtatatattatatatattaaaatttcttgattactgtaaaagtggaccagtatttgtaataatcgagaatgcctgggcattttacaaaacaagaaaaaaaatacccttttcttttccttgaaaatgttgcagtaaaatttaaatggtgggtctataaatttgttcttgttacagtaactgtaaagtcggagttttagtaaatttttttctgccttgggtgttgaatttttatttcaaaaaaaatgtatagaaacttgtatttggggattcaaaggggattgctacaccatgtagaaaaagtatgtagaaaaaaagtgcttaatattgttattgctttgcagaaaaaaaaaaaatcacatttctgacctgtacttatttttctcttcccgcctccctctggaatggatatattggttggttcatatgatgtaggcacttgctgtatttttactggagctcgtaattttttaactgtaagcttgtccttttaaagggatttaatgtacctttttgttagtgaatttggaaataaaaagaaaaaaaaaacaaaaacaaacaggctgccataatatatttttttaatttggcaggataaaatattgcaaaaaaaacacatttgtatgttaagtcctattgtacaggagaaaaagggttgtttgacaacctttgagaaaaagaaacaaaaggaagtagttaaatgctttggttcacaaatcatttagttgtatatattttttgtcggaattggcctacacagagaaccgttcgtgttgggcttctctctgaacgccccgaaccttgcatcaaggctccttggtgtggccacagcagaccagatgggaaattatttgtgttgagtggaaaaaaatcagtttttgtaaagatgtcagtaacattccacatcgtcctccctttctctaagaggccatctctaagatgtcagatgtagaggagagagagcgagagaacatcttccttctctaccatcactcctgtggcggtcaccaccaccacctctcccgcccttaccagcagaaagcaatgcaaactgagctgctttagtccttgagaaattgtgaaacaaacacaaatatcataaaaggagctggtgattcagctgggtccaggtgaagtgacctgctgttgagaccggtacaaattggatttcaggaaggagactccatcacagccaggacctttcgtgccatggagagtgttggcctcttgtctttcttccctgctttgctgctttgctctctgaaacctacattccgtcagtttccgaatgcgagggcctgggatgaatttggtgcctttccatatctcgttctctctccttcccctgcgtttcctctccatccttcatcctccattggtcctttttttttctttcattttttatttaatttcttttcttcctgtctgttcctcccctaatcctctattttatttttattttttgtaaagccaagtagctttaagataaagtggtggtcttttggatgagggaataatgcatttttaaataaaataccaatatcaggaagccattttttatttcaggaaatgtaagaaaccattatttcaggttatgaaagtataaccaagcatccttttgggcaattccttaccaaatgcagaagcttttctgttcgatgcactctttcctccttgccacttacctttgcaaagttaaaaaaaaggggggagggaatgggagagaaagctgagatttcagtttcctactgcagtttcctacctgcagatccaggggctgctgttgcctttggatgccccactgaggtcctagagtgcctccagggtggtcttcctgtagtcataacagctagccagtgctcaccagcttaccagattgccaggactaagccatcccaaagcacaagcattgtgtgtctctgtgactgcagagaagagagaattttgcttctgttttgtgtttaaaaaaccaacacggaagcagatgatcccgagagagaggcctctagcatgggtgacccagccgacctcaggccggtttccgcactgccacaactttgttcaaagttgcccccaattggaacctgccacttggcattagagggtctttcatggggagagaaggagactgaattactctaagcaaaatgtgaaaagtaaggaaatcagcctttcatcccggtcctaagtaaccgtcagccgaaggtctcgtggaacacaggcaaacccgtgattttggtgctccttgtaactcagccctgcaaagcaaagtcccattgatttaagttgtttgcatttgtactggcaaggcaaaatatttttattaccttttctattacttattgtatgagcttttgttgtttacttggaggttttgtcttttactacaagtttggaactatttattattgcttggtatttgtgctctgtttaagaaacaggcacttttttttattatggataaaatgttgagatgacaggaggtcatttcaatatggcttagtaaaatatttattgttcctttattctctgtacaagattttgggcctctttttttccttaatgtcacaatgttgagttcagcatgtgtctgccatttcatttgtacgcttgttcaaaaccaagtttgttctggtttcaagttataaaaataaattggacatttaacttgatctccaaa

SEQ ID NO: 213580 - DNA, 2472 bp, Artificial Sequence
  derived and/or modified sequence
atgtctcgtcgcaaacagggtaacccccaacacctatcacaacgggaactcattacccctgaggcggatcatgtagaggcagccatcctggaagaggacgaagggctggagatcgaggaacccagcggtttggggctgatggtaggtgggcccgaccccgatctcctgacatgtgggcaatgccagatgaactttccgctcggggacattctggtatttatcgaacacaaaaggaaacagtgtggaggctccctcggcgcctgttatgataaagcgttagataaggattcaccgccaccttcctcccgctccgagttaagaaaggtgtcagagcctgtggagatcggcattcaggtgactcctgacgaagacgatcaccttctgtcccctacgaagggaatatgtcctaaacaggaaaatatcgccggcaaagatgagccctcgtcatatatttgtaccacgtgcaagcagcccttcaactcggcttggtttctccttcagcacgcccaaaatacacacggctttcgtatttatctggaacccggtccagcttccagttctttgacacccagactcaccattccgccccccttagggcctgaggctgttgcccagagtccgctgatgaattttttgggtgactcgaacccgtttaatctgttacgcatgacaggcccaattctgcgcgatcaccctggttttggcgagggccgcctgcccgggacaccccccctattcagcccacctccgcgtcatcacctggatcctcataggctttcagccgaggaaatgggcctcgtcgctcaacacccctccgcttttgatcgtgttatgcgcctcaatcccatggccatcgacagtccagcaatggattttagcagaagactccgggaactcgccgggaattcctccactccaccgccggtgagtcccgggaggggcaatcccatgcatcggctgctcaatcctttccagccaagcccaaagagtcctttcctctcaacgcctcctttgccccccatgccaccgggcggcaccccacccccacagcctcccgcaaagagtaagagctgcgaattttgtggtaaaaccttcaaattccagtcaaatctgatcgtgcataggcggtcacatactggggaaaagccctataagtgtcagctgtgcgatcacgcatgcagtcaggcttccaaattaaaacgacatatgaaaacgcacatgcacaaggccggatccctggccgggcggtctgacgatggattaagcgcagcgagtagtccagagccaggcactagcgagctcgccggagagggcctgaaagccgcagatggcgatttccgtcaccacgaatcagacccaagccttggccacgaacctgaagaggaggatgaggaggaggaagaagaagaagaagaattgctactggaaaacgagagtaggcccgagagctctttctctatggactcagagctgtccagaaacagagagaacgggggcggaggcgtccccggcgtgccgggggcgggcggcggggcggccaaagcgctcgccgatgaaaaggctctcgtcctggggaaggtgatggagaacgtgggattgggcgcgttaccacagtatggagagctgcttgctgacaagcagaaaaggggtgcttttctgaaacgagctgctgggggcggggatgctggggatgatgatgatgccggcggatgcggggacgcgggggctggtggtgcagtgaatggcagaggcggaggtttcgccccgggcactgagccattccccggcctgtttccccggaagcccgcgcctttgccctccccggggctcaactctgcggctaaaaggatcaaagttgagaaagacctggaactgccgcccgccgcacttatccctagcgaaaatgtgtattcccaatggctggtgggatatgccgcatcgcggcatttcatgaaggatccttttctgggtttcacagacgcccgccagtctcccttcgccactagtagcgagcattctagtgaaaacggctctctccggttttccactcccccgggcgatctcctggatggcggactgtcaggtcggagcgggactgcctccggcggctcgaccccccacctgggtggcccaggcccaggcaggccgtccagtaaagaaggcaggaggtctgacacttgcgaatattgcgggaaagtttttaaaaattgcagtaatttgactgttcatcggcgatctcacaccggtgaacgtccatataaatgcgagctgtgcaactacgcgtgcgctcagagctccaagctaaccagacatatgaaaactcacggccagattggaaaggaggtgtatagatgtgacatttgccagatgccattcagtgtgtactcaactttggagaaacacatgaaaaaatggcatggcgagcacttactgacaaacgacgttaagattgaacaggccgagagaagttag

SEQ ID NO: 213581 - DNA, 2472 bp, Artificial Sequence
  derived and/or modified sequence
atgagcaggaggaagcagggcaacccccagcacctgagccagcgggagctgatcaccccagaggccgaccacgtggaggccgccatcctggaggaggatgagggcctggagattgaggagcccagcggcctgggcctgatggtgggcggccctgaccctgacctgctgacctgtggccagtgccagatgaacttccccctgggggacatcctggtgttcatcgagcacaagaggaagcagtgtggcggcagcctgggcgcctgctatgacaaggccctggacaaggacagccccccacccagcagccgctctgagctgaggaaggtgtctgagcctgtggagatcggcatccaggtgaccccagatgaagatgaccacctgctgagccccaccaagggcatctgccccaagcaggagaacattgctgggaaggatgagcccagcagctacatctgcaccacctgcaagcagcccttcaacagcgcctggttcctgctgcagcacgcccagaacacccacggcttccgcatctacctggagcccggccctgccagcagcagcctgaccccccggctgaccatccccccacccctgggccctgaggccgtggcccagagccccctgatgaacttcctgggggacagcaaccccttcaacctgctgaggatgacaggccccatcctgcgggaccaccctggctttggagagggccgcctgcccggcaccccacccctcttcagccccccacccaggcaccacctggacccccaccggctgtctgctgaggagatgggcctggtggcccagcaccccagcgcctttgacagagtgatgaggctgaaccccatggccatcgacagccctgccatggacttcagccggcggctgcgggagctggccggcaacagcagcaccccacctcctgtgtccccaggccggggcaaccccatgcaccggctgctgaaccccttccagcccagccccaagagccccttcctgagcaccccacccctgccccccatgcctcctgggggcaccccaccaccccagcccccagccaagagcaagagctgtgagttctgtgggaagaccttcaagttccagagcaacctgattgtgcacagaagaagccacactggagagaagccctacaagtgccagctgtgtgaccacgcctgcagccaggccagcaagctgaagaggcacatgaagacccacatgcacaaggccggcagcctggccggccgcagtgatgatggcctgtctgctgccagcagccctgagcccggcaccagcgagctggccggggagggcctgaaggccgcagatggagacttccgccaccatgaaagtgaccccagcctgggccacgagcctgaggaggaggatgaggaggaggaggaggaggaggaggagctgctgctggagaatgaaagcaggcctgagagcagcttctccatggattctgagctgagcaggaaccgggagaatggaggcggcggcgtgcctggggtgcctggggccggcggcggggccgccaaggccctggctgatgagaaggccctggtgctgggcaaggtgatggagaatgtgggcctgggcgccctgccccagtatggagagctgctggccgacaagcagaagagaggagccttcctgaagagagctgctggaggaggagatgctggagatgatgatgatgctgggggctgtggagatgctggggccggcggcgctgtgaatggccggggcggcggctttgcccctggaacagagcccttccctggcctcttccccaggaagccagcccccctgcccagccctggcctgaacagcgctgccaagaggatcaaggtggagaaggacctggagctgcccccagctgccctgatccccagtgaaaatgtgtacagccagtggctggtgggctatgctgccagccgccacttcatgaaggaccccttcctgggcttcacagatgcccggcagagcccctttgccaccagcagcgagcacagcagtgaaaatggcagcctgcgcttcagcaccccacctggggacctgctggatggcggcctgagcggccgctctggaacagccagcggcggcagcaccccccacctgggcggccctggccctggccggcccagcagcaaggagggccgccgcagtgacacctgtgagtactgtgggaaggtgttcaagaactgcagcaacctgactgtgcaccggcgcagccacactggagagcggccctacaagtgtgagctgtgcaactatgcctgtgcccagagcagcaagctgaccaggcacatgaagacccacggccagatcggcaaggaggtgtaccgctgtgacatctgccagatgcccttctctgtgtacagcaccctggagaagcacatgaagaagtggcacggggagcacctgctgaccaatgatgtgaagattgagcaggccgagaggagctag

SEQ ID NO: 213582 - DNA, 2472 bp, Artificial Sequence
  derived and/or modified sequence
atgagccggcggaagcagggcaacccccagcacctgagccagcgggagctgatcacgcccgaagcagatcacgtagaagccgccattcttgaagaggatgaggggctcgagattgaagagccttctggactgggcctgatggtgggagggccagatccggacctccttacctgtggacaatgtcagatgaattttccacttggggatatattagtctttattgagcacaagaggaagcagtgtggcggatccctgggagcttgttatgataaagccctggacaaagattcgccacccccctcctctcggtccgagctccgcaaagtgtctgagccggtcgagatcggcattcaggtgaccccagatgaggacgatcacttattgtctccaacaaagggcatttgccctaagcaagagaatatcgccggtaaagacgagcccagctcttatatctgtacaacctgcaagcagcctttcaatagtgcatggttcctgctgcagcatgctcagaacacgcatggtttccgcatctatctggagcccgggcccgccagttcttcactcactccgcgtctgacaattccgccccctctggggccagaagcagtcgcgcagagtcctctgatgaatttcctcggggattcgaatccattcaacctgctgaggatgaccggtccaatcctgagagaccaccccggcttcggtgagggacgactgcccggcacaccacctcttttttccccaccccctagacatcacctggacccgcatagactgtctgccgaggaaatgggtttggtcgctcagcatccaagcgcatttgatagagtgatgcggttgaaccctatggccatcgactcccctgctatggatttctctcgcaggctcagggagctcgccggtaatagctccacgcccccgcctgttagcccgggtcgaggaaatcccatgcatcggctgttgaacccctttcagccttcacccaagagtcccttcctgtccacaccaccattgcccccgatgccacccggtggcactccgcccccccagccaccagcgaagagcaaatcctgcgagttctgcggtaagactttcaagtttcagagcaatctgatcgttcataggagatctcacactggcgagaagccctacaaatgtcagctctgcgaccacgcctgcagtcaggcgtctaagctgaaacgacatatgaaaactcacatgcacaaggccgggtctttggctggccggtctgacgacgggttgtccgccgccagtagcccggaacccggcacctctgagctggctggggaaggcttgaaagcagccgacggcgactttagacaccatgagagtgacccctcgctggggcatgagcctgaggaggaggatgaagaggaagaagaagaagaagaggagctcctgctggagaatgagagcaggccagagagctccttctcaatggacagcgagttaagccgcaacagggaaaacgggggtgggggggtgcccggggttcccggagccggtggtggggctgccaaagcactcgccgatgaaaaagccctggtactgggtaaagtcatggagaacgtcggactgggggctctgccccagtacggggagctgctggccgataaacagaagagaggggcctttcttaagagggccgctgggggcggggatgccggcgacgacgacgacgccggtggatgcggggacgccggcgctgggggagctgtgaatggcagaggtggtggtttcgccccagggacagaaccttttccaggcttgttccccaggaagcccgctccgttgccaagccctgggttgaatagtgccgcgaagagaataaaggtggagaaggacctagaactcccccctgctgccctcatcccgtctgaaaacgtgtactctcagtggcttgttgggtatgccgcatctaggcacttcatgaaggacccttttcttggcttcaccgatgctcggcaatccccctttgcgactagttctgaacacagctctgaaaatggaagcttaagattcagtaccccaccaggagatctcctggacgggggattgtccggccggtcaggtactgcctctggtggctcaacaccccacctgggcggacctggaccaggtcggccatcttccaaagagggacgcagatctgacacatgtgaatactgcggaaaggttttcaaaaactgctccaacctgacagttcaccggcgaagtcacaccggagagagaccctataaatgtgaattgtgtaattatgcgtgtgctcaaagtagcaagctgaccagacatatgaagacccacggacagatcgggaaagaagtctaccggtgcgacatttgccagatgcccttctcggtatacagtacacttgagaagcatatgaagaaatggcacggggagcacttattaacgaacgacgtaaagattgagcaggcggagaggtcatag

SEQ ID NO: 213583 - DNA, 2472 bp, Artificial Sequence
  derived and/or modified sequence
atgtcgcggaggaagcagggcaacccccagcatctgtctcagagagagctgattacacccgaagcggatcacgtggaggctgccatcctcgaggaggatgagggtctggagattgaggaaccatccgggttagggttaatggtaggcggtcccgacccggacctgctgacatgtggtcagtgccagatgaattttcctcttggcgacatccttgtctttatcgagcacaagagaaagcagtgtggagggagcctgggcgcatgttacgacaaggccctcgataaagattcccctccgccatcatcccggtccgagctcagaaaagtttcggagcctgttgagatcgggatacaggtgacaccagatgaggacgatcatctactgtcccccaccaaagggatttgcccgaagcaggagaacatcgctggaaaggatgagccttctagttatatatgtactacttgtaagcagccttttaattcagcttggtttctgctgcaacacgcccagaacacgcacggcttccggatctatctagaaccgggacccgcaagctcctccctaactccacgtctcacaataccacctccactgggacccgaggctgtggcacagagtcctctgatgaacttcttgggtgactccaatccctttaatctgctacggatgactggacctatcctgagagaccaccctggcttcggagagggtaggctacctggcaccccgcctctgttcagtccgccacctcgccaccacctggaccctcacagactgagcgctgaagaaatggggctggtggcccagcatcccagtgccttcgacagggtgatgaggctgaaccccatggccatcgactcccctgctatggacttttcccgcaggctgcgggagctggcagggaattcgagcaccccacccccagtttccccagggagaggcaacccgatgcaccgtctgctgaaccccttccagccatcccctaaaagccccttcctgtcaactcctccgttaccacccatgcctcctgggggtacaccacctccccaaccccctgcgaagagcaaatcgtgcgagttttgtggcaagacctttaagtttcagtccaacttgatagttcacaggagatcccacaccggtgaaaagccctacaaatgtcagctctgtgatcatgcttgctctcaggcttcgaaacttaaacggcacatgaagactcacatgcacaaggcaggatctctcgctggccgatctgacgacgggttatccgccgcaagctctcccgaacccggaacatcggagctggctggtgaaggactcaaggccgcagacggtgactttaggcatcatgagagcgacccttccttaggacacgaacccgaagaagaagatgaggaggaggaggaggaagaagaggagctgctgctggaaaacgagtcaagacccgagagctctttcagtatggacagcgagttatctagaaatcgggagaacggcggaggtggtgtcccaggtgtgcccggagctgggggaggcgcagctaaagcccttgcagatgagaaggccctggttttaggaaaagtgatggagaacgttgggctcggggcactacctcagtacggagagctgctcgctgataagcagaaacgaggagctttcctaaagcgggctgcgggtggtggggacgcaggagatgacgatgatgctggcggatgcggcgacgctggggcaggaggtgccgttaacgggcgtggagggggatttgcccctggcactgaaccattcccaggcctcttccctcgtaaacccgcacctctcccctcccccggtttaaactccgctgccaaacggattaaggtggagaaagatctggagctgccccctgccgcactaatcccatcggagaatgtctactcccaatggcttgtcgggtatgcagcttcccgccacttcatgaaggacccgttcctcggctttacagacgcgaggcagtcgccattcgctacttctagcgaacactcaagtgagaatggatctctaaggttcagcacaccccctggcgatctcttggacgggggactttctggtcgctcaggcaccgcctccgggggatcaacccctcatctgggtggacccggaccaggcaggccctcgtccaaggagggcagaagaagcgatacgtgtgaatactgcgggaaggtgttcaaaaattgttcgaacctcacagtccaccggagaagccacaccggagagcgcccatacaagtgtgaactgtgtaactatgcttgcgcccagagctcgaaattgacccgacatatgaagacacacggacaaattggtaaggaggtgtaccgctgtgatatatgccaaatgccattttcagtgtatagcaccctggagaagcatatgaagaagtggcatggcgaacacctgcttaccaatgatgtaaaaatcgagcaggcggagagatcatag

SEQ ID NO: 213584 - DNA, 2472 bp, Artificial Sequence
  derived and/or modified sequence
atgagcagaagaaagcagggcaacccccagcacctgagccagagagagctgatcacccccgaggccgaccacgtggaggccgccatcctggaggaggacgagggcctggagatcgaggagcccagcggcctgggcctgatggtgggcggccccgaccccgacctgctgacctgcggccagtgccagatgaacttccccctgggcgacatcctggtgttcatcgagcacaagagaaagcagtgcggcggcagcctgggcgcctgctacgacaaggccctggacaaggacagccccccccccagcagcagaagcgagctgagaaaggtgagcgagcccgtggagatcggcatccaggtgacccccgacgaggacgaccacctgctgagccccaccaagggcatctgccccaagcaggagaacatcgccggcaaggacgagcccagcagctacatctgcaccacctgcaagcagcccttcaacagcgcctggttcctgctgcagcacgcccagaacacccacggcttcagaatctacctggagcccggccccgccagcagcagcctgacccccagactgaccatccccccccccctgggccccgaggccgtggcccagagccccctgatgaacttcctgggcgacagcaaccccttcaacctgctgagaatgaccggccccatcctgagagaccaccccggcttcggcgagggcagactgcccggcaccccccccctgttcagccccccccccagacaccacctggacccccacagactgagcgccgaggagatgggcctggtggcccagcaccccagcgccttcgacagagtgatgagactgaaccccatggccatcgacagccccgccatggacttcagcagaagactgagagagctggccggcaacagcagcacccccccccccgtgagccccggcagaggcaaccccatgcacagactgctgaaccccttccagcccagccccaagagccccttcctgagcaccccccccctgccccccatgccccccggcggcaccccccccccccagccccccgccaagagcaagagctgcgagttctgcggcaagaccttcaagttccagagcaacctgatcgtgcacagaagaagccacaccggcgagaagccctacaagtgccagctgtgcgaccacgcctgcagccaggccagcaagctgaagagacacatgaagacccacatgcacaaggccggcagcctggccggcagaagcgacgacggcctgagcgccgccagcagccccgagcccggcaccagcgagctggccggcgagggcctgaaggccgccgacggcgacttcagacaccacgagagcgaccccagcctgggccacgagcccgaggaggaggacgaggaggaggaggaggaggaggaggagctgctgctggagaacgagagcagacccgagagcagcttcagcatggacagcgagctgagcagaaacagagagaacggcggcggcggcgtgcccggcgtgcccggcgccggcggcggcgccgccaaggccctggccgacgagaaggccctggtgctgggcaaggtgatggagaacgtgggcctgggcgccctgccccagtacggcgagctgctggccgacaagcagaagagaggcgccttcctgaagagagccgccggcggcggcgacgccggcgacgacgacgacgccggcggctgcggcgacgccggcgccggcggcgccgtgaacggcagaggcggcggcttcgcccccggcaccgagcccttccccggcctgttccccagaaagcccgcccccctgcccagccccggcctgaacagcgccgccaagagaatcaaggtggagaaggacctggagctgccccccgccgccctgatccccagcgagaacgtgtacagccagtggctggtgggctacgccgccagcagacacttcatgaaggaccccttcctgggcttcaccgacgccagacagagccccttcgccaccagcagcgagcacagcagcgagaacggcagcctgagattcagcaccccccccggcgacctgctggacggcggcctgagcggcagaagcggcaccgccagcggcggcagcaccccccacctgggcggccccggccccggcagacccagcagcaaggagggcagaagaagcgacacctgcgagtactgcggcaaggtgttcaagaactgcagcaacctgaccgtgcacagaagaagccacaccggcgagagaccctacaagtgcgagctgtgcaactacgcctgcgcccagagcagcaagctgaccagacacatgaagacccacggccagatcggcaaggaggtgtacagatgcgacatctgccagatgcccttcagcgtgtacagcaccctggagaagcacatgaagaagtggcacggcgagcacctgctgaccaacgacgtgaagatcgagcaggccgagagaagctag

SEQ ID NO: 213585 - protein, 797 aa, Artificial Sequence
  derived and/or modified sequence
MAALAYNLGKREINHYFSVRSAKVLALVAVLLLAACHLASRRYRGNDSCEYLLSSGRFLGEKVWQPHSCMMHKYKISEAKNCLVDKHIAFIGDSRIRQLFYSFVKIINPQFKEEGNKHENIPFEDKTASVKVDFLWHPEVNGSMKQCIKVWTEDSIAKPHVIVAGAATWSIKIHNGSSEALSQYKMNITSIAPLLEKLAKTSDVYWVLQDPVYEDLLSENRKMITNEKIDAYNEAAVSILNSSTRNSKSNVKMFSVSKLIAQETIMESLDGLHLPESSRETTAMILMNVYCNKILKPVDGSCCQPRPPVTLIQKLAACFFTLSIIGYLIFYIIHRNAHRKNKPCTDLESGEEKKNIINTPVSSLEILLQSFCKLGLIMAYFYMCDRANLFMKENKFYTHSSFFIPIIYILVLGVFYNENTKETKVLNREQTDEWKGWMQLVILIYHISGASTFLPVYMHIRVLVAAYLFQTGYGHFSYFWIKGDFGIYRVCQVLFRLNFLVVVLCIVMDRPYQFYYFVPLVTVWFMVIYVTLALWPQIIQKKANGNCFWHFGLLLKLGFLLLFICFLAYSQGAFEKIFSLWPLSKCFELKGNVYEWWFRWRLDRYVVFHGMLFAFIYLALQKRQILSEGKGEPLFSNKISNFLLFISVVSFLTYSIWASSCKNKAECNELHPSVSVVQILAFILIRNIPGYARSVYSSFFAWFGKISLELFICQYHIWLAADTRGILVLIPGNPMLNIIVSTFIFVCVAHEISQITNDLAQIIIPKDNSSLLKRLACIAAFFCGLLILSSIQDKSKH

SEQ ID NO: 213586 - DNA, 2394 bp, Artificial Sequence
  derived and/or modified sequence
atggcagcgctggcctataacctgggaaagcgggaaattaatcactacttttccgtaagaagcgccaaggtgcttgcactggtggccgtgcttcttctcgcagcctgccacttggcaagccgccggtatcgcggaaatgatagttgcgaatacttgctgagctccggaaggttcctcggagaaaaggtctggcaaccgcactcctgcatgatgcacaaatacaagatctccgaagccaaaaactgtctcgtggataagcacattgcgttcattggtgattcacgaattaggcagctcttttacagtttcgtgaagatcatcaaccctcagttcaaagaggagggaaataagcacgaaaacattcccttcgaagataaaacagcatccgtaaaagttgattttctgtggcatccagaggtgaacggatccatgaaacaatgcatcaaggtctggaccgaggacagcattgccaaaccacacgtcattgtggcgggagccgcaacgtggtccatcaagattcacaacggttctagcgaggcactgtctcagtacaagatgaacatcacgagcattgccccactccttgagaaactggctaaaaccagcgacgtatactgggttctgcaggatccagtatacgaagatctcttaagtgagaaccgaaagatgattaccaacgagaagatcgacgcgtataatgaggccgctgtctcgattctgaacagctccacccggaatagcaaatccaatgttaaaatgttttcagtgagcaaactgatcgcccaggaaacaatcatggagagtttggacggtctgcacttacccgaaagcagccgggagactacagcaatgatcctaatgaatgtatattgcaataagatcctgaaaccggtcgatgggtcatgttgccagccgcgaccgcccgtgaccctcattcagaaattggctgcttgtttcttcacactaagcattataggatatcttatcttctacataatccatcgcaacgctcataggaagaataaaccatgcactgacctggagtcaggtgaagaaaaaaaaaatatcattaatacccccgtgagctccctggaaatcctgttgcagtcattctgtaagctgggacttatcatggcctacttctatatgtgcgatcgcgccaacctcttcatgaaagagaataagttttatacacattcttctttcttcatccccataatttacattttagtgctgggcgtgttctacaatgaaaacaccaaggaaactaaagtcctcaaccgtgaacagactgatgaatggaagggctggatgcaattggtcatcctgatctaccatatcagcggggcttcaaccttcctgcctgtgtatatgcacattcgcgttctggttgcagcatacctatttcagacaggctatggacatttcagctatttttggatcaaaggcgactttggaatatacagggtgtgccaggtattgttcaggctcaattttttggtcgtggttctgtgcatcgtgatggacagaccataccagttttattatttcgtgcctcttgtaaccgtctggttcatggtgatctacgtaaccctagctctgtggccacaaattatccagaaaaaagcgaacggcaactgtttctggcacttcggattgttactaaagttaggcttccttctgctgtttatctgttttctggcctactctcaaggtgcatttgaaaagatcttctccctttggcctttatctaaatgtttcgagctgaaagggaacgtgtacgaatggtggtttagatggagactagatcgttatgtggtgttccacgggatgctgtttgctttcatttatctagcactgcagaaacggcaaatcctgtcggaggggaagggggaacctctgttctctaacaaaatctccaatttcttgctttttattagcgtagtcagctttcttacgtactcaatttgggcttcatcttgcaagaataaggctgaatgcaatgaactgcacccgagcgtgagcgtggtccaaattctggcttttatcctgatcaggaacatccccggctatgcccgctcagtgtattcctcattctttgcttggttcgggaagattagcctagagctgtttatttgccagtaccacatttggctagctgccgacaccagagggatattagtgcttatcccaggtaacccgatgttaaatatcatcgtcagcactttcatcttcgtctgtgtggcgcacgagatcagtcaaataacaaatgacctagcgcaaataatcatcccaaaggataacagttccctgctgaaacgtttagcttgtatcgccgcatttttttgtgggctgctcatactttctagcatacaggacaaatccaagcactag

SEQ ID NO: 213587 - DNA, 2394 bp, Artificial Sequence
  derived and/or modified sequence
atggccgccctggcctacaacctgggcaagcgggagatcaaccactacttctctgtgcgcagcgccaaggtgctggccctggtggccgtgctgctgctggccgcctgccacctggccagccgccgctacagaggaaatgacagctgtgagtacctgctgagcagcggccgcttcctgggggagaaggtgtggcagccccacagctgcatgatgcacaagtacaagatcagcgaggccaagaactgcctggtggacaagcacatcgccttcatcggggacagccgcatccggcagctgttctacagctttgtgaagatcatcaacccccagttcaaggaggagggcaacaagcatgagaacatcccctttgaggacaagacagcctctgtgaaggtggacttcctgtggcaccctgaggtgaatggctccatgaagcagtgcatcaaggtgtggacagaagattccatcgccaagccccacgtgattgtggccggggccgccacctggagcatcaagatccacaacggcagcagcgaggccctgagccagtacaagatgaacatcaccagcatcgcccccctgctggagaagctggccaagaccagtgatgtgtactgggtgctgcaggaccctgtgtatgaggacctgctgtctgaaaataggaagatgatcaccaatgagaagattgatgcctacaatgaagctgctgtgtccatcctgaacagcagcaccaggaacagcaagagcaatgtgaagatgttttctgtgtccaagctgattgcccaggagaccatcatggagagcctggatggcctgcacctgcctgagagcagccgggagaccacagccatgatcctgatgaatgtgtactgcaacaagatcctgaagcctgtggatggcagctgctgccagcccaggcctcctgtgaccctcatccagaagctggccgcctgcttcttcaccctgagcatcatcggctacctgatcttctacatcatccacagaaatgcccacaggaagaacaagccctgcacagacctggagagcggggaggagaagaagaacatcatcaacacccctgtgagcagcctggagatcctgctgcagagcttctgcaagctgggcctcatcatggcctacttctacatgtgtgaccgggccaacctcttcatgaaggagaacaagttctacacccacagcagcttcttcatccccatcatctacatcctggtgctgggcgtcttctacaatgaaaacaccaaggagaccaaggtgctgaaccgggagcagacagatgagtggaagggctggatgcagctggtgatcctgatctaccacatcagcggggccagcaccttcctgcctgtgtacatgcacatccgggtgctggtggccgcctacctgttccagacaggctacggccacttctcctacttctggatcaagggggactttggcatctacagagtgtgccaggtgctcttccggctgaacttcctggtggtggtgctgtgcatcgtgatggaccggccctaccagttctactactttgtgcccctggtgacagtgtggttcatggtgatctacgtgaccctggccctgtggccccagatcatccagaagaaggccaacggcaactgcttctggcacttcggcctgctgctgaagctgggcttcctgctgctcttcatctgcttcctggcctacagccagggcgcctttgagaagatcttcagcctgtggcccctgagcaaatgttttgagctgaagggaaatgtgtatgagtggtggttccgctggaggctggacagatatgtggtgttccacggcatgctgtttgccttcatctacctggccctgcagaagaggcagatcctgtctgagggcaagggggagcccctcttcagcaacaagatcagcaacttcctgctcttcatctctgtggtgtccttcctgacctacagcatctgggccagcagctgcaagaacaaggccgagtgcaatgagctgcaccccagcgtgtctgtggtgcagatcctggccttcatcctgatccggaacatccctggctacgcccggtctgtgtacagcagcttctttgcctggtttgggaagatcagcctggagctgttcatctgccagtaccacatctggctggccgctgacacccggggcatcctggtgctgatccctggcaaccccatgctgaacatcatcgtgtccaccttcatctttgtgtgtgtggcccacgagatcagccagatcaccaatgacctggcccagatcatcatccccaaggacaacagcagcctgctgaagaggctggcctgcatcgccgccttcttctgtggcctgctgatcctgagcagcatccaggacaagagcaagcactag

SEQ ID NO: 213588 - DNA, 2394 bp, Artificial Sequence
  derived and/or modified sequence
atggccgccctggcctacaacctgggcaagcgggagatcaaccactacttttctgtgcgcagcgctaaagtgctggcacttgtagccgtcctgttattggccgcttgtcatctggcatcccggcgttaccggggcaacgattcttgcgaatacttgctgagcagcggcaggttcctcggggagaaagtctggcagccacatagctgtatgatgcataagtacaagatttctgaagccaaaaattgtcttgttgataaacatattgccttcattggcgatagtagaatacgacagctattttacagcttcgtgaagattatcaacccacagttcaaggaagagggaaacaagcatgagaatattcctttcgaggataaaaccgcctccgttaaggttgacttcctatggcaccccgaggtcaatggttccatgaagcaatgcatcaaagtctggacagaggattcaatagcaaaaccccatgtgatcgtggctggagccgccacatggtctattaaaatccacaatggcagctccgaagcactgagtcagtataagatgaatatcacttcaattgctcctctcctggaaaaactagcaaaaacatctgatgtgtattgggttctccaagatccagtctacgaagatctgctatcagagaatagaaagatgataacgaacgaaaaaattgacgcctacaatgaggccgctgtgagcatcctcaattcatccacccggaattcaaagtccaacgtcaaaatgttcagcgtctctaaattgatcgcccaggagacaattatggaatcgctggatgggctgcacctgccagagtcctcaagagagactacagctatgattctcatgaacgtctattgcaataagattctgaaacctgtggatgggtcctgctgccagccccgacctcccgtgaccctgatacaaaagctggcagcctgcttcttcactttgtctatcatagggtatcttatcttctacattatccataggaatgcccataggaagaacaagccttgcactgatctggaaagcggagaagagaaaaaaaatatcatcaacacaccagtgagttctctggagattctcctccagtctttctgtaagttaggcctgattatggcatacttctacatgtgtgacagggcgaacctctttatgaaggaaaataaattttacacacatagttcatttttcatccctattatatacatattagtcctcggagttttctacaacgaaaataccaaggagacaaaagtcctcaatcgagaacaaactgatgagtggaagggttggatgcagctggttatcttaatatatcacatttcaggtgcgtctaccttcctccccgtttacatgcatattcgagtccttgtggcggcttacctgttccagactgggtatggccacttcagctacttttggataaagggtgatttcggcatttaccgagtgtgccaagtgctgttcagactgaactttctagttgtggtgctgtgcatagtgatggatcgaccatatcagttctattactttgtgccattggtcaccgtgtggtttatggtaatttacgtaaccctggccctctggccccaaatcattcagaagaaggcaaacggaaactgtttctggcacttcgggcttcttttaaagctagggtttttactgctatttatttgcttcctggcttattctcagggagcttttgagaagatcttctcgctgtggcccctgtcaaagtgcttcgaacttaaaggaaatgtctacgagtggtggttcaggtggagactagaccggtatgtagtgttccacgggatgttgtttgcttttatctatctcgccctccagaagcgacaaattctcagtgaagggaagggtgagccactgttcagtaataaaattagcaactttctgctcttcatcagtgttgtgagctttcttacctatagtatttgggcatcgagctgtaagaataaggcagagtgtaacgaactccacccttccgtgtctgtggttcagattctggcctttatcttaatccggaacatccccggctatgccagaagcgtgtacagcagcttctttgcctggttcggaaagatctcgctggaacttttcatctgccaatatcacatctggttggccgctgacactcggggaattctggtgttgatccctggaaatcccatgctcaacataatcgtatccacgtttatcttcgtctgcgtggctcatgagatttcccagattaccaacgacctggcgcaaatcataattccaaaggacaatagttctctcctgaaacggctggcctgtattgctgcttttttttgtggcctactgatactgtcctctatccaagacaagagcaaacactag

SEQ ID NO: 213589 - DNA, 2394 bp, Artificial Sequence
  derived and/or modified sequence
atggctgcgcttgcgtacaatctaggaaaacgcgagattaaccattacttttccgtccgcagcgcaaaggtattagccctggtggccgtgctgctcctagccgcatgtcatcttgccagccgtcgatatcgcggtaatgattcctgcgagtatctcctgtcatccggcaggtttctcggagaaaaggtgtggcagccccactcttgcatgatgcataaatataagatttcagaagcaaaaaattgcctagtcgacaagcacatcgcctttattggggattcgaggatcagacagttgttttactctttcgtaaagatcatcaatccgcaattcaaggaggagggaaataaacatgaaaacattcccttcgaggataagaccgcatcggtcaaggtcgactttctgtggcaccccgaggtcaatggctctatgaagcagtgcatcaaagtctggaccgaggactcaattgctaagcctcacgtaattgtggctggggctgccacttggtcaattaaaattcataacgggagctcggaagcactgtcccagtacaaaatgaacatcaccagcatcgctccccttcttgagaagcttgctaagacttctgatgtgtattgggtccttcaggaccccgtgtatgaagacctactgtcagaaaataggaaaatgattaccaatgagaagattgacgcctataatgaggctgctgtgagcattctgaatagctccactcgaaactctaagagtaatgtcaagatgttcagcgtaagcaagctcattgcccaggaaaccattatggaatctcttgacgggctccatctacctgaatccagtagggagactaccgccatgattctgatgaacgtgtattgcaataagatcctgaagcctgttgatggatcatgctgtcagcctcggcctcccgtgacacttatccagaagctagcagcctgcttttttactttaagcataattggttacctcatcttctatatcatccatcgcaatgctcatcgtaagaacaaaccctgcacagatctggaatccggtgaagagaagaagaacattatcaacacccctgttagcagcctggaaattttgctgcaatccttctgtaagttaggtctgatcatggcatacttttacatgtgtgatagagccaatctgttcatgaaggagaacaaattttacacacattcttcttttttcatcccaatcatctatatacttgtactcggcgtgttctacaatgaaaataccaaggaaactaaagtgctcaacagggagcagactgacgaatggaaaggatggatgcagctggtgatccttatttatcatatctccggggcttcaactttccttcctgtgtacatgcacattcgcgttctcgtcgcagcctacctctttcaaactggttatggccatttctcctatttctggattaagggggactttggtatctacagagtgtgccaagtgctgttcagactgaacttcttggtggtggtgctgtgtattgttatggatcggccttatcagttttactatttcgtgcccctggtcaccgtctggttcatggtgatctatgtaaccctcgccctgtggccccaaatcatccagaagaaagcaaatggtaactgtttctggcatttcggccttctgctaaaactgggcttccttctgctgttcatttgtttccttgcttacagtcagggcgcttttgaaaaaatatttagtttgtggccactgtcaaagtgtttcgaacttaagggcaatgtttacgagtggtggtttcggtggaggctggatcgctatgtggtgtttcatggaatgttatttgcctttatttatcttgctctgcagaaaaggcagattctgtccgaagggaaaggtgagccgctgttttccaataagatcagtaacttcctactgtttatcagcgtcgtgtcgttcctcacctactcaatttgggcaagctcttgtaaaaataaggctgaatgcaatgagttgcacccgagcgtcagcgtagtccagattctagctttcatcctgatccgcaacatccccggatatgcaaggagcgtttattcctcattcttcgcctggttcgggaagatcagcctggaactttttatctgtcagtaccacatttggttagccgcagacactcgtggtatcctggtgttaatccccggtaatcccatgttgaacatcatcgtctctacttttatttttgtgtgtgtggctcatgaaattagccagatcaccaatgatctagcacagattatcatccccaaggacaacagcagcttactcaagaggttggcctgtattgccgcattcttctgtgggctgctcattctctcctctatacaagataaatccaaacactag

SEQ ID NO: 213590 - DNA, 3942 bp, Artificial Sequence
  derived and/or modified sequence
aggaaggggaggagacaggcgtccagggcgcctggggaaccggcacggcggagcagcggcggcggggctggggggaggccgccgagtcggccgcggccgaggaggggcaggcggaggtcgggggcgccgcggccgcggggtcaggttccccggcgggaggcgcaggtggcggcctggggagctggcggccgctcctcgcctggctgcagcggcggcagccccagtgctgcccctgtgcggcgcccctttcccgctccgccgcgcactgttgtcatggaggaaccaagatggcggctctggcctacaacctgggcaagcgggagatcaaccactacttcagcgtgaggagcgccaaggtgctggcgctggtggccgtgctgctgctcgcagcgtgccacctcgcctcccgccgctaccgaggcaatgattcgtgtgaataccttctctcaagtggcagatttcttggagagaaagtttggcaacctcacagttgtatgatgcataaatacaaaatcagtgaagcaaagaactgccttgtagataaacatattgcatttattggagattccagaattcgtcaattgttttattcttttgtaaaaataattaatccccaattcaaagaagaaggaaataagcatgaaaacattccttttgaagacaagactgcatcagttaaagtggattttctgtggcatcctgaagttaatggttctatgaaacagtgtatcaaagtgtggactgaggattccattgcaaagccacatgtgattgtagcaggagctgccacatggtccatcaagattcacaatggtagcagtgaagcgctttctcaatataaaatgaacatcacctccatagcaccacttttagaaaaattggcaaagactagtgatgtttattgggtcttacaagatcctgtttatgaagatctattaagtgaaaataggaagatgatcactaatgagaagatagatgcttacaatgaagctgcagtcagtattttgaatagtagcaccagaaattctaaatcaaatgttaagatgttcagtgtttccaaattaattgctcaagaaaccatcatggaatctttggatggcttacatcttcctgaatcgagcagagaaactactgcaatgattcttatgaatgtgtattgcaataagattttgaagcctgtagatgggtcctgttgtcaacctcggcctcctgttactctcatacagaagctagctgcttgttttttcactttatctattatcggatatttaattttttacataattcatcgtaatgctcatcggaagaataagccgtgtactgatttggaaagtggagaggaaaagaaaaatattatcaatacccctgtgtcttcattagaaatacttttacaatctttctgcaaacttggcctgattatggcatatttctatatgtgtgaccgtgcaaatctgttcatgaaggaaaacaaattttatacacattcatctttctttattccaattatctacattttggttttgggagtattttataatgaaaatactaaagagactaaagtattaaatagagaacaaacagacgaatggaaaggctggatgcaacttgtgattttgatttatcacatttctggagcaagtacatttttgcctgtatacatgcacattcgagttctggttgctgcatatttatttcagacagggtatgggcatttctcatacttttggataaaaggagattttggaatctatagagtatgtcaggttttatttcgtctcaatttcctggtagtggtgttatgtatagtaatggatcgaccttatcaattctattactttgtccccttggtcactgtatggttcatggtcatatatgttactttagcactatggccacaaataatccaaaaaaaagcaaacggaaattgtttctggcattttggcttactgttgaaactaggctttttgctgttattcatatgttttttggcatattctcagggtgcatttgagaagatcttttctctttggccattgtccaagtgttttgaactgaaagggaatgtatatgaatggtggttcagatggaggttagaccgttatgtagttttccacggaatgctgtttgcttttatttatctggctttgcagaagcgtcaaatactttctgaaggaaagggtgaacctcttttttcaaacaaaatttcaaattttctgttgtttatttcagtagtttctttcttgacctattccatctgggctagcagttgtaaaaacaaagcagagtgcaatgaactccatccgtctgtttctgtggtacagattttagccttcatcctaataagaaacatccctggatatgcccgttcagtttacagttcattttttgcttggtttggaaaaatttcattagagctatttatttgccagtatcacatatggctggcagcggacacaaggggtatcttggtactgatacctggaaaccctatgctcaacatcattgtcagcactttcatatttgtttgtgtggcacatgaaatttctcagatcactaatgatcttgcacagattattattcctaaagataactcatctctcttgaaaaggttggcatgtatagctgcatttttttgtggactcctcatcttatcatccattcaagataaatcaaaacattaggttccaaaaattctaaaaaacctaaactcttcaggctacctttgtgtgtctctagaagagaaaagcatctatctggagatataaatgtgtatgtaaatataaacgtttgtggcaagaggacagttctgtgacatctgttgaacatatgtggttgtatatattggaaatgtacatatccaatatgaaatactaaaacaaacaaacaaacaaaaaaccagaatgcattgtataggattgcatgtgaagtcttttctactgaatctatatttccatttgtaagtgattttaagttaacatatgaaggcagggaaatgattacctttccagtaaaaagtatagataatttaattaacttagtgacaccaccaagtgttttgatataactaaatttgtggtaataagactgtctgcacctgtattcattgtggaacttcctctttcattggaaactttcttactcaagaatgacggcagtattgttttcttatatgtgcaatgaagtggaatgataaacagtatgcctttaatttatatgtgttcttgttctgatgttgtttcctgaaatgatttttcttcctaactgtggttttcgggtatgcaagcctaaatctttgtacactttgtctcacagaatagttctgaggctccatgacagggttttgtcattgttgatgttattgttgcttcgttttataaaaaagccaaaattttttttccaatccaaacgttcacctgtttcctttcctcaagctataccagtgtaataccagttaccctgtggatccatttaatatgttatccccactaattaattttcgtatattatttccaatatttggaaagctctttatagccatttggtatttcctattacccacctcctattttaaatatttatcagtctaaacttgtgcagtgtagtaaacatgcaagttgttacgattgagctgtattaccataagtagaattttaagtaaactggtgaatttgggcaataaatgtttttgctttttgtttgatttttttttacaagctaactgttagaggtatacatttatttatctgttgtacagatttgattatgattttaatgtttgaaagattgcacttgtttgcttttactatatgtggggtaaaatatattttctgttcacagtatatgaaaatatggagtaatttaaacagtaaataaacattctgtggatgcttatttttgtattggcaaagtatcaattaaactatatgtgttctttttcaaaaa

SEQ ID NO: 213591 - DNA, 2394 bp, Artificial Sequence
  derived and/or modified sequence
atggccgccctggcctacaacctgggcaagagagagatcaaccactacttcagcgtgagaagcgccaaggtgctggccctggtggccgtgctgctgctggccgcctgccacctggccagcagaagatacagaggcaacgacagctgcgagtacctgctgagcagcggcagattcctgggcgagaaggtgtggcagccccacagctgcatgatgcacaagtacaagatcagcgaggccaagaactgcctggtggacaagcacatcgccttcatcggcgacagcagaatcagacagctgttctacagcttcgtgaagatcatcaacccccagttcaaggaggagggcaacaagcacgagaacatccccttcgaggacaagaccgccagcgtgaaggtggacttcctgtggcaccccgaggtgaacggcagcatgaagcagtgcatcaaggtgtggaccgaggacagcatcgccaagccccacgtgatcgtggccggcgccgccacctggagcatcaagatccacaacggcagcagcgaggccctgagccagtacaagatgaacatcaccagcatcgcccccctgctggagaagctggccaagaccagcgacgtgtactgggtgctgcaggaccccgtgtacgaggacctgctgagcgagaacagaaagatgatcaccaacgagaagatcgacgcctacaacgaggccgccgtgagcatcctgaacagcagcaccagaaacagcaagagcaacgtgaagatgttcagcgtgagcaagctgatcgcccaggagaccatcatggagagcctggacggcctgcacctgcccgagagcagcagagagaccaccgccatgatcctgatgaacgtgtactgcaacaagatcctgaagcccgtggacggcagctgctgccagcccagaccccccgtgaccctgatccagaagctggccgcctgcttcttcaccctgagcatcatcggctacctgatcttctacatcatccacagaaacgcccacagaaagaacaagccctgcaccgacctggagagcggcgaggagaagaagaacatcatcaacacccccgtgagcagcctggagatcctgctgcagagcttctgcaagctgggcctgatcatggcctacttctacatgtgcgacagagccaacctgttcatgaaggagaacaagttctacacccacagcagcttcttcatccccatcatctacatcctggtgctgggcgtgttctacaacgagaacaccaaggagaccaaggtgctgaacagagagcagaccgacgagtggaagggctggatgcagctggtgatcctgatctaccacatcagcggcgccagcaccttcctgcccgtgtacatgcacatcagagtgctggtggccgcctacctgttccagaccggctacggccacttcagctacttctggatcaagggcgacttcggcatctacagagtgtgccaggtgctgttcagactgaacttcctggtggtggtgctgtgcatcgtgatggacagaccctaccagttctactacttcgtgcccctggtgaccgtgtggttcatggtgatctacgtgaccctggccctgtggccccagatcatccagaagaaggccaacggcaactgcttctggcacttcggcctgctgctgaagctgggcttcctgctgctgttcatctgcttcctggcctacagccagggcgccttcgagaagatcttcagcctgtggcccctgagcaagtgcttcgagctgaagggcaacgtgtacgagtggtggttcagatggagactggacagatacgtggtgttccacggcatgctgttcgccttcatctacctggccctgcagaagagacagatcctgagcgagggcaagggcgagcccctgttcagcaacaagatcagcaacttcctgctgttcatcagcgtggtgagcttcctgacctacagcatctgggccagcagctgcaagaacaaggccgagtgcaacgagctgcaccccagcgtgagcgtggtgcagatcctggccttcatcctgatcagaaacatccccggctacgccagaagcgtgtacagcagcttcttcgcctggttcggcaagatcagcctggagctgttcatctgccagtaccacatctggctggccgccgacaccagaggcatcctggtgctgatccccggcaaccccatgctgaacatcatcgtgagcaccttcatcttcgtgtgcgtggcccacgagatcagccagatcaccaacgacctggcccagatcatcatccccaaggacaacagcagcctgctgaagagactggcctgcatcgccgccttcttctgcggcctgctgatcctgagcagcatccaggacaagagcaagcactag

SEQ ID NO: 213592 - protein, 765 aa, Artificial Sequence
  derived and/or modified sequence
MEEKYGGDVLAGPGGGGGLGPVDVPSARLTKYIVLLCFTKFLKAVGLFESYDLLKAVHIVQFIFILKLGTAFFMVLFQKPFSSGKTITKHQWIKIFKHAVAGCIISLLWFFGLTLCGPLRTLLLFEHSDIVVISLLSVLFTSSGGGPAKTRGAAFFIIAVICLLLFDNDDLMAKMAEHPEGHHDSALTHMLYTAIAFLGVADHKGGVLLLVLALCCKVGFHTASRKLSVDVGGAKRLQALSHLVSVLLLCPWVIVLSVTTESKVESWFSLIMPFATVIFFVMILDFYVDSICSVKMEVSKCARYGSFPIFISALLFGNFWTHPITDQLRAMNKAAHQESTEHVLSGGVVVSAIFFILSANILSSPSKRGQKGTLIGYSPEGTPLYNFMGDAFQHSSQSIPRFIKESLKQILEESDSRQIFYFLCLNLLFTFVELFYGVLTNSLGLISDGFHMLFDCSALVMGLFAALMSRWKATRIFSYGYGRIEILSGFINGLFLIVIAFFVFMESVARLIDPPELDTHMLTPVSVGGLIVNLIGICAFSHAHSHAHGASQGSCHSSDHSHSHHMHGHSDHGHGHSHGSAGGGMNANMRGVFLHVLADTLGSIGVIVSTVLIEQFGWFIADPLCSLFIAILIFLSVVPLIKDACQVLLLRLPPEYEKELHIALEKIQKIEGLISYRDPHFWRHSASIVAGTIHIQVTSDVLEQRIVQQVTGILKDAGVNNLTIQVEKEAYFQHMSGLSTGFHDVLAMTKQMESMKYCKDGTYIM

SEQ ID NO: 213593 - protein, 360 aa, Artificial Sequence [sequence omitted]

SEQ ID NO: 213594 - DNA, 2298 bp, Artificial Sequence
  derived and/or modified sequence
atggaagagaaatacggcggggacgtgctggcaggacctggaggtggcgggggcttgggtcctgtggatgtgcctagtgccagactcactaagtacatagtgctgctgtgctttaccaaattcctcaaggcagtggggctcttcgaaagctacgatctcctaaaggcagtgcatatagtccagtttatatttattctgaagttaggtacagcttttttcatggtgctgtttcagaagcccttcagctctgggaaaactatcaccaagcatcagtggatcaaaattttcaagcatgccgtggccggctgcatcatatcgttactgtggttcttcggcttaactctgtgtggtccattgagaacactgttattattcgaacacagtgacattgtcgttatctcactgctgtccgtgctcttcactagctcgggagggggaccagccaagactcggggcgctgcatttttcatcatcgcggtaatatgcttactactcttcgataatgacgacttgatggccaaaatggccgaacaccctgaagggcaccacgacagcgctttgactcacatgctctataccgctattgcatttcttggagtggcagaccataagggcggcgtcttgctgctggtgctggccttatgctgcaaagttggatttcataccgcctccagaaagctgtctgtcgatgtggggggggcaaagagactgcaagctctttcccatttggtgagtgtcctcctcctctgtccctgggtgattgttttgtcagtgacaacggagagcaaggtcgagagctggttctccctcataatgcccttcgcaactgtaatattctttgtgatgatactcgacttctacgtagattccatatgctctgtaaagatggaggttagtaagtgcgcacggtacggatcctttcctatattcataagcgcgctcctgtttggcaacttttggacacaccccattactgaccagctccgggccatgaataaggccgcccatcaggaaagcactgagcatgtcttgagcggaggggttgtggtaagcgctatattctttattctcagtgccaacatcctcagttcaccttccaagcgcggacaaaaggggacactaattggctattccccggagggtacacccctgtacaactttatgggcgacgcttttcagcatagctctcagagcatcccaaggtttattaaagagagcctcaagcagatcttagaggagtcagacagtaggcagatcttctacttcctatgcctcaatctgctgttcacatttgtggaactattttacggcgtcctcacgaacagtttaggactcatctcagacggattccacatgcttttcgattgttctgcacttgtcatgggtctgtttgcggcacttatgtccagatggaaagccacccgtatcttttcttacggatacgggcgtatcgagatactcagtggcttcattaacggcctgttcttaatagtaatcgctttcttcgtgtttatggaatccgtcgctagattgatagatcccccagagctggacacccatatgctcacgcctgtctctgtaggaggcctgattgtcaatctgatcggcatttgcgctttttcccatgctcactcacacgcacacggagcctcgcagggctcgtgtcattcaagtgaccattcccacagccatcatatgcacggccattcggaccacggacacgggcattcccacgggtctgcgggcggaggtatgaatgctaacatgcgcggtgtattcctgcatgtgctagcagacaccctggggtcaattggagtaattgtttccactgtgctcattgagcaattcggatggttcatcgcggaccccctgtgctcactcttcatagccatcctcatattccttagtgtagtaccattaatcaaggatgcttgccaggtgcttctgcttaggctcccccctgaatatgagaaggaattgcacatcgcactggaaaaaatccagaagatagagggactaattagctatagggatccacatttttggcgccatagtgcttcaatagtagccggcactatccacattcaggtgactagcgatgtactcgagcagcggattgtgcagcaggtgactggaatccttaaggacgcgggggtcaataaccttacgattcaggtggaaaaggaggcttacttccaacatatgagtgggctgtctaccggattccacgacgtgctggctatgaccaagcagatggaaagcatgaagtattgcaaggacgggacctatattatgtag

SEQ ID NO: 213595 - DNA, 2298 bp, Artificial Sequence
  derived and/or modified sequence
atggaggagaagtatggaggagatgtgctggccggccctgggggcggcggcggcctgggccctgtggatgtgcccagcgcccggctgaccaagtacatcgtgctgctgtgcttcaccaagttcctgaaggctgtgggcctgtttgagagctatgacctgctgaaggctgtgcacatcgtgcagttcatcttcatcctgaagctgggcacagccttcttcatggtgctcttccagaagcccttcagcagcggcaagaccatcaccaagcaccagtggatcaagatcttcaagcatgctgtggccggctgcatcatcagcctgctgtggttcttcggcctgaccctgtgtggccccctgcggaccctgctgctgtttgagcacagcgacatcgtggtgatcagcctgctgtctgtgctcttcaccagcagcggcggcggccctgccaagaccagaggagctgccttcttcatcatcgctgtgatctgcctgctgctgtttgacaatgatgacctgatggccaagatggccgagcaccctgagggccaccatgattctgccctgacccacatgctgtacacagccatcgccttcctgggcgtggccgaccacaagggcggcgtgctgctgctggtgctggccctgtgctgcaaggtgggcttccacacagccagcaggaagctgtctgtggatgtgggcggggccaagaggctgcaggccctgagccacctggtgtctgtgctgctgctgtgcccctgggtgattgtgctgtctgtgaccacagagagcaaggtggagagctggttcagcctcatcatgccctttgccaccgtcatcttctttgtgatgatcctggacttctacgtggacagcatctgcagcgtgaagatggaggtgtccaaatgtgcccgctatggcagcttccccatcttcatcagcgccctgctgtttggaaacttctggacccaccccatcacagaccagctgcgggccatgaacaaggccgcccaccaggagagcacagagcacgtgctgtctggaggagtggtggtgtctgccatcttcttcatcctgagcgccaacatcctgagcagccccagcaagaggggccagaagggcaccctgattggctacagccctgagggcacccccctgtacaacttcatgggagatgccttccagcacagcagccagagcatcccccgcttcatcaaggagagcctgaagcagatcctggaggagagtgacagccggcagatcttctacttcctgtgcctgaacctgctcttcacctttgtggagctgttctacggcgtgctgaccaacagcctgggcctcatcagtgatggcttccacatgctgtttgactgcagcgccctggtgatgggcctgtttgctgccctgatgagccgctggaaggccacccgcatcttctcctatggctacggccgcatcgagatcctgagcggcttcatcaatggcctcttcctgattgtgattgccttctttgtgttcatggagagcgtggcccggctgattgaccccccagagctggacacccacatgctgacccctgtgtctgtgggcggcctgattgtgaacctgattggcatctgtgccttcagccacgcccacagccacgcccacggggccagccagggcagctgccacagcagtgaccacagccacagccaccacatgcacggccacagcgaccacggccacggccacagccacggcagcgctgggggcggcatgaatgccaacatgagaggagtcttcctgcacgtgctggccgacaccctgggcagcattggagtgattgtgtccacagtgctgattgagcagtttggctggttcatcgctgaccccctgtgcagcctcttcatcgccatcctgatcttcctgtctgtggtgcccctcatcaaggatgcctgccaggtgctgctgctgcggctgcccccagaatatgagaaggagctgcacatcgccctggagaagatccagaagattgagggcctcatctcctacagagacccccacttctggaggcacagcgccagcatcgtggccggcaccatccacatccaggtgaccagtgatgtgctggagcagagaattgtgcagcaggtgacaggcatcctgaaggatgctggggtgaacaacctgaccatccaggtggagaaggaggcctacttccagcacatgagcggcctgagcacaggcttccatgatgtgctggccatgaccaagcagatggagagcatgaagtactgcaaggatggcacctacatcatgtag

SEQ ID NO: 213596 - DNA, 2298 bp, Artificial Sequence
  derived and/or modified sequence
atggaggagaagtacggcggcgacgtgctggccggccccggcggcggagggggtctgggccccgtggacgtgccttctgcgcgcctgaccaagtacatcgtgttactgtgttttaccaagtttctgaaagcagtcggcttgttcgagtcctacgatctgctcaaagctgtgcacatcgtacagtttatattcatcctaaagctgggcaccgcatttttcatggttctgttccagaaacctttctcctccggcaagactataactaaacaccagtggattaaaatctttaagcacgctgtggcgggttgtataatctcacttctctggtttttcgggctcaccttgtgtggccctctgaggaccttgctgttattcgagcatagcgacatcgtggtgatcagcctgctgtcagtgctgttcaccagttccgggggcggacctgccaaaacccggggggccgctttcttcatcattgccgtgatttgtttgctcctgttcgataacgacgatctcatggccaagatggccgaacatcccgaaggacaccacgactctgccttgacccatatgctgtatactgccatagcttttcttggggtcgcagatcataaaggtggggtgctgctcttagtgctagccctgtgctgtaaagtaggcttccatacggcatcccgcaagcttagcgtagacgtcggcggggccaagaggctccaggccttgtctcacttggtaagcgttttgcttctgtgtccatgggtcattgtcctcagcgttacaacggagtctaaagtggaaagttggtttagcctaatcatgccctttgccacagtgatattctttgtgatgattctcgatttttacgttgattccatctgcagcgttaagatggaggtgtcgaaatgtgcacgatacggtagtttccctatttttatctccgctctgcttttcggcaacttttggactcatccaataactgaccagctgcgggcgatgaacaaagctgcacaccaggagtctactgagcacgtcctcagcggaggggtggtagtgtcggctatcttcttcattctgtcagccaacattctctctagtcccagcaaaagaggccagaagggtaccttgattggctactcgccagaaggcactcctttgtacaactttatgggcgatgccttccagcattcgagccagtccatacccaggttcatcaaggagtctcttaaacagatattagaggaatcagactctcggcagattttctatttcctgtgtctaaacctcctttttactttcgtagagctgttctatggcgtgctcaccaatagcctgggactgatcagtgatgggttccatatgctctttgattgctccgcgttggtgatgggactttttgcagccctcatgagccggtggaaggccactagaattttctcttatgggtacggcagaattgagattcttagcgggtttatcaacggactgtttctgatagtcattgccttcttcgtctttatggagtctgttgcgagactgattgaccctccagagttggacacccacatgctgacccccgtgtcagtcggcggtctaatcgtcaatctcatcggcatatgtgcattctcccatgcacactcccatgcccatggcgcctcacagggttcatgtcattctagcgaccatagccactcccatcacatgcacggccatagtgaccacggacacgggcattctcacgggtccgccggaggtggcatgaacgctaacatgaggggcgtgttcctgcatgtgctggccgacactctcgggagcatcggggtcattgtgagtactgtgttgatcgagcaatttgggtggttcatcgctgatccactatgcagcctgttcatagccatcctgatctttctgtctgtagtgccactgatcaaggacgcctgccaggttttgttgctgcgtctgccccccgaatacgaaaaagagctgcatattgctttagaaaagatccagaagatcgaaggattaatttcatacagggatccacatttttggagacactctgcctcaatagtggccggcaccatacacatccaagtgactagcgatgtactagagcagagaattgtgcagcaggtcacaggaatccttaaagatgccggggtgaacaatctcaccatccaagtggagaaagaagcctactttcagcacatgagtggactgtccaccgggtttcacgatgtcctggccatgaccaaacagatggaaagcatgaagtattgcaaagacggcacttacattatgtag

SEQ ID NO: 213597 - DNA, 2298 bp, Artificial Sequence
  derived and/or modified sequence
atggaggagaagtacgggggagacgtgctggctggtcccggaggtgggggtggcctcggaccagtggacgtccccagtgcacgcctgaccaagtacatcgtgcttctctgcttcacaaagttcttgaaggctgtcggcctgtttgaatcatatgatctcctcaaggctgtacacatcgtccagttcatcttcattctgaaattgggcactgccttctttatggtgctgttccaaaagccgtttagcagcggtaaaacaattaccaagcatcagtggataaagatctttaaacacgccgttgcaggctgtattatttctctactgtggttttttggcctgaccctgtgtggaccgcttagaaccctgttactgttcgaacactctgacatcgtggtcatctcgctgcttagtgtcctctttacatcctccggaggtggacccgcaaagaccagaggcgctgccttctttatcatcgctgtgatatgtctgttgttgttcgacaatgatgacctgatggccaagatggccgagcacccagagggacaccatgactccgcgcttacccatatgctgtatacagccatcgctttcctgggtgttgccgatcataaaggaggcgtgctactgctggtgcttgctttatgctgtaaagtgggcttccataccgcttcccggaaactcagcgtggacgtcggcggagccaaaaggctccaggctctgtctcatcttgtctcggtactcctgttatgtccttgggtaatagtgctgtccgtgaccacggagtccaaggtggaatcttggttttccctgattatgccctttgcaacagtcattttctttgtcatgattctggacttttatgtagacagtatttgttccgtcaagatggaggtcagcaaatgcgctaggtatggcagtttccctatattcatctccgcactgctgttcggcaatttctggacacatccgattacggatcagctgcgcgctatgaataaggccgcacatcaagagtcgaccgagcacgtgctctcaggaggggtggttgtcagtgcaattttctttatcctcagtgctaacatcctaagttcaccctctaaaaggggccagaaaggcactctgattggctactctccggagggaacacctttatacaattttatgggcgatgctttccaacattcatcacagtccatccctcgatttatcaaagaatcactgaaacagatcctagaggagtccgacagccgtcaaatcttctacttcctttgcctgaatctcctctttactttcgtggagctgttctacggggtgttaacaaattccctgggattaatcagtgatgggtttcatatgctcttcgattgttcggccctcgttatgggactgttcgcagccttgatgtcccggtggaaagcgactcggatattcagctacggctacggtaggatcgagatcctctctgggtttatcaatgggcttttccttattgtcatcgctttcttcgtatttatggagtcagtggcacgccttatcgaccctcccgaacttgacacacatatgttaactccggtctccgtgggaggcctgattgtcaatctcataggaatctgtgctttctcccatgctcactcgcacgcgcacggcgcaagtcaagggagctgtcattcttcggatcacagccattctcaccatatgcatggtcacagcgaccacggacatggtcatagtcacggctctgcaggcggaggaatgaatgcaaacatgagaggtgtcttcctgcacgtcctcgcagataccctgggctccattggggtgattgtctctacagtcctgattgaacagttcgggtggtttatcgccgacccgttgtgctctctgtttatagccatcctcatatttctctcagtggtgccgttgatcaaagacgcttgtcaagtcctccttctgcgcctcccacccgagtatgagaaagaacttcacattgcacttgaaaaaatccagaaaattgagggccttatatcctatcgtgatccccacttctggaggcactcagcatcgattgtggcaggcacaatacacatccaggtgacctctgacgtgttagaacaaaggatcgtgcagcaagttacaggcattctgaaagacgctggagtgaacaacctgaccatacaagtcgagaaggaagcctactttcagcacatgagcgggttgagcaccggctttcacgacgttcttgcaatgacgaagcagatggagtcaatgaaatattgtaaggatggcacctacatcatgtag

SEQ ID NO: 213598 - DNA, 4360 bp, Artificial Sequence
  derived and/or modified sequence
gcactccagcctgggcaacaggagcgaaactccatctcaaaacaaaaaaaaaaagaatccctaacgcagaggaaaagattggtgagctttgtttaatcacacacgctgtacattttccacgccctccccctctgccctacaggaatccgctgtacttctgacggcccataggtggcactgtagggacaggtaagtgcacagggagcgccacccggagaggctgataggaggcggagcttcaatgcgacacaacgtggcgggaggagcctaagggacgaggaaaggcgagtgttctgcttgcgcagacgcaaggctgggcactcccccgggagtgagggttgctgggcctgatgacgtggcttggcaacgtccctaccgccgctgcttcccgggaacctggcgccgccggaactgatcgcggcctagtcccgacgcgtgtgtgctagtgagccggagccggcgacggcggcagtggcggcccggcctgcaggagcccgacggggtctctgccatgggggagtgacgcgcctgcacccgctgttccgcggcagcggcgagacatgaggagaccccgcgacaggggcagcggcggcggctcgtgagccccgggatggaggagaaatacggcggggacgtgctggccggccccggcggcggcggcggccttgggccggtggacgtacccagcgctcgattaacaaaatatattgtgttactatgtttcactaaatttttgaaggctgtgggacttttcgaatcatatgatctcctaaaagctgttcacattgttcagttcatttttatattaaaacttgggactgcattttttatggttttgtttcaaaagccattttcttctgggaaaactattaccaaacaccagtggatcaaaatatttaaacatgcagttgctgggtgtattatttcactcttgtggttttttggcctcactctttgtggaccactaaggactttgctgctatttgagcacagtgatattgttgtcatttcactactcagtgttttgttcaccagttctggaggaggaccagcaaagacaaggggagctgcttttttcattattgctgtgatctgtttattgctttttgacaatgatgatctcatggctaaaatggctgaacaccctgaaggacatcatgacagtgctctaactcatatgctttacacagccattgccttcttaggtgtggcagatcacaagggtggagtattattgctagtactggctttgtgttgtaaagttggttttcatacagcttccagaaagctctctgtcgacgttggtggagctaaacgtcttcaagctttatctcatcttgtttctgtgcttctcttgtgcccatgggtcattgttctttctgtgacaactgagagtaaagtggagtcttggttttctctcattatgccttttgcaacggttatcttttttgtcatgatcctggatttctacgtggattccatttgttcagtcaaaatggaagtttccaaatgtgctcgttatggatcctttcccatttttattagtgctctcctttttggaaatttttggacacatccaataacagaccagcttcgggctatgaacaaagcagcacaccaggagagcactgaacacgtcctgtctggaggagtggtagtgagtgctatattcttcattttgtctgccaatatcttatcatctccctctaagagaggacaaaaaggtacccttattggatattctcctgaaggaacacctctttataacttcatgggtgatgcttttcagcatagctctcaatcgatccctaggtttattaaggaatcactaaaacaaattcttgaggagagtgactctaggcagatcttttacttcttgtgcttgaatctgctttttacctttgtggaattattctatggcgtgctgaccaatagtctgggcctgatctcggatggattccacatgctttttgactgctctgctttagtcatgggactttttgctgccctgatgagtaggtggaaagccactcggattttctcctatgggtacggccgaatagaaattctgtctggatttattaatggactttttctaatagtaatagcgttttttgtgtttatggagtcagtggctagattgattgatcctccagaattagacactcacatgttaacaccagtctcagttggagggctgatagtaaaccttattggtatctgtgcctttagccatgcccatagccatgcccatggagcttctcaaggaagctgtcactcatctgatcacagccattcacaccatatgcatggacacagtgaccatgggcatggtcacagccacggatctgcgggtggaggcatgaatgctaacatgaggggtgtatttctacatgttttggcagatacacttggcagcattggtgtgatcgtatccacagttcttatagagcagtttggatggttcatcgctgacccactctgttctctttttattgctatattaatatttctcagtgttgttccactgattaaagatgcctgccaggttctactcctgagattgccaccagaatatgaaaaagaactacatattgctttagaaaagatacagaaaattgaaggattaatatcataccgagaccctcatttttggcgtcattctgctagtattgtggcaggaacaattcatatacaggtgacatctgatgtgctagaacaaagaatagtacagcaggttacaggaatacttaaagatgctggagtaaacaatttaacaattcaagtggaaaaggaggcatactttcaacatatgtctggcctaagtactggatttcatgatgttctggctatgacaaaacaaatggaatccatgaaatactgcaaagatggtacttacatcatgtgagataactcaagaattacccctggagaataaacaatgaagattaaatgactcagtatttgtaatattgccagaaggataaaaattacacattaactgtacagaaacagagttccctactactggatcaaggaatctttcttgaaggaaatttaaatacagaatgaaacattaatggtaaaagtggagtaattatttaaattatgtgtataaaaggaatcaaattttgagtaaacatgatgtattacatcatcttcaaaaatagatatgatggattctagtgaagaccaaaattacttctgtttactttctatcaggaagcatctccattgtaaatatgtatttacatgtttattacaaagacccaaatgaaaaatttttagtccattttttgcatagcctaaagataaaataggaataaaagttctatatttatggattttctgtatataaaactggtttctaattataacttaagtccattaagtaaaatctgtattgccactttaaatgtaaactaaattatttgggagaaacttcaaccactgatatgagataagcaatgagaatagggaagtgtataacatcacagtttttgatgtattacaaaaatcaaccactctataaaataaattttttttacttttggtaatatttgcaaatgaataattaatttattagggtaaagaacttatactaagttgtgtccatgttattcatttacttaccatgttcctttaaagtagaatatttcctttcttgttatatatttgacattccaagctgcttatcaagctggtatccaagcagtggtaagctttcatcctttcttagctccataacgttgtgaaacagccagttaagagaatcgtaaataattgtcaactcacagttgaattctctgcctatgtaggtaacttttttctaatttctggaacatatagatatataagaaatatcaaagaataggtagttatttcaaagtttaataagtaaaacttgttcataaacatttgagcaccatgaaatcaaaataccctataactactttctatagtcatatctaatttatatttttttcatttccagttgtaactagatatgtagtaaagtctgaaaagactttaccatagacaataacatgcagttttatcagcaccaaagaatgttgtccaaaagaaactttttaatacctgtctttctatttataacatctgaatattttcattcttatattaagaattttgataagtagattgaatttagtatgagtactattttcttatatataccacaatggcaaacatgtattataaatcatatttttgtcttaccaattttaatatatgaggggttttagaaatttgttgtaagttatttttatattccttgtcttttgcatattttttggccaaaatcttcaatacatattaaaatttttgagtggtgggaaaa

SEQ ID NO: 213599 - DNA, 2298 bp, Artificial Sequence
  derived and/or modified sequence
atggaggagaagtacggcggcgacgtgctggccggccccggcggcggcggcggcctgggccccgtggacgtgcccagcgccagactgaccaagtacatcgtgctgctgtgcttcaccaagttcctgaaggccgtgggcctgttcgagagctacgacctgctgaaggccgtgcacatcgtgcagttcatcttcatcctgaagctgggcaccgccttcttcatggtgctgttccagaagcccttcagcagcggcaagaccatcaccaagcaccagtggatcaagatcttcaagcacgccgtggccggctgcatcatcagcctgctgtggttcttcggcctgaccctgtgcggccccctgagaaccctgctgctgttcgagcacagcgacatcgtggtgatcagcctgctgagcgtgctgttcaccagcagcggcggcggccccgccaagaccagaggcgccgccttcttcatcatcgccgtgatctgcctgctgctgttcgacaacgacgacctgatggccaagatggccgagcaccccgagggccaccacgacagcgccctgacccacatgctgtacaccgccatcgccttcctgggcgtggccgaccacaagggcggcgtgctgctgctggtgctggccctgtgctgcaaggtgggcttccacaccgccagcagaaagctgagcgtggacgtgggcggcgccaagagactgcaggccctgagccacctggtgagcgtgctgctgctgtgcccctgggtgatcgtgctgagcgtgaccaccgagagcaaggtggagagctggttcagcctgatcatgcccttcgccaccgtgatcttcttcgtgatgatcctggacttctacgtggacagcatctgcagcgtgaagatggaggtgagcaagtgcgccagatacggcagcttccccatcttcatcagcgccctgctgttcggcaacttctggacccaccccatcaccgaccagctgagagccatgaacaaggccgcccaccaggagagcaccgagcacgtgctgagcggcggcgtggtggtgagcgccatcttcttcatcctgagcgccaacatcctgagcagccccagcaagagaggccagaagggcaccctgatcggctacagccccgagggcacccccctgtacaacttcatgggcgacgccttccagcacagcagccagagcatccccagattcatcaaggagagcctgaagcagatcctggaggagagcgacagcagacagatcttctacttcctgtgcctgaacctgctgttcaccttcgtggagctgttctacggcgtgctgaccaacagcctgggcctgatcagcgacggcttccacatgctgttcgactgcagcgccctggtgatgggcctgttcgccgccctgatgagcagatggaaggccaccagaatcttcagctacggctacggcagaatcgagatcctgagcggcttcatcaacggcctgttcctgatcgtgatcgccttcttcgtgttcatggagagcgtggccagactgatcgacccccccgagctggacacccacatgctgacccccgtgagcgtgggcggcctgatcgtgaacctgatcggcatctgcgccttcagccacgcccacagccacgcccacggcgccagccagggcagctgccacagcagcgaccacagccacagccaccacatgcacggccacagcgaccacggccacggccacagccacggcagcgccggcggcggcatgaacgccaacatgagaggcgtgttcctgcacgtgctggccgacaccctgggcagcatcggcgtgatcgtgagcaccgtgctgatcgagcagttcggctggttcatcgccgaccccctgtgcagcctgttcatcgccatcctgatcttcctgagcgtggtgcccctgatcaaggacgcctgccaggtgctgctgctgagactgccccccgagtacgagaaggagctgcacatcgccctggagaagatccagaagatcgagggcctgatcagctacagagacccccacttctggagacacagcgccagcatcgtggccggcaccatccacatccaggtgaccagcgacgtgctggagcagagaatcgtgcagcaggtgaccggcatcctgaaggacgccggcgtgaacaacctgaccatccaggtggagaaggaggcctacttccagcacatgagcggcctgagcaccggcttccacgacgtgctggccatgaccaagcagatggagagcatgaagtactgcaaggacggcacctacatcatgtag

SEQ ID NO: 213600 - protein, 247 aa, Artificial Sequence
  derived and/or modified sequence
MEEQPQMQDADEPADSGGEGRAGGPPQVAGAQAACSEDRMTLLLRLRAQTKQQLLEYKSMVDASEEKTPEQIMQEKQIEAKIEDLENEIEEVKVAFEIKKLALDRMRLSTALKKNLEKISRQSSVLMDNMKHLLELNKLIMKSQQESWDLEEKLLDIRKKRLQLKQASESKLLEIQTEKNKQKIDLDSMENSERIKIIRQNLQMEIKITTVIQHVFQNLILGSKVNWAEDPALKEIVLQLEKNVDMM

SEQ ID NO: 213601 - protein, 228 aa, Artificial Sequence
  derived and/or modified sequence
MEEQPQMQDADEPADSGGEGRAGGPPQVAGAQAACSEDRMTLLLRLRAQTKQQLLEYKSMVDASEEKTPEQIMQEKQIEAKIEDLENEIEEVKVAFEIKKLALDSVLMDNMKHLLELNKLIMKSQQESWDLEEKLLDIRKKRLQLKQASESKLLEIQTEKNKQKIDLDSMENSERIKIIRQNLQMEIKITTVIQHVFQNLILGSKVNWAEDPALKEIVLQLEKNVDMM

SEQ ID NO: 213602 - DNA, 687 bp, Artificial Sequence
  derived and/or modified sequence
atggaggagcagccccagatgcaggacgccgacgagcccgccgacagcggcggcgagggcagagccggcggccccccccaggtggccggcgcccaggccgcctgcagcgaggacagaatgaccctgctgctgagactgagagcccagaccaagcagcagctgctggagtacaagagcatggtggacgccagcgaggagaagacccccgagcagatcatgcaggagaagcagatcgaggccaagatcgaggacctggagaacgagatcgaggaggtgaaggtggccttcgagatcaagaagctggccctggacagcgtgctgatggacaacatgaagcacctgctggagctgaacaagctgatcatgaagagccagcaggagagctgggacctggaggagaagctgctggacatcagaaagaagagactgcagctgaagcaggccagcgagagcaagctgctggagatccagaccgagaagaacaagcagaagatcgacctggacagcatggagaacagcgagagaatcaagatcatcagacagaacctgcagatggagatcaagatcaccaccgtgatccagcacgtgttccagaacctgatcctgggcagcaaggtgaactgggccgaggaccccgccctgaaggagatcgtgctgcagctggagaagaacgtggacatgatgtag

SEQ ID NO: 213603 - DNA, 744 bp, Artificial Sequence
  derived and/or modified sequence
atggaggagcagccccaaatgcaggacgctgacgagcccgctgatagtgggggcgaaggaagagcgggaggtcctcctcaggtggccggagcccaggcagcttgttctgaagacaggatgacattactgctgcgtcttcgcgctcagacgaagcagcagcttctggagtataaaagcatggtggatgcttcagaggaaaaaacacccgaacagatcatgcaagagaaacaaatcgaggccaagatcgaagacctggaaaatgaaatcgaggaagtaaaagtggcgttcgaaataaagaaactggccttagaccgaatgagactgagtacagctctgaaaaaaaatttagaaaaaatctccagacagagtagtgtgctgatggataatatgaaacacctgctggagctgaataagctgattatgaagagccagcaggagagttgggacctcgaggagaaattactcgacatcaggaaaaagcgcttgcagcttaagcaagcctcagagagtaagttgctggaaattcagaccgagaagaacaaacaaaaaattgatctcgatagcatggagaactctgaaagaataaaaatcattcggcagaacttgcaaatggagattaaaattaccacagtgattcaacacgtgtttcagaacttgattttaggatcaaaagtcaactgggccgaggatccagcccttaaagagatcgtgctgcagctagaaaagaacgtggatatgatgtag

SEQ ID NO: 213604 - DNA, 687 bp, Artificial Sequence
  derived and/or modified sequence
atggaggaacagccacagatgcaagatgcagacgaacccgctgattccggcggtgagggtagggccggagggccccctcaggtggccggagcccaggcagcctgttcagaagatagaatgacactcttactgaggctgcgagcccaaacaaagcagcaattgctggaatacaaatctatggtggatgccagcgaagaaaagaccccggagcaaatcatgcaggaaaaacaaatcgaggcaaagattgaggacctcgagaatgagattgaagaggtcaaagtggcatttgagatcaagaaacttgccctcgactcagtcctgatggacaacatgaaacatctgctagaactcaataagctgatcatgaaaagccagcaagaaagttgggaccttgaggagaaactccttgacatacgaaagaagaggctgcagctcaagcaggccagtgagtccaagcttttggagatccaaaccgagaagaataaacagaagatcgacctggatagtatggagaattccgagaggataaagattattaggcagaaccttcaaatggaaatcaagataacgacagtgattcagcacgttttccagaaccttatcttggggagcaaggtaaactgggccgaagatcccgcattaaaggagatagttctgcagctggaaaaaaatgtggatatgatgtag

SEQ ID NO: 213605 - DNA, 744 bp, Artificial Sequence
  derived and/or modified sequence
atggaggagcagccccagatgcaggatgctgatgagcctgctgacagcggcggggagggccgggccggcggccccccccaggtggccggggcccaggccgcctgcagcgaggacaggatgaccctgctgctgcggctgcgggcccagaccaagcagcagctgctggagtacaagtccatggtggatgccagcgaggagaagaccccagagcagatcatgcaggagaagcagatcgaggccaagattgaggacctggagaatgaaattgaggaggtgaaggtggcctttgagatcaagaagctggccctggacaggatgaggctgagcacagccctgaagaagaacctggagaagatcagccggcagagctctgtgctgatggacaacatgaagcacctgctggagctgaacaagctgatcatgaagagccagcaggagagctgggacctggaggagaagctgctggacatcaggaagaagaggctgcagctgaagcaggccagcgagagcaagctgctggagatccagacagagaagaacaagcagaagattgacctggacagcatggagaacagcgagcgcatcaagatcatccggcagaacctgcagatggagatcaagatcaccaccgtcatccagcacgtgttccagaacctgatcctgggcagcaaggtgaactgggccgaggaccctgccctgaaggagatcgtgctgcagctggagaagaatgtggacatgatgtag

SEQ ID NO: 213606 - DNA, 687 bp, Artificial Sequence
  derived and/or modified sequence
atggaggagcagccccagatgcaggatgctgatgagcctgctgacagcggcggggagggccgggccggcggccccccccaggtggccggggcccaggccgcctgcagcgaggacaggatgaccctgctgctgcggctgcgggcccagaccaagcagcagctgctggagtacaagtccatggtggatgccagcgaggagaagaccccagagcagatcatgcaggagaagcagatcgaggccaagattgaggacctggagaatgaaattgaggaggtgaaggtggcctttgagatcaagaagctggccctggacagcgtgctgatggacaacatgaagcacctgctggagctgaacaagctgatcatgaagagccagcaggagagctgggacctggaggagaagctgctggacatcaggaagaagaggctgcagctgaagcaggccagcgagagcaagctgctggagatccagacagagaagaacaagcagaagattgacctggacagcatggagaacagcgagcgcatcaagatcatccggcagaacctgcagatggagatcaagatcaccaccgtcatccagcacgtgttccagaacctgatcctgggcagcaaggtgaactgggccgaggaccctgccctgaaggagatcgtgctgcagctggagaagaatgtggacatgatgtag

SEQ ID NO: 213607 - DNA, 744 bp, Artificial Sequence
  derived and/or modified sequence
atggaggagcagccccagatgcaggacgccgacgagcccgccgactcgggaggcgagggccgcgcaggggggccgccacaggtggccggtgcccaggccgcgtgctctgaagatcggatgactttgctactccggctgcgcgctcagaccaaacagcagctcctcgagtacaagtccatggtggatgccagcgaggagaagacccccgaacagatcatgcaggagaagcaaatagaagcgaagatagaggatctcgagaacgaaattgaagaggtgaaggtggcctttgaaattaaaaagctggcccttgacaggatgaggcttagcaccgcccttaagaagaatctggaaaaaatatcacgccaatctagtgtacttatggacaatatgaaacatctgctggagttaaacaagctgatcatgaaatcccagcaggagagctgggacctggaggaaaagcttctcgatattaggaaaaagaggttgcagttgaagcaggcctcagaatctaaactcctcgagatccaaactgaaaagaataagcagaaaattgatctggatagtatggagaattcggagcgtataaaaatcattagacagaacctgcagatggaaattaagattacgactgtaatccagcatgtgttccaaaacttgatactgggctcaaaagtgaattgggcagaggacccagctcttaaagagatagtactgcagctcgagaaaaacgtggatatgatgtag

SEQ ID NO: 213608 - DNA, 687 bp, Artificial Sequence
  derived and/or modified sequence
atggaggagcagccccagatgcaggacgccgacgagcccgccgactccgggggggaaggcagagcaggaggcccaccccaggtggccggagctcaggcggcttgttcagaggatcgcatgacactcctgttgcggctgcgggcccagactaagcaacagttactcgagtacaagtcaatggtggatgccagtgaagaaaaaacgccagagcaaatcatgcaggagaagcagatcgaagcaaagattgaggacctggaaaacgagatcgaagaggtcaaagtagccttcgaaatcaaaaagttagcactagactccgtgctgatggacaatatgaaacacttgctggagctgaataagctgataatgaagagccagcaggagtcctgggacctggaagaaaagctgctcgatattcggaagaaacggctgcaacttaagcaggcctcagagtctaagctgcttgaaatccagacagaaaagaataagcagaaaatcgatctggacagcatggaaaatagcgaacggatcaaaattattcgacaaaacttgcagatggaaattaagatcacaaccgtgattcaacatgtgtttcaaaacctgattcttggaagtaaagtgaactgggcagaagatcctgctctcaaggagatagttctccagctggaaaagaatgttgacatgatgtag

SEQ ID NO: 213609 - DNA, 744 bp, Artificial Sequence
  derived and/or modified sequence
atggaggaacaaccccagatgcaggacgctgatgaacctgctgactcaggcggtgaaggtcgggcaggaggacctcctcaagtcgccggtgcccaggcagcatgctccgaggataggatgactctgctattgagactacgggcacagacgaagcaacagctccttgaatacaaatcaatggtagacgctagcgaagagaagacccctgagcagatcatgcaggagaagcaaatcgaagccaagattgaagatctggagaacgaaattgaggaagtgaaggtggccttcgagatcaaaaaacttgccctggatagaatgcggctctccacggcactgaagaaaaatctggagaaaattagcaggcagagcagcgtgctgatggacaatatgaagcatctgctagagttgaataaactcattatgaaatcccagcaagagagctgggaccttgaggaaaagcttctggacattcgaaagaaaagactgcagctgaaacaggcttcagagtccaagctgctcgaaatccagaccgagaagaataaacaaaaaatagacctggattccatggaaaattccgagagaatcaaaattataagacaaaaccttcagatggaaatcaaaatcacgacagtcatccagcacgtgtttcaaaatttgattctaggttcaaaggtcaactgggctgaagacccagctctgaaagagatcgtgctgcaactggagaaaaacgtggacatgatgtag

SEQ ID NO: 213610 - DNA, 687 bp, Artificial Sequence
  derived and/or modified sequence
atggaggagcagccccaaatgcaagatgcggatgagcccgcagacagcggtggcgaaggccgagccggtggcccacctcaggtcgctggggctcaggccgcttgttccgaggacagaatgacactcctcctcaggctgagagcccagaccaagcagcagctgttggaatataaatctatggtggatgccagcgaagaaaagacacctgagcagatcatgcaggagaagcaaattgaggcaaagatcgaggatctggagaatgagatcgaggaagtcaaggttgcattcgaaataaagaagcttgcccttgattctgttctcatggacaacatgaaacacttattggagctgaacaaacttatcatgaagagccaacaagaatcatgggacctggaggagaagcttctagatatacgaaaaaagaggttgcagctcaagcaggcgagcgagtccaagctgttggagattcaaaccgagaagaacaagcagaagattgatctggattccatggaaaatagtgagagaatcaagattattcgccagaatctccagatggagataaagatcactaccgtgatccagcacgtctttcagaacctgattctgggatcaaaggtgaactgggctgaagatcctgcccttaaagaaatcgtcctgcagctcgaaaaaaatgtggacatgatgtag

SEQ ID NO: 213611 - DNA, 1305 bp, Artificial Sequence
  derived and/or modified sequence
aaaagcgaccttttctgagcgcgtttgcctgttgagtggtagcctttcccctcaaccagcaatggaggagcagccccagatgcaagacgccgacgagcccgcggactccggaggggaaggccgggcaggcgggccaccgcaggtcgccggcgcccaggcggcgtgcagcgaggaccgcatgaccctgctcctcaggctgagagcacagacaaaacaacaactcttagaatataaatcaatggttgatgcaagtgaagaaaaaactccagaacaaattatgcaagaaaagcaaatcgaagctaaaattgaagacctggaaaatgaaattgaagaggtaaaagttgcttttgagataaaaaagcttgcattagacagtgtgctcatggataacatgaaacacctattagagctaaataaattaataatgaaatcacagcaggaatcttgggatttagaggaaaaactgcttgatattagaaagaagagattgcaattaaaacaagcttcagaaagtaagcttttagaaatacagactgaaaagaacaaacagaagattgatttggacagtatggaaaactcagagaggataaagatcatacgacaaaacctacagatggagataaaaattactactgttattcaacatgtgttccagaaccttattttggggagtaaagtcaattgggcagaggatcctgcccttaaggaaattgttctgcagcttgagaagaatgttgacatgatgtaataagaattcatttctgacatattttacatttctggcaatctcaactcttatttggaatacttctgtgcatttgtctgtccaccgtaattttagaaaagcatatccataacgtttacagttgtagtacagttgtggttagttatttgtagtgggattgaaagtaatttttttctttttatatttctatatttagtttgtttttttgttgttgttgttttttgagatggagtctcgctttgttgcccagactggagggcagtggcgcgatctcggctcactgcaacctctgcctcccgggttcaagcagttctgcctcagcctcccaagtagctgtgactaaaggtgcacgccgccatgcccagctaattttttgtattttagtagagacggggtttcaccgtgttgcccaggctgctctcagaactcctgagctcaggcagtccaccgcctcggcctaccgaagtgctaggattacagacgtaagccaccgagcctggtctagtttgcattttttttctatcagttttataagttaagaaataaaaggaattaatgtt

SEQ ID NO: 213612 - DNA, 1389 bp, Artificial Sequence
  derived and/or modified sequence
tttcccggcgtccatttagtggcgggaaaagcgaccttttctgagcgcgtttgcctgttgagtggtagcctttcccctcaaccagcaatggaggagcagccccagatgcaagacgccgacgagcccgcggactccggaggggaaggccgggcaggcgggccaccgcaggtcgccggcgcccaggcggcgtgcagcgaggaccgcatgaccctgctcctcaggctgagagcacagacaaaacaacaactcttagaatataaatcaatggttgatgcaagtgaagaaaaaactccagaacaaattatgcaagaaaagcaaatcgaagctaaaattgaagacctggaaaatgaaattgaagaggtaaaagttgcttttgagataaaaaagcttgcattagacaggatgagactttcaactgcacttaaaaaaaacctggagaaaattagcagacagtctagtgtgctcatggataacatgaaacacctattagagctaaataaattaataatgaaatcacagcaggaatcttgggatttagaggaaaaactgcttgatattagaaagaagagattgcaattaaaacaagcttcagaaagtaagcttttagaaatacagactgaaaagaacaaacagaagattgatttggacagtatggaaaactcagagaggataaagatcatacgacaaaacctacagatggagataaaaattactactgttattcaacatgtgttccagaaccttattttggggagtaaagtcaattgggcagaggatcctgcccttaaggaaattgttctgcagcttgagaagaatgttgacatgatgtaataagaattcatttctgacatattttacatttctggcaatctcaactcttatttggaatacttctgtgcatttgtctgtccaccgtaattttagaaaagcatatccataacgtttacagttgtagtacagttgtggttagttatttgtagtgggattgaaagtaatttttttctttttatatttctatatttagtttgtttttttgttgttgttgttttttgagatggagtctcgctttgttgcccagactggagggcagtggcgcgatctcggctcactgcaacctctgcctcccgggttcaagcagttctgcctcagcctcccaagtagctgtgactaaaggtgcacgccgccatgcccagctaattttttgtattttagtagagacggggtttcaccgtgttgcccaggctgctctcagaactcctgagctcaggcagtccaccgcctcggcctaccgaagtgctaggattacagacgtaagccaccgagcctggtctagtttgcattttttttctatcagttttataagttaagaaataaaaggaattaatgtta

SEQ ID NO: 213613 - DNA, 744 bp, Artificial Sequence
  derived and/or modified sequence
atggaggagcagccccagatgcaggacgccgacgagcccgccgacagcggcggcgagggcagagccggcggccccccccaggtggccggcgcccaggccgcctgcagcgaggacagaatgaccctgctgctgagactgagagcccagaccaagcagcagctgctggagtacaagagcatggtggacgccagcgaggagaagacccccgagcagatcatgcaggagaagcagatcgaggccaagatcgaggacctggagaacgagatcgaggaggtgaaggtggccttcgagatcaagaagctggccctggacagaatgagactgagcaccgccctgaagaagaacctggagaagatcagcagacagagcagcgtgctgatggacaacatgaagcacctgctggagctgaacaagctgatcatgaagagccagcaggagagctgggacctggaggagaagctgctggacatcagaaagaagagactgcagctgaagcaggccagcgagagcaagctgctggagatccagaccgagaagaacaagcagaagatcgacctggacagcatggagaacagcgagagaatcaagatcatcagacagaacctgcagatggagatcaagatcaccaccgtgatccagcacgtgttccagaacctgatcctgggcagcaaggtgaactgggccgaggaccccgccctgaaggagatcgtgctgcagctggagaagaacgtggacatgatgtag

SEQ ID NO: 213614 - protein, 371 aa, Artificial Sequence
  derived and/or modified sequence
MAGLQELRFPEEKPLLRGQDATELESSDAFLLAADTDWKEHDIETPYGLLHVVIRGSPKGNRPAILTYHDVGLNHKLCFNTFFNFEDMQEITKHFVVCHVDAPGQQVGASQFPQGYQFPSMEQLAAMLPSVVQHFGFKYVIGIGVGAGAYVLAKFALIFPDLVEGLVLVNIDPNGKGWIDWAATKLSGLTSTLPDTVLSHLFSQEELVNNTELVQSYRQQIGNVVNQANLQLFWNMYNSRRDLDINRPGTVPNAKTLRCPVMLVVGDNAPAEDGVVECNSKLDPTTTTFLKMADSGGLPQVTQPGKLTEAFKYFLQGMGYMPSASMTRLARSRTASLTSASSVDGSRPQACTHSESSEGLGQVNHTMEVSC

SEQ ID NO: 213615 - DNA, 1116 bp, Artificial Sequence
  derived and/or modified sequence
atggccggcctgcaggagctgagattccccgaggagaagcccctgctgagaggccaggacgccaccgagctggagagcagcgacgccttcctgctggccgccgacaccgactggaaggagcacgacatcgagaccccctacggcctgctgcacgtggtgatcagaggcagccccaagggcaacagacccgccatcctgacctaccacgacgtgggcctgaaccacaagctgtgcttcaacaccttcttcaacttcgaggacatgcaggagatcaccaagcacttcgtggtgtgccacgtggacgcccccggccagcaggtgggcgccagccagttcccccagggctaccagttccccagcatggagcagctggccgccatgctgcccagcgtggtgcagcacttcggcttcaagtacgtgatcggcatcggcgtgggcgccggcgcctacgtgctggccaagttcgccctgatcttccccgacctggtggagggcctggtgctggtgaacatcgaccccaacggcaagggctggatcgactgggccgccaccaagctgagcggcctgaccagcaccctgcccgacaccgtgctgagccacctgttcagccaggaggagctggtgaacaacaccgagctggtgcagagctacagacagcagatcggcaacgtggtgaaccaggccaacctgcagctgttctggaacatgtacaacagcagaagagacctggacatcaacagacccggcaccgtgcccaacgccaagaccctgagatgccccgtgatgctggtggtgggcgacaacgcccccgccgaggacggcgtggtggagtgcaacagcaagctggaccccaccaccaccaccttcctgaagatggccgacagcggcggcctgccccaggtgacccagcccggcaagctgaccgaggccttcaagtacttcctgcagggcatgggctacatgcccagcgccagcatgaccagactggccagaagcagaaccgccagcctgaccagcgccagcagcgtggacggcagcagaccccaggcctgcacccacagcgagagcagcgagggcctgggccaggtgaaccacaccatggaggtgagctgctag

SEQ ID NO: 213616 - DNA, 1116 bp, Artificial Sequence
  derived and/or modified sequence
atggccggtctgcaagaactgcgattccctgaggagaagccacttcttcgaggccaggacgcgaccgagctcgagtctagtgatgccttcctgttggcagcggatacagactggaaggaacacgatatagagacaccctacggcctactacatgtggtaatacgcgggtctccgaagggtaacagaccagccattctgacctatcacgatgtcggactgaatcacaaactatgcttcaacacgtttttcaatttcgaggacatgcaggagataactaaacatttcgtggtgtgccacgtggatgcacccggccagcaggtgggcgccagccagtttccgcagggataccagttcccatcaatggaacagcttgcagcaatgctgccctccgtggtgcagcatttcgggttcaaatacgttataggaataggtgtcggcgctggtgcatatgtgctggctaaattcgcattgatcttcccagacctagttgagggtctggtgctcgtcaatattgacccaaatgggaaagggtggattgattgggctgcaactaagctcagcgggctcaccagcaccttaccagacactgttctgtctcatcttttctctcaggaggaactggttaataacacagaactggtccaatcttatagacaacaaatcggcaatgtggtgaatcaggcaaacctacagctcttctggaatatgtataactcccgaagagacctggacattaataggcctggcacagtgcccaacgccaaaacacttcgctgccctgtgatgctggtagttggcgacaacgccccagcagaagatggggtggtcgaatgtaattctaagctcgacccaaccaccacaaccttcctcaaaatggctgactcaggcggtttaccccaggtgacacaacctgggaagctcaccgaggccttcaaatactttcttcaaggtatgggctacatgccctctgcctcaatgacaaggctagcacgatcgcgaaccgcctccctcacaagcgcctccagcgtggatggatccaggccgcaggcatgtactcacagcgagagctcagaaggcctcggacaggtgaaccacaccatggaggtgtcatgctag

SEQ ID NO: 213617 - DNA, 1116 bp, Artificial Sequence
  derived and/or modified sequence
atggcaggcctgcaggagctccgattccctgaagagaagccattgctccgcggacaggatgcaacagagctggaaagctccgacgcattcctgctcgcggctgacaccgattggaaagagcatgacattgagacgccatatgggctactgcatgtggtgatccggggcagccctaagggcaataggcccgctatcctgacatatcatgatgtgggtttaaatcataagctctgctttaataccttcttcaacttcgaagatatgcaagaaattacaaagcactttgtggtgtgccatgtggatgctcctggccaacaagtaggcgcctcccagttcccccaggggtatcagttcccaagcatggaacaactggctgcaatgttaccctccgtcgttcagcatttcggcttcaaatacgtaattggcatcggggtgggggcaggggcatatgtgcttgcaaaattcgccctgatttttcccgacctggttgaggggctagtcctggtcaatattgacccaaatggcaaggggtggatcgattgggccgccacaaaacttagcgggctgacgagcaccctgccggacacagtgttatcacacctgttttcccaggaagaactggtgaataataccgaactcgtacagtcatatcgtcaacagataggcaacgtggtgaatcaggctaacctccagctgttctggaacatgtacaattcccgccgtgatcttgacatcaacaggcctggcacggtgccgaatgccaagacccttaggtgccctgtcatgcttgtcgtcggcgacaacgcgccagctgaagatggcgttgtggaatgcaatagcaagttagaccccaccaccactacgttcttgaagatggctgacagcgggggtttaccccaggtgacccagcctggaaagctaacagaggcgtttaagtacttcttgcagggcatgggctacatgccatctgcaagcatgacacgtctcgcgcgcagccggactgcatctttgacctccgcctcttcagtggatggctccagaccacaggcatgcactcactcagagagcagcgagggcctggggcaggtgaaccatacaatggaggtatcttgctag

SEQ ID NO: 213618 - DNA, 1116 bp, Artificial Sequence
  derived and/or modified sequence
atggccggcctgcaggagctgcgcttccctgaggagaagcccctgctgcggggccaggatgccacagagctggagagcagtgatgccttcctgctggccgctgacacagactggaaggagcatgacatcgagaccccctacggcctgctgcacgtggtgatccggggcagccccaagggcaacagacctgccatcctgacctaccatgatgtgggcctgaaccacaagctgtgcttcaacaccttcttcaactttgaggacatgcaggagatcaccaagcactttgtggtgtgccacgtggatgcccctggccagcaggtgggcgccagccagttcccccagggctaccagttccccagcatggagcagctggccgccatgctgcccagcgtggtgcagcacttcggcttcaagtatgtgattggaattggagtgggcgctggggcctacgtgctggccaagtttgccctgatcttcccagacctggtggagggcctggtgctggtgaacatcgaccccaacgggaagggctggattgactgggccgccaccaagctgagcggcctgaccagcaccctgcctgacacagtgctgagccacctgttcagccaggaggagctggtgaacaacacagagctggtgcagagctaccggcagcagattggaaatgtggtgaaccaggccaacctgcagctgttctggaacatgtacaacagccggcgggacctggacatcaaccggcccggcaccgtgcccaatgccaagaccctgcgctgccctgtgatgctggtggtgggggacaatgccccagcagaagatggagtggtggagtgcaacagcaagctggaccccaccaccaccaccttcctgaagatggctgacagcggcggcctgccccaggtgacccagcccgggaagctgacagaggccttcaagtacttcctgcagggcatgggctacatgcccagcgcctccatgacccggctggcccggagcaggacagccagcctgaccagcgccagctctgtggatggcagccggccccaggcctgcacccacagcgagagcagcgagggcctgggccaggtgaaccacaccatggaggtgtcctgctag

SEQ ID NO: 213619 - DNA, 1116 bp, Artificial Sequence
  derived and/or modified sequence
atggccggcctgcaggagctgcggttccccgaggagaagcccctgctgaggggccaggatgctacagagctcgagagcagcgatgcgtttttgctcgctgcggataccgactggaaagagcatgacattgaaactccatatggcctgctgcacgttgttatccgaggctctccgaagggcaaccgccccgccatactaacataccatgacgtaggcctcaatcataagctctgttttaataccttcttcaatttcgaagacatgcaggaaatcactaagcactttgtggtttgccacgtagacgcacccggtcagcaggtcggtgcatcgcagttcccacaaggatatcaatttccctcaatggaacagttggccgccatgttgccttctgtggtacagcatttcggattcaagtatgtcataggaatcggagtgggcgctggggcctacgttctggcaaaatttgcccttatcttccctgacttggttgaaggtctcgtcttggttaacattgatccaaacggcaagggttggatcgattgggcggcgacgaaactgtcgggcttgacatccaccttgccagacaccgttttatcacacctcttcagtcaggaggaactggtcaacaacacagaattggtgcagtcctatcgccagcaaattggcaacgtggtgaaccaggccaacctccagctgttctggaacatgtacaactcccggcgggatcttgatatcaataggccaggtacggtgcctaacgcaaagaccctacgctgccctgtaatgctggtggtgggcgataacgcaccggctgaggatggggttgtggaatgtaatagtaaactggatcccactacaaccaccttcctgaagatggccgacagtggaggactgcctcaggtcacgcagcccggcaaactgacagaagcattcaaatatttcctgcagggtatgggctacatgccatcagccagcatgacgagactcgcacggtcgcggacggcttccttaacatcggcctcgtccgtagacggctcacggccccaggcttgcacccacagcgaaagctctgaaggacttggccaggtgaaccacaccatggaagtttcctgttag

SEQ ID NO: 213620 - DNA, 1116 bp, Artificial Sequence
  derived and/or modified sequence
atggccggcctgcaggagctgcggttccccgaggagaagcccctgcttagagggcaagacgctacagagctggagtcgtccgatgcctttctcctcgccgctgatacagactggaaggagcacgatattgaaactccatatggactccttcacgtggttataaggggtagtcctaaaggaaatagacccgcaattctgacctaccatgacgttgggctgaaccataaactatgctttaacacttttttcaactttgaggatatgcaggagatcaccaaacactttgtcgtttgccatgttgatgcccctgggcagcaggttggcgccagtcagtttccgcagggctaccaatttccgtcaatggagcagctggctgcaatgttaccaagcgtcgttcaacactttggattcaagtatgtgattggcatcggtgtaggggccggggcgtacgttttagctaaattcgcactcattttccctgaccttgtagagggcctcgtgctcgttaacattgaccctaatgggaagggctggatcgactgggcggccacgaaactcagcgggttgacctctaccctgcccgacaccgtgctcagccacctctttagtcaggaggagctagttaacaacactgaactagttcagtcataccggcaacagatcgggaacgttgtgaaccaagccaaccttcagctgttttggaatatgtacaatagcagacgggacctggacattaaccgtcctgggactgttcccaacgctaaaacgctgcggtgtcccgttatgttagtcgttggtgacaatgccccagctgaggacggggttgttgagtgcaactccaagctcgatccaacaaccaccacatttctcaagatggcagactcgggtgggttgccgcaggtgacccagccaggcaagctaactgaggctttcaagtatttcctccagggcatgggatacatgccttctgccagtatgaccaggctggccagaagtagaactgccagtttgacaagcgccagttccgtggacggatccagaccgcaggcttgtacccattcagagagctctgagggactgggacaggtgaaccacaccatggaagtctcctgttag

SEQ ID NO: 213621 - DNA, 1116 bp, Artificial Sequence
  derived and/or modified sequence
atggcaggactccaggagctccggttccctgaggaaaagcccctgctgaggggtcaagacgcaactgagctggaaagcagcgatgcattcctgctggctgccgacaccgattggaaggaacatgacattgagactccttatggcttgctgcacgtggtaatccggggaagccctaaaggaaatagaccagctatcctaacataccacgacgtggggctgaaccataagctctgctttaacaccttcttcaacttcgaggacatgcaggagattactaagcattttgtagtgtgccacgttgacgcccctggtcagcaggtcggcgcaagtcagtttccacagggctaccaattcccaagtatggaacaactagccgctatgctgccctccgtagtgcagcacttcggatttaaatatgtcatcggcatcggagtaggcgcaggtgcctacgtccttgccaagtttgccctcatatttcccgatcttgtagagggactcgtcctggttaatatcgatcccaacggaaaagggtggatagattgggcagctaccaaattgagcggccttaccagcacgctgcctgacacggtcctctcgcacctgttttcccaggaggagctggttaataatacagagctggtgcagtcctatcgccaacagatcggcaatgttgtcaaccaagccaacctacagctcttctggaacatgtataattctcgcagagatctcgatatcaacaggcccggaaccgtgccgaatgctaagacacttagatgtcccgtgatgctcgtggttggagacaatgccccagccgaggacggcgtggtggaatgcaattccaagctggatccaacgacgaccacattcctgaagatggccgatagcggcggtttacctcaggttactcaacctgggaaactgaccgaagcgtttaaatattttctgcagggtatgggctatatgccttcagccagtatgactcggcttgccaggtccagaaccgcctcattgacttcggcttcgagcgtggacggctccagaccacaagcatgtacacacagtgaatcctccgaggggcttggccaggtcaaccataccatggaggtatcatgctag

SEQ ID NO: 213622 - DNA, 1116 bp, Artificial Sequence
  derived and/or modified sequence
atggccggattgcaggaactccggttcccagaggaaaaacctctgcttcgcggtcaggatgcaactgaactggagtccagtgatgctttcctcctggcagccgacacagactggaaagagcatgatattgaaacgccctacgggctccttcacgtcgttatcagaggttcacccaaggggaaccgcccagcaattctgacatatcacgatgtggggttaaaccacaagttgtgcttcaatacattcttcaattttgaggacatgcaagagataaccaagcacttcgtggtctgtcatgttgacgcaccaggacagcaggtgggagccagccagttcccacagggctatcaattcccttctatggagcagctcgcggctatgctgcccagcgtagtgcagcactttgggtttaaatacgtgattggtattggagttggcgctggtgcctacgtgctggccaaattcgccctgatttttcccgacctagtggaaggcctcgtgctggtaaatattgaccccaatggcaaggggtggatcgattgggccgcaactaagctgagcggcctaacgagcactctgccagatacagttttgagccacctgttctcacaggaagagctcgtcaacaacaccgagttggtgcagtcttacaggcagcagattggaaatgtggtaaaccaagctaatttgcaacttttttggaatatgtataattctcgacgtgacttggacatcaaccgcccaggcaccgtgcccaatgcgaagacgcttcgctgccctgtgatgcttgtggttggggacaatgcccctgctgaggacggggttgttgaatgtaactccaagctcgatccaacaaccacaacattcttgaagatggcagacagcggtggccttccccaggtgacacagccagggaaattaacagaggcattcaagtactttttgcaaggcatgggttatatgcccagtgctagcatgacccgactggcaagaagtcgcaccgcctctctaacatctgcctccagcgtagatgggtctaggccccaagcctgtacgcacagtgagagttcggagggcctcggacaggtaaatcacactatggaggttagctgttag

SEQ ID NO: 213623 - protein, 738 aa, Artificial Sequence
  derived and/or modified sequence
MDLRRRDYHMERPLLNQEHLEELGRWGSAPRTHQWRTWLQCSRARAYALLLQHLPVLVWLPRYPVRDWLLGDLLSGLSVAIMQLPQGLAYALLAGLPPVFGLYSSFYPVFIYFLFGTSRHISVGTFAVMSVMVGSVTESLAPQALNDSMINETARDAARVQVASTLSVLVGLFQVGLGLIHFGFVVTYLSEPLVRGYTTAAAVQVFVSQLKYVFGLHLSSHSGPLSLIYTVLEVCWKLPQSKVGTVVTAAVAGVVLVVVKLLNDKLQQQLPMPIPGELLTLIGATGISYGMGLKHRFEVDVVGNIPAGLVPPVAPNTQLFSKLVGSAFTIAVVGFAIAISLGKIFALRHGYRVDSNQELVALGLSNLIGGIFQCFPVSCSMSRSLVQESTGGNSQVAGAISSLFILLIIVKLGELFHDLPKAVLAAIIIVNLKGMLRQLSDMRSLWKANRADLLIWLVTFTATILLNLDLGLVVAVIFSLLLVVVRTQMPHYSVLGQVPDTDIYRDVAEYSEAKEVRGVKVFRSSATVYFANAEFYSDALKQRCGVDVDFLISQKKKLLKKQEQLKLKQLQKEEKLRKQAASPKGASVSINVNTSLEDMRSNNVEDCKMMQVSSGDKMEDATANGQEDSKAPDGSTLKALGLPQPDFHSLILDLGALSFVDTVCLKSLKNIFHDFREIEVEVYMAACHSPVVSQLEAGHFFDASITKKHLFASVHDAVTFALQHPRPVPDSPVSVTRL

SEQ ID NO: 213624 - protein, 759 aa, Artificial Sequence
  derived and/or modified sequence
MGLADASGPRDTQALLSATQAMDLRRRDYHMERPLLNQEHLEELGRWGSAPRTHQWRTWLQCSRARAYALLLQHLPVLVWLPRYPVRDWLLGDLLSGLSVAIMQLPQGLAYALLAGLPPVFGLYSSFYPVFIYFLFGTSRHISVGTFAVMSVMVGSVTESLAPQALNDSMINETARDAARVQVASTLSVLVGLFQVGLGLIHFGFVVTYLSEPLVRGYTTAAAVQVFVSQLKYVFGLHLSSHSGPLSLIYTVLEVCWKLPQSKVGTVVTAAVAGVVLVVVKLLNDKLQQQLPMPIPGELLTLIGATGISYGMGLKHRFEVDVVGNIPAGLVPPVAPNTQLFSKLVGSAFTIAVVGFAIAISLGKIFALRHGYRVDSNQELVALGLSNLIGGIFQCFPVSCSMSRSLVQESTGGNSQVAGAISSLFILLIIVKLGELFHDLPKAVLAAIIIVNLKGMLRQLSDMRSLWKANRADLLIWLVTFTATILLNLDLGLVVAVIFSLLLVVVRTQMPHYSVLGQVPDTDIYRDVAEYSEAKEVRGVKVFRSSATVYFANAEFYSDALKQRCGVDVDFLISQKKKLLKKQEQLKLKQLQKEEKLRKQAASPKGASVSINVNTSLEDMRSNNVEDCKMMQVSSGDKMEDATANGQEDSKAPDGSTLKALGLPQPDFHSLILDLGALSFVDTVCLKSLKNIFHDFREIEVEVYMAACHSPVVSQLEAGHFFDASITKKHLFASVHDAVTFALQHPRPVPDSPVSVTRL

SEQ ID NO: 213625 - DNA, 2280 bp, Artificial Sequence
  derived and/or modified sequence
atgggcctggctgatgcttcaggcccacgagatacgcaagctctcctcagtgcaacccaggctatggacctgcgacgaagagactatcatatggagagaccactgctgaatcaagagcatctggaggagcttggccggtggggttcggcccctcgaacacatcagtggcggacttggctgcagtgtagccgggcccgcgcttacgctctcctgttgcagcacctccctgtgcttgtttggctgcctcggtatcccgtcagggactggctgcttggagacctactgagtggcctgtccgtggctataatgcagttgcctcagggcctggcgtacgcactgctggccgggcttcctccagtctttggtttgtattcatcattctacccggtttttatctacttcctgtttggaacttccaggcatattagcgttggtactttcgccgtgatgtctgtgatggtggggtcggtcacggaaagccttgcaccccaggccctgaacgactctatgatcaatgaaacagcgcgcgacgccgctagggtacaggtggccagtactttgtcagtcttagtgggcctgtttcaggtcggactgggcctgattcatttcggattcgtcgttacctacctttcggagccccttgtgcgcggctacaccacggccgccgccgtgcaagtcttcgttagccaactgaaatacgtatttggactgcacctgtcgagccattcaggccccctcagtttgatttatacagtcttggaggtctgttggaagctgccgcagtctaaagtcgggaccgtggtaaccgccgctgtagctggcgtcgtgctggttgttgtcaaactgctgaacgataagttgcaacaacagttgcccatgcccatcccgggggaactattaactctcattggagcgacgggcatatcctatgggatgggtttgaaacacagattcgaggtggacgtcgttggtaacatccccgccggcctagtaccaccagtcgctcccaacacacagcttttctcgaagctcgttggcagcgcgtttaccattgcagtggtcggcttcgctatcgccatttccttaggcaaaatcttcgcactccgacacggatacagggtggattcaaaccaggaactcgttgcgctcggcctttctaacctgatcggcggaatcttccagtgtttcccagtgtcctgcagcatgagtaggagtctcgttcaggaatctacaggaggcaactcccaggtggccggcgctataagctctttgttcatactcttgataatcgtgaagctgggcgagttatttcatgacctgcctaaggctgtactggcagctatcatcatcgtgaatcttaaaggtatgttgcggcagctgtctgatatgcggtcgttatggaaggcaaaccgagcggatttgctgatctggctggtgacattcaccgcaaccattctcctcaatcttgatctggggctggtggtggctgtgatattttcactactccttgtggtcgttcgcacccaaatgccacattattcagttctcggtcaggtcccagacacggatatttaccgtgacgtggcagagtatagcgaggcaaaagaagtccgcggcgttaaggtttttcgctcaagcgccacagtttacttcgctaatgcggaattctattccgacgccctgaagcaacgctgcggagtggacgtggatttcttaattagccagaaaaagaagttgctgaagaaacaggaacaactgaaactgaagcagctgcagaaggaggaaaagcttagaaagcaggctgcctcaccaaagggagcttcagtgtcgatcaatgtgaacacgagtcttgaagatatgaggagcaacaacgttgaggattgcaaaatgatgcaagtgtcttccggggataaaatggaggatgctacggcgaatgggcaggaggattctaaggctcccgatggttcaacattgaaggctttgggacttccccagcctgactttcactctttaatcctggatctgggtgcactcagcttcgtagataccgtttgtctcaaatctttgaaaaatatctttcacgatttcagagaaatcgaagtcgaagtgtacatggctgcttgtcactccccagtggtgtctcagttggaggccggccacttcttcgatgcatctatcactaagaagcatttgtttgctagcgtgcatgacgccgttacctttgcattgcaacacccccgtcccgtgcccgactcccccgtgagtgtgactcgcctgtag

SEQ ID NO: 213626 - DNA, 2280 bp, Artificial Sequence
  derived and/or modified sequence
atgggcctggctgatgccagcggcccccgggacacccaggccctgctgagcgccacccaggccatggacctgcggcggcgggactaccacatggagcggcccctgctgaaccaggagcacctggaggagctgggccgctggggcagcgcccccaggacccaccagtggaggacctggctgcagtgcagccgggcccgggcctatgccctgctgctgcagcacctgcctgtgctggtgtggctgccccgctaccctgtgcgggactggctgctgggggacctgctgagcggcctgtctgtggccatcatgcagctgccccagggcctggcctatgccctgctggccggcctgccccctgtgtttggcctgtacagcagcttctaccctgtgttcatctacttcctgtttggcaccagccgccacatctctgtgggcacctttgctgtgatgtctgtgatggtgggctctgtgacagagagcctggccccccaggccctgaatgacagcatgatcaatgaaacagccagagatgctgcccgggtgcaggtggccagcaccctgtctgtgctggtgggcctcttccaggtgggcctgggcctcatccactttggatttgtggtgacctacctgtctgagcccctggtgcggggctacaccacagctgctgctgtgcaggtgtttgtgtcccagctgaagtatgtgtttggcctgcacctgagcagccacagcggccccctgagcctcatctacacagtgctggaggtgtgctggaagctgccccagagcaaggtgggcaccgtggtgacagctgctgtggccggcgtggtgctggtggtggtgaagctgctgaatgacaagctgcagcagcagctgcccatgcccatccctggagagctgctgaccctgattggagccaccggcatctcctatggcatgggcctgaagcacagatttgaggtggatgtggtgggcaacatcccagctggcctggtgccccctgtggcccccaacacccagctgttcagcaagctggtgggcagcgccttcaccatcgctgtggtgggctttgccatcgccatcagcctgggcaagatctttgccctgcggcacggctacagagtggacagcaaccaggagctggtggccctgggcctgagcaacctgattggaggcatcttccagtgcttccctgtgtcctgcagcatgagccgcagcctggtgcaggagagcactggaggcaacagccaggtggccggggccatcagcagcctcttcatcctgctgatcatcgtgaagctgggggagctgttccatgacctgcccaaggctgtgctggccgccatcatcatcgtgaacctgaagggcatgctgcggcagctgagtgacatgaggagcctgtggaaggccaacagagctgacctgctgatctggctggtgaccttcaccgccaccatcctgctgaacctggacctgggcctggtggtggccgtcatcttcagcctgctgctggtggtggtgaggacccagatgccccactacagcgtgctgggccaggtgcctgacacagacatctacagagatgtggccgagtacagcgaggccaaggaggtgcggggcgtgaaggtgttccgcagcagcgccaccgtgtactttgccaatgctgagttctacagtgatgccctgaagcagagatgtggggtggatgtggacttcctgatcagccagaagaagaagctgctgaagaagcaggagcagctgaagctgaagcagctgcagaaggaggagaagctgaggaagcaggccgccagccccaagggggcctctgtgtccatcaacgtgaacaccagcctggaggacatgaggagcaacaacgtggaggactgcaagatgatgcaggtgtcctctggggacaagatggaggatgccacagccaacggccaggaggacagcaaggccccagatggcagcaccctgaaggccctgggcctgccccagcctgacttccacagcctcatcctggacctgggcgccctgagctttgtggacacagtgtgcctgaagagcctgaagaacatcttccatgacttccgggagattgaggtggaggtgtacatggccgcctgccacagccctgtggtgtcccagctggaggccggccacttctttgatgccagcatcaccaagaagcacctgtttgcctctgtgcatgatgctgtgacctttgccctgcagcaccccaggcctgtgcctgacagccctgtgtctgtgacccggctgtag

SEQ ID NO: 213627 - DNA, 2280 bp, Artificial Sequence
  derived and/or modified sequence
atgggcctggccgacgccagcggcccccgggacacccaggccctgttgagcgcaacccaagcgatggatcttcgccgtcgcgactaccatatggaaaggccgctccttaaccaggagcatcttgaggaactcggccggtggggcagcgcccccagaacacatcaatggaggacatggctccagtgcagcagggctagagcctacgctctactgctccagcacctgccagtgctggtgtggctcccacggtatccggtccgcgattggcttctcggcgacctgttgtccggactgagcgtggcaataatgcaactgccacagggactcgcctatgcgctcttggccggactgccaccagtgtttggcctgtacagcagcttctatcccgtgttcatctactttctcttcgggacctcacgacatatctctgtgggcacctttgctgtcatgtccgtgatggtaggatctgtaaccgaaagccttgcaccgcaggctctcaatgacagcatgatcaacgagacagcccgggatgccgccagagttcaggtcgcttccacactgtctgtgctggtcgggctgttccaggtgggcttgggcttgatacacttcggctttgtggtgacttacctctccgaacctctggtaagaggctataccactgcagccgcggtccaggtgtttgtcagtcaattgaaatatgtatttggcctgcatcttagctctcactctgggcctttgagcctgatttacacagtgcttgaagtgtgctggaagctgccccagagtaaagtcggaactgtcgtcacggctgcagtcgcaggggtggtgcttgtcgtcgttaagctacttaacgacaagctgcaacagcaactcccaatgcccattcctggagagctgctcacattaataggagctactggaatcagctatgggatgggactgaagcatagatttgaagtggacgtggtcggaaacatccctgccggcctggtgcctcctgtagcccctaacacacaactgttcagcaagctggtggggtccgcctttactattgccgtcgtgggcttcgctatcgctatttccttaggcaagatctttgctctgcgccatggttaccgggttgatagtaatcaagaactggtcgcgctgggccttagtaatctgatcggaggaattttccagtgtttcccggtgtcttgcagcatgtcaaggagcctggtgcaggagtcaacgggcgggaatagccaggttgctggcgccattagcagcctgtttattctgctgatcattgttaaactgggagaattatttcatgatcttccaaaagcagtgctcgcagccattattattgtgaatctgaaggggatgctgcgacagttgagcgacatgaggtctctgtggaaagccaatagggcagacttgttgatctggttggtaaccttcaccgccaccattcttctcaatctagatcttggtctggtagtggctgtgattttcagcctgctccttgtggtagtgcgcactcagatgcctcactacagcgtacttggacaggtaccagacaccgatatttacagggacgtggcagagtactctgaggcaaaggaggtcaggggtgtgaaagtgtttaggtcaagcgcaaccgtgtactttgcgaatgccgaattttattctgacgctctgaagcaacggtgcggagtcgacgtggactttctgattagccagaagaagaaacttcttaaaaagcaggagcagctgaagctgaaacagctgcaaaaggaggagaagcttcgaaagcaggctgcatcacccaagggcgccagtgtctcaatcaatgttaacacatccctggaggacatgaggtcaaataacgtggaggattgtaagatgatgcaggttagttccggggataaaatggaagatgctactgcaaacggccaggaggattccaaggcccctgacggtagtacgctaaaggccctggggcttccccagcccgattttcactctctcattcttgatctcggagccttatcatttgtcgatacagtctgtctcaagagcctgaagaacattttccatgacttccgggagatcgaagtcgaggtatatatggcagcctgtcactcccctgtggtttcccagctggaggccggtcattttttcgacgcttccatcaccaaaaagcatctgtttgcaagcgtgcatgacgccgttaccttcgctctgcagcacccgaggccagtgcctgacagccccgtgtcagttactcggctgtag

SEQ ID NO: 213628 - DNA, 2280 bp, Artificial Sequence
  derived and/or modified sequence
atgggtctggccgacgcctcgggcccacgcgacactcaggctctgctgtctgctacacaggctatggatctccgacggcgagattaccacatggaacggcctctacttaaccaagagcacctggaggagttgggcaggtggggatccgccccacgtacgcatcagtggcgtacatggcttcaatgcagcagggccagggcctacgccctcctgcttcagcatctccctgtcttggtgtggcttccaaggtaccctgttcgagactggctgttgggggaccttttatctggtctgtccgttgccattatgcagctacctcagggcttggcctacgcactgctggctgggctgcctcctgtcttcggattatactcatccttctatcctgtgtttatctatttcttgtttggcacaagtcggcatatatctgtgggtacatttgctgtgatgagcgtcatggtgggaagcgtgacagagtctctggctccacaggccctgaatgattcaatgattaatgaaactgccagagatgccgcacgggttcaggtcgccagtacactctcagttctcgtgggcctgttccaggtgggattaggcctcatacatttcggctttgtagtcacctacctgtctgagccactcgtcagagggtatactactgccgctgctgtccaagtcttcgtgtctcagctgaagtacgtgttcggcctgcatctgtcatcacatagtggaccactgtcactaatttataccgtgctggaagtctgttggaaacttccccagtccaaggtcggtaccgtggtcacagccgcagtggctggggtcgtgttagtggttgttaaactccttaacgacaaactgcaacagcagctgccaatgcctatacctggcgagctactgacactgattggtgcgaccggaatctcgtatggaatggggctcaagcatcgctttgaagtggacgtagtggggaatatacctgcgggactggtcccgccagtagccccaaatacgcagctgttttcaaagctggtggggtcagcttttacaattgccgtcgtcgggttcgccattgccattagtctaggaaaaatcttcgctctcaggcacggttacagagttgacagcaaccaggaactcgttgccctcgggctgagcaacctcatcggcggaattttccagtgcttcccagtctcttgtagtatgtccaggtccctggttcaggagtccaccggtggtaactcccaggttgccggagccatctcaagtctgttcatcctgctgatcattgtcaagttgggagaactgttccatgatctgcctaaggcagtcctggctgccatcatcattgtgaacttgaaaggaatgctccggcagctctcagacatgagatccctgtggaaagccaatagggctgacctgctcatttggctcgtgaccttcactgcgacaatcctcctgaacctggacttgggcctagtggtcgccgtgatcttttcacttttgctggtggttgtcaggacacagatgccccactacagtgtacttggacaggtaccggacacggacatttaccgcgacgtcgctgagtactctgaggctaaagaagttcggggagtgaaagtgtttcggtcctctgccactgtgtactttgctaatgctgaattttactcagatgccctaaagcagaggtgtggcgtggacgtggactttttgatttcccagaaaaaaaagttgctgaagaagcaagagcagcttaaactaaaacagctgcaaaaagaggagaagctgagaaagcaggctgcttcccccaagggtgcctcagtaagtatcaatgttaacacaagtcttgaggacatgcggtccaacaatgtcgaagattgcaagatgatgcaggtgtcctccggggacaagatggaagatgctactgccaatggccaagaggactctaaggcacccgatggcagtacactgaaggccctgggcctgccacagccagatttccatagtctgatcctagatctgggcgctcttagtttcgtcgatactgtctgtttgaagtctctcaagaacattttccatgactttcgggaaattgaagttgaggtgtatatggcggcttgtcacagccctgtggtttcacagcttgaagccggacacttcttcgatgctagtattacaaaaaagcatctgttcgcttctgtacacgatgctgtcacctttgccctgcaacacccgagaccagtccctgatagtcccgtctccgtgactaggttgtag

SEQ ID NO: 213629 - DNA, 2729 bp, Artificial Sequence
  derived and/or modified sequence
aaagaggctttctcaccagccaaagttcaggtactgcccctgtctgagtttggacatgtggcccacagatgccagctgggggctggaatactgtaccttgatcttagggcctggaaaaatcaggtaggtaactctctggtcctaggtggaggtgtaggggaggttgggccagggatgccttcactgtgtctctctggtcttgccaccccagaccgagggacacacaggcactgctgtctgcaacacaagcaatggacctgcggaggcgagactaccacatggaacggccgctgctgaaccaggagcatttggaggagctggggcgctggggctcagcacctaggacccaccagtggcggacctggttgcagtgctcccgtgctcgggcctatgcccttctgctccaacacctcccggttttggtctggttaccccggtatcctgtgcgtgactggctcctgggtgacctgttatccggcctgagtgtggccatcatgcagcttccgcagggcttggcctacgccctcctggctggattgccccccgtgtttggcctctatagctccttctaccctgtcttcatctacttcctgtttggcacttcccggcacatctccgtggggacctttgctgtcatgtctgtgatggtgggcagtgtgacagaatccctggccccgcaggccttgaacgactccatgatcaatgagacagccagagatgctgcccgggtacaggtggcctccacactcagtgtcctggttggcctcttccaggtggggctgggcctgatccacttcggcttcgtggtcacctacctgtcagaacctcttgtccgaggctataccacagctgcagctgtgcaggtcttcgtctcacagctcaagtatgtgtttggcctccatctgagcagccactctgggccactgtccctcatctatacagtgctggaggtctgctggaagctgccccagagcaaggttggcaccgtggtcactgcagctgtggctggggtggtgctcgtggtggtgaagctgttgaatgacaagctgcagcagcagctgcccatgccgatacccggggagctgctcacgctcatcggggccacaggcatctcctatggcatgggtctaaagcacagatttgaggtagatgtcgtgggcaacatccctgcagggctggtgcccccagtggcccccaacacccagctgttctcaaagctcgtgggcagcgccttcaccatcgctgtggttgggtttgccattgccatctcactggggaagatcttcgccctgaggcacggctaccgggtggacagcaaccaggagctggtggccctgggcctcagtaaccttatcggaggcatcttccagtgcttccccgtgagttgctctatgtctcggagcctggtacaggagagcaccgggggcaactcgcaggttgctggagccatctcttcccttttcatcctcctcatcattgtcaaacttggggaactcttccatgacctgcccaaggcggtcctggcagccatcatcattgtgaacctgaagggcatgctgaggcagctcagcgacatgcgctccctctggaaggccaatcgggcggatctgcttatctggctggtgaccttcacggccaccatcttgctgaacctggaccttggcttggtggttgcggtcatcttctccctgctgctcgtggtggtccggacacagatgccccactactctgtcctggggcaggtgccagacacggatatttacagagatgtggcagagtactcagaggccaaggaagtccggggggtgaaggtcttccgctcctcggccaccgtgtactttgccaatgctgagttctacagtgatgcgctgaagcagaggtgtggtgtggatgtcgacttcctcatctcccagaagaagaaactgctcaagaagcaggagcagctgaagctgaagcaactgcagaaagaggagaagcttcggaaacaggctgcctcccccaagggcgcctcagtttccattaatgtcaacaccagccttgaagacatgaggagcaacaacgttgaggactgcaagatgatgcaggtgagctcaggagataagatggaagatgcaacagccaatggtcaagaagactccaaggccccagatgggtccacactgaaggccctgggcctgcctcagccagacttccacagcctcatcctggacctgggtgccctctcctttgtggacactgtgtgcctcaagagcctgaagaatattttccatgacttccgggagattgaggtggaggtgtacatggcggcctgccacagccctgtggtcagccagcttgaggctgggcacttcttcgatgcatccatcaccaagaagcatctctttgcctctgtccatgatgctgtcacctttgccctccaacacccgaggcctgtccccgacagccctgtttcggtcaccagactctgaacatgctacatcctgcccaagactgcacctctggaggtgcagggcacccttgagaagcccctcacccctaggccgcctccaggtgctacccaggagtcccctccatgtacacacacacaactcagggaaggaggtcctgggactccaagttcagcgctccaggtctgggacagggcctgcatgcagtcaggctggcagtggcgcggtacagggagggaactggtgcatattttagcctcaggaataaagatttgtctgctc

SEQ ID NO: 213630 - DNA, 2589 bp, Artificial Sequence
  derived and/or modified sequence
ctctagctcgagcagcaggagcagcccgcaccggacaacttgcgagccatggggctggcggatgcgtcgggaccgagggacacacaggcactgctgtctgcaacacaagcaatggacctgcggaggcgagactaccacatggaacggccgctgctgaaccaggagcatttggaggagctggggcgctggggctcagcacctaggacccaccagtggcggacctggttgcagtgctcccgtgctcgggcctatgcccttctgctccaacacctcccggttttggtctggttaccccggtatcctgtgcgtgactggctcctgggtgacctgttatccggcctgagtgtggccatcatgcagcttccgcagggcttggcctacgccctcctggctggattgccccccgtgtttggcctctatagctccttctaccctgtcttcatctacttcctgtttggcacttcccggcacatctccgtggggacctttgctgtcatgtctgtgatggtgggcagtgtgacagaatccctggccccgcaggccttgaacgactccatgatcaatgagacagccagagatgctgcccgggtacaggtggcctccacactcagtgtcctggttggcctcttccaggtggggctgggcctgatccacttcggcttcgtggtcacctacctgtcagaacctcttgtccgaggctataccacagctgcagctgtgcaggtcttcgtctcacagctcaagtatgtgtttggcctccatctgagcagccactctgggccactgtccctcatctatacagtgctggaggtctgctggaagctgccccagagcaaggttggcaccgtggtcactgcagctgtggctggggtggtgctcgtggtggtgaagctgttgaatgacaagctgcagcagcagctgcccatgccgatacccggggagctgctcacgctcatcggggccacaggcatctcctatggcatgggtctaaagcacagatttgaggtagatgtcgtgggcaacatccctgcagggctggtgcccccagtggcccccaacacccagctgttctcaaagctcgtgggcagcgccttcaccatcgctgtggttgggtttgccattgccatctcactggggaagatcttcgccctgaggcacggctaccgggtggacagcaaccaggagctggtggccctgggcctcagtaaccttatcggaggcatcttccagtgcttccccgtgagttgctctatgtctcggagcctggtacaggagagcaccgggggcaactcgcaggttgctggagccatctcttcccttttcatcctcctcatcattgtcaaacttggggaactcttccatgacctgcccaaggcggtcctggcagccatcatcattgtgaacctgaagggcatgctgaggcagctcagcgacatgcgctccctctggaaggccaatcgggcggatctgcttatctggctggtgaccttcacggccaccatcttgctgaacctggaccttggcttggtggttgcggtcatcttctccctgctgctcgtggtggtccggacacagatgccccactactctgtcctggggcaggtgccagacacggatatttacagagatgtggcagagtactcagaggccaaggaagtccggggggtgaaggtcttccgctcctcggccaccgtgtactttgccaatgctgagttctacagtgatgcgctgaagcagaggtgtggtgtggatgtcgacttcctcatctcccagaagaagaaactgctcaagaagcaggagcagctgaagctgaagcaactgcagaaagaggagaagcttcggaaacaggctgcctcccccaagggcgcctcagtttccattaatgtcaacaccagccttgaagacatgaggagcaacaacgttgaggactgcaagatgatgcaggtgagctcaggagataagatggaagatgcaacagccaatggtcaagaagactccaaggccccagatgggtccacactgaaggccctgggcctgcctcagccagacttccacagcctcatcctggacctgggtgccctctcctttgtggacactgtgtgcctcaagagcctgaagaatattttccatgacttccgggagattgaggtggaggtgtacatggcggcctgccacagccctgtggtcagccagcttgaggctgggcacttcttcgatgcatccatcaccaagaagcatctctttgcctctgtccatgatgctgtcacctttgccctccaacacccgaggcctgtccccgacagccctgtttcggtcaccagactctgaacatgctacatcctgcccaagactgcacctctggaggtgcagggcacccttgagaagcccctcacccctaggccgcctccaggtgctacccaggagtcccctccatgtacacacacacaactcagggaaggaggtcctgggactccaagttcagcgctccaggtctgggacagggcctgcatgcagtcaggctggcagtggcgcggtacagggagggaactggtgcatattttagcctcaggaataaagatttgtctgctc

SEQ ID NO: 213631 - DNA, 2280 bp, Artificial Sequence
  derived and/or modified sequence
atgggcctggccgacgccagcggccccagagacacccaggccctgctgagcgccacccaggccatggacctgagaagaagagactaccacatggagagacccctgctgaaccaggagcacctggaggagctgggcagatggggcagcgcccccagaacccaccagtggagaacctggctgcagtgcagcagagccagagcctacgccctgctgctgcagcacctgcccgtgctggtgtggctgcccagataccccgtgagagactggctgctgggcgacctgctgagcggcctgagcgtggccatcatgcagctgccccagggcctggcctacgccctgctggccggcctgccccccgtgttcggcctgtacagcagcttctaccccgtgttcatctacttcctgttcggcaccagcagacacatcagcgtgggcaccttcgccgtgatgagcgtgatggtgggcagcgtgaccgagagcctggccccccaggccctgaacgacagcatgatcaacgagaccgccagagacgccgccagagtgcaggtggccagcaccctgagcgtgctggtgggcctgttccaggtgggcctgggcctgatccacttcggcttcgtggtgacctacctgagcgagcccctggtgagaggctacaccaccgccgccgccgtgcaggtgttcgtgagccagctgaagtacgtgttcggcctgcacctgagcagccacagcggccccctgagcctgatctacaccgtgctggaggtgtgctggaagctgccccagagcaaggtgggcaccgtggtgaccgccgccgtggccggcgtggtgctggtggtggtgaagctgctgaacgacaagctgcagcagcagctgcccatgcccatccccggcgagctgctgaccctgatcggcgccaccggcatcagctacggcatgggcctgaagcacagattcgaggtggacgtggtgggcaacatccccgccggcctggtgccccccgtggcccccaacacccagctgttcagcaagctggtgggcagcgccttcaccatcgccgtggtgggcttcgccatcgccatcagcctgggcaagatcttcgccctgagacacggctacagagtggacagcaaccaggagctggtggccctgggcctgagcaacctgatcggcggcatcttccagtgcttccccgtgagctgcagcatgagcagaagcctggtgcaggagagcaccggcggcaacagccaggtggccggcgccatcagcagcctgttcatcctgctgatcatcgtgaagctgggcgagctgttccacgacctgcccaaggccgtgctggccgccatcatcatcgtgaacctgaagggcatgctgagacagctgagcgacatgagaagcctgtggaaggccaacagagccgacctgctgatctggctggtgaccttcaccgccaccatcctgctgaacctggacctgggcctggtggtggccgtgatcttcagcctgctgctggtggtggtgagaacccagatgccccactacagcgtgctgggccaggtgcccgacaccgacatctacagagacgtggccgagtacagcgaggccaaggaggtgagaggcgtgaaggtgttcagaagcagcgccaccgtgtacttcgccaacgccgagttctacagcgacgccctgaagcagagatgcggcgtggacgtggacttcctgatcagccagaagaagaagctgctgaagaagcaggagcagctgaagctgaagcagctgcagaaggaggagaagctgagaaagcaggccgccagccccaagggcgccagcgtgagcatcaacgtgaacaccagcctggaggacatgagaagcaacaacgtggaggactgcaagatgatgcaggtgagcagcggcgacaagatggaggacgccaccgccaacggccaggaggacagcaaggcccccgacggcagcaccctgaaggccctgggcctgccccagcccgacttccacagcctgatcctggacctgggcgccctgagcttcgtggacaccgtgtgcctgaagagcctgaagaacatcttccacgacttcagagagatcgaggtggaggtgtacatggccgcctgccacagccccgtggtgagccagctggaggccggccacttcttcgacgccagcatcaccaagaagcacctgttcgccagcgtgcacgacgccgtgaccttcgccctgcagcaccccagacccgtgcccgacagccccgtgagcgtgaccagactgtag

SEQ ID NO: 213632 - protein, 201 aa, Artificial Sequence
  derived and/or modified sequence
MVSWIISRLVVLIFGTLYPAYYSYKAVKSKDIKEYVKWMMYWIIFALFTTAETFTDIFLCWFPFYYELKIAFVAWLLSPYTKGSSLLYRKFVHPTLSSKEKEIDDCLVQAKDRSYDALVHFGKRGLNVAATAAVMAASKGQGALSERLRSFSMQDLTTIRGDGAPAPSGPPPPGSGRASGKHGQPKMSRSASESASSSGTA

SEQ ID NO: 213633 - DNA, 606 bp, Artificial Sequence
  derived and/or modified sequence
atggtgtcatggattatttctcgcttagtagtgctcatatttggcactctgtatccggcctattatagctataaggcagtaaaaagcaaagacataaaagaatacgtaaaatggatgatgtactggatcattttcgcgctgtttactactgccgagaccttcaccgacattttcctgtgctggtttcccttttattatgagctcaaaatcgcgtttgtggcatggttactttctccatatacaaaaggctccagtctgctttacagaaagttcgtgcatcccacactgagctctaaggaaaaggagatcgatgattgtcttgtgcaggccaaagatcgaagttacgatgctctggtgcacttcgggaaacgggggctgaatgtcgccgcaaccgctgcagttatggctgcaagtaaaggacagggggcactgtctgaaagactgagatcctttagcatgcaggaccttacaaccattcgcggggatggggcacctgccccctccggaccaccacctcccgggtccgggcgcgccagcggcaagcacggccagcctaagatgtctcgttcagcctctgagtctgcatcctccagcggtacagcctag

SEQ ID NO: 213634 - DNA, 606 bp, Artificial Sequence
  derived and/or modified sequence
atggtgtcctggatcatcagccggctggtggtgctgatcttcggcaccctgtacccagcctactacagctacaaggctgtgaagagcaaggacatcaaggagtatgtgaagtggatgatgtactggatcatctttgccctcttcaccacagctgagaccttcacagacatcttcctgtgctggttccccttctactatgagctgaagatcgcctttgtggcctggctgctgagcccctacaccaagggcagcagcctgctgtacaggaagtttgtgcaccccaccctgagcagcaaggagaaggagattgatgactgcctggtgcaggccaaggacaggagctatgatgccctggtgcactttgggaagaggggcctgaatgtggccgccacagctgctgtgatggccgccagcaagggccagggcgccctgtctgagcggctgcggagcttctccatgcaggacctgaccaccatcagaggagatggagccccagcccccagcggccccccacctcctggcagcggccgggccagcggcaagcacggccagcccaagatgagccgcagcgccagcgagagcgccagcagcagcggcacagcctag

SEQ ID NO: 213635 - DNA, 606 bp, Artificial Sequence
  derived and/or modified sequence
atggtgagctggatcatcagccggctggtggtgctgatcttcggcactctgtacccagcctactactcgtacaaggctgtgaagagcaaggatatcaaggagtacgttaaatggatgatgtactggattatttttgcactgtttacaaccgcagaaacctttaccgatatttttttgtgttggttccctttctactatgaactgaaaatagcatttgttgcttggctgctcagcccctataccaaggggagttcactgctttaccgcaagtttgttcacccaacactcagctctaaagagaaggaaattgacgattgccttgtccaagctaaggatcgctcctacgatgccctcgtccacttcgggaagagaggccttaacgttgccgctacggcggccgttatggctgcctcgaaaggacagggtgccttgtccgaacgcctcagaagtttctccatgcaggatctgaccacgattcgaggtgatggggcccctgcccccagtggcccaccaccgccgggctccggtcgggcgagcgggaagcacggacagcccaaaatgtctcgttcagcttccgagtcggcttcttcgagtgggacagcttag

SEQ ID NO: 213636 - DNA, 606 bp, Artificial Sequence
  derived and/or modified sequence
atggtgtcctggataataagtcgtctggttgtgctcattttcggcaccctgtatcccgcatattacagctataaagcagtcaagtctaaggatatcaaagaatatgtgaagtggatgatgtactggatcatttttgccttgttcaccaccgcagagacgttcactgacatctttctttgttggtttcctttctattatgaactgaaaattgcctttgtggcgtggttactgtcaccctacactaaaggttcgtctctactctaccgcaagttcgtccaccccactctgagcagtaaagagaaggaaatagacgactgtttagtccaagccaaagacaggtcttatgatgctcttgtgcattttggcaagcgcggactgaatgttgcagctaccgctgctgtgatggcagcctctaagggccagggggcactttcagaaagactaagaagtttcagcatgcaagatctgaccacaatccgcggagacggagctccagcacccagcggcccacccccacccggtagcggtcgagcgtccggcaaacacggccagccaaagatgtctcgttctgcgagcgaatcagcttcatcgagtggtacagcatag

SEQ ID NO: 213637 - DNA, 606 bp, Artificial Sequence
  derived and/or modified sequence
atggtaagctggattatcagtagacttgtcgtgcttatcttcggaactttgtaccccgcatattactcatacaaagcagtgaaaagcaaggacattaaagaatatgtgaagtggatgatgtactggatcatctttgcactttttaccacagccgaaacgtttacggacatcttcctgtgttggttccctttttattatgagcttaagattgcgtttgtagcctggctcctctctccgtacaccaagggctccagccttttatatagaaaattcgttcatcctaccctgagctctaaggagaaggaaattgacgactgcctcgtgcaggccaaggatcggagctatgacgccctagttcacttcggtaagcgagggctcaatgtggctgccaccgccgccgtgatggccgcgtcgaagggacaaggtgcactctcagaacggctcagaagtttttcgatgcaggacctcaccacgatccgaggcgacggtgccccagctccaagcggacctccacctccaggaagtggtagagcgagtggcaagcatggccagcccaaaatgtccaggtcagcttcagaaagtgcctcgtcaagcggcacggcttag

SEQ ID NO: 213638 - DNA, 606 bp, Artificial Sequence
  derived and/or modified sequence
atggtaagctggattatcagtagacttgtcgtgcttatcttcggaactttgtaccccgcatattactcatacaaagcagtgaaaagcaaggacattaaagaatatgtgaagtggatgatgtactggatcatctttgcactttttaccacagccgaaacgtttacggacatcttcctgtgttggttccctttttattatgagcttaagattgcgtttgtagcctggctcctctctccgtacaccaagggctccagccttttatatagaaaattcgttcatcctaccctgagctctaaggagaaggagatagacgactgtctggtgcaggcaaaggatagatcatacgatgctcttgttcacttcgggaagagaggactcaatgtcgccgccacagcagccgtgatggcagctagcaaagggcaaggcgctctgtctgaacgcctgagatcgttttcaatgcaggatttaacaacaattcgcggagatggcgcacccgctccatcaggaccccctccgcccggcagcggcagggcttcaggcaaacacggtcagcccaaaatgtctcgcagcgcctcggagagcgctagttcctcagggacagcatag

SEQ ID NO: 213639 - DNA, 3857 bp, Artificial Sequence
  derived and/or modified sequence
aacgccgggcagggcggcgggcgcgctcagtctggcggcggctgccgtgagctgactgacgttccgggaacgccgcagcagcccgcgccgcccgcagcctagccgagccgcgccgcccgggcctcgcccgcccgcctgcccgccatggtgtcatggatcatctccaggctggtggtgcttatatttggcaccctttaccctgcgtattattcctacaaggctgtgaaatcaaaggacattaaggaatatgtcaaatggatgatgtactggattatatttgcacttttcaccacagcagagacattcacagacatcttcctttgttggtttccattctattatgaactaaaaatagcatttgtagcctggctgctgtctccctacacaaaaggctccagcctcctgtacaggaagtttgtacatcccacgctatcttcaaaagaaaaggaaatcgatgattgtctggtccaagcaaaagaccgaagttacgatgcccttgtgcacttcgggaagcggggcttgaacgtggccgccacagcggctgtgatggctgcttccaagggacagggtgccttatcggagagactgcggagcttcagcatgcaggacctcaccaccatcaggggagacggcgcccctgctccctcgggccccccaccaccggggtctgggcgggccagcggcaaacacggccagcctaagatgtccaggagtgcttctgagagcgctagcagctcaggcaccgcctagaatccttcgatctcgcttcaggaagaaaagtacctcatcctcggccaccgaaaccacgtgagtgagatgagccaacagcaccggatccacagaatgtttcttctctgccttaaagagctattcactaataacatagaaatccgcaagctgggtgtgctttgagtgtgcagcctcacaaacatggccttttctctctccccttccacttttaaggatttatttttttcccccttttctttattttgctggggagaggctaaagggaaaggtagtaggggcgggggtggtgacctttaagtcttctgaggttggtaattttccacaattggattgtcattatagacagcagtgtgttttttagaaagataagagaatcacccctatgctgctgagatgtacatttgtaatttatctgttgcatacttagtttttagtcctgtaaatgcaaacacagcattttttacaactttctttgttcttggtacttatactttgaactatgatgtacatatttatggcttttggcttttaatataatggacttgcaagggctgccagaggttctgatatgtaagaaaactgcaaaaacaaatatagacaaatattttgattctagagaacgtctcagatgtgcttataaagcttccaaatacaactccagtaagacatccctttccctgcaggagtgtggtctatattctttagatagttgtttagtcaaaagaccagacaagttacaaactaagagaaacaatatttcacaacacagtaaagtgtgatgagaggtcaggggaacatcccagtaaaagagaagagtcacaggaagctcatctcctccctggattctggattaggagcttctgaatcttttccagggataggcaggtagctcactcttggtgcaatttcttgaggatgggaacatgtagagctgctggaaggagtaattctgtgcttgacaaaggacgatttctcctttatcgtgaccagtgctgccgatttcctgacagaggagcttacactctgagcaccttgttttagcgaactctagcaaaacttgtttagcttagcaaaaacaaacacacaaaaaactgagaactctgctgtttcagatatgccataacatacatctgaaacacatgtgtaacaatcaaaatggtgggctctagaatggttttggagctcgagatcttcatgggttagacttgctggtcagacccaggagcacctgtggctcacaccttctgttcccctcctggcctgtgcagaatgtaaacagcagactcatactcaatgggcactacaggccttatcagacgttttatacaagcctggattgcttagtaggggaataaggcattctctgagggggctttccacttagattgagaattttatttgaaaagaatctggtttaaatggcattgtggtccgaggtagctgctctccccactgagagctgagccgaaatataagaataatatatttgtgcttcgagttggtgtttctttcagtgtaatgcatgcagtggtcacaacccagttactcataatatttggattgtatttgttcgtagatatgcccagaagactagagaattagtgttatataccatatagaacttactgtcagtcaactataaacaggcccaattaaaaactgttccattactacgcaaacacatattagaggcctttgctgatgacacattagctggatcttagccaccccagaaagggtttgatttgaagctgattgttgccagatatgcatattggaatcccatctacccatagttcctctgaaggtgattttgtaatttgcaaaagggtataggaaaatatacctaaaagcgaatttgtggctgagaggataaacagaagctgtttgctcatgttctgtgccccacacccaccaatacctaaatctgttaaggaagacagaaaatgttttctttgtgctcattgagtagttccagacagaagaagaatatactctttaaaatgtatttacctgttagttggaagtacccagaattatcagaaacgaatgcaaaaaaaaaaaaaaaaaaaaaaagcttacacagcttcttagcaatttttttttttttgccgaaacaataaattgcctttagcagcagtttaaaatcctatcgtgaacaacctatattttcgccattttacaatggagagttgtgacaagtacaggttatcaagtttgcacttaactatgccaaaaaaagtttgaagcgctctattctcagacatgctgtattattacttctcattcaagattgaaaaatataaaggtatccaaactctgtcttaatgtaaatgtaactatttttccttcaagtgttgactagggagtcggtttctctcttaaagacactcactgtacaactgaaagcagctgtcatatttctggcaaaatgtgtttacgtatctgacaagttgtacatttgtgtatgaactgacataaaatgtgaaagcctgtaagtgtacatgtagtggtgtggtgttctgtctagaggatacaactgaatgtttttaatttgctgacttacagacacaggctgtttacaaaatgctagctggaaagtctgtaatgttcatgtcataacttttagttaattgccattgagcacctgttctgaggaggtgagatgtggacttgtgcttataaactggagagtttagtcataatccctcctggctttgtgtgaatagcttgctcactttgctggcctttgaaatgtgttctccgtgataagctatccatgtgtttgtgataagagtgcttgtcaaccatgaccatctttgagccttcctagtcctccacctggcacagtatttgaaatggcaaaggatgtgcttcatcctctaacagtgtacactcccagagctgatattctggattttgactgtgcacatttcctctagttcatgtctgtagtccctatagaatgatctgtaataaaatagtatactggactgtgcatcaaagggatgtaaaattacagtattccaaaggttgaagttctgctgttttgttataatgcctgatacacatcttgaataaagtcttaacatttttcttttaaaaaa

SEQ ID NO: 213640 - DNA, 606 bp, Artificial Sequence
  derived and/or modified sequence
atggtgagctggatcatcagcagactggtggtgctgatcttcggcaccctgtaccccgcctactacagctacaaggccgtgaagagcaaggacatcaaggagtacgtgaagtggatgatgtactggatcatcttcgccctgttcaccaccgccgagaccttcaccgacatcttcctgtgctggttccccttctactacgagctgaagatcgccttcgtggcctggctgctgagcccctacaccaagggcagcagcctgctgtacagaaagttcgtgcaccccaccctgagcagcaaggagaaggagatcgacgactgcctggtgcaggccaaggacagaagctacgacgccctggtgcacttcggcaagagaggcctgaacgtggccgccaccgccgccgtgatggccgccagcaagggccagggcgccctgagcgagagactgagaagcttcagcatgcaggacctgaccaccatcagaggcgacggcgcccccgcccccagcggcccccccccccccggcagcggcagagccagcggcaagcacggccagcccaagatgagcagaagcgccagcgagagcgccagcagcagcggcaccgcctag

SEQ ID NO: 213641 - protein, 541 aa, Artificial Sequence
  derived and/or modified sequence
MPGRCQSDAAMRVNGPASRAPAGWTSGSLHTGPRAGRPRAQARGVRGRGLLLRPRPAKELPLPRKGGAWAPAGNPGPLHPLGVAVGMAGSGRLVLRPWIRELILGSETPSSPRAGQLLEDAEAAVAGPSHAPDTSDVGATLLVSDGTHSVRCLVTREALDTSDWEEKEFGFRGTEGRLLLLQDCGVHVQVAEGGAPAEFYLQVDRFSLLPTEQPRLRVPGCNQDLDVQKKLYDCLEEHLSESTSSNAGLSLSQLLDEMREDQEHQGALVCLAESCLTLEGPCTAPPVTHWAASRCKATGEAVYTVPSSMLCISENDQLILSSLGPCQRTQGPELPPPDPALQDLSLTLIASPPSSPSSSGTPALPGHMSSEESGTSISLLPALSLAAPDPGQRSSSQPSPAICSAPATLTPRSPHASRTPSSPLQSCTPSLSPRSHVPSPHQALVTRPQKPSLEFKEFVGLPCKNRPPFPRTGATRGAQEPCSVWEPPKRHRDGSAFQYEYEPPCTSLCARVQAVRLPPQLMAWALHFLMDAQPGSEPTPM

SEQ ID NO: 213642 - DNA, 2034 bp, Artificial Sequence
  derived and/or modified sequence
atcacgctgaggtccgcgcgcccccggagtctggggagcagggctccgccaatccgaggggagggcgaaggaagtaccatttatttagcgctgtgtgtgtgctcttatttccactggccttacaagaccgtgcactgtgtagatgaggaaactgagtcataataaatatgtgctgaaccgttcgggggtcacacggtgctgaaatggtttcgagtcaactcgctcggacggcactcggcctcagcctccggccctggaaccctctccagggacgggaccagcccttgttctgttccctaccggtaccacaggaatcttgacgaacggcccaaatgcctggccgctgtcagagtgacgccgcgatgagagtaaacgggccagcatcccgtgcaccagcggggtggaccagcgggagtctgcacacaggcccccgagcaggacgccctcgtgcgcaggcgcggggtgtacgtgggcggggcctcctcctccggccccgcccagcgaaggagcttcctcttccgaggaaaggcggggcctgggcgcccgcgggaaacccgggcccgttgcatccgctgggtgtagccgtggggatggcaggttcggggaggctggtcctacggccctggattcgggagctgattctggggtcagagacaccctccagtccacgagccgggcagctgcttgaggacgccgaggccgcggtcgcgggcccatcccacgcccctgatacgtccgacgtcggggccacgctgcttgtgtctgacgggacccacagtgtccgatgcctggtgacgcgggaggccctggacacctcggactgggaggagaaggagttcggcttccgcgggacagagggccggctgctgctgctgcaggactgcggggttcatgtccaggtcgctgagggcggcgcgcccgcagagttctatctccaggtggaccgcttcagcctgctgcccacggagcagccccggctacgggtgcctggttgcaaccaagacttagatgttcagaaaaagctctatgactgccttgaggagcacctttcagagtccacctcgtccaatgcaggcctatcactgtcccagcttctggatgaaatgcgggaggaccaggagcatcagggggcactcgtgtgcctggctgaaagctgcctgacactggagggcccttgcacagcaccccctgtcacccactgggctgcctcacgatgcaaggccacgggagaagctgtgtacactgtccccagctcaatgctgtgcatctctgagaatgaccagctaattctgagctctctaggcccctgtcagaggacacagggccctgagctgcccccaccagacccggctctgcaggacctatctctgaccctcatagcctctcctccttcctcacccagttcctcaggaaccccggccttacccggccacatgtcatccgaggaaagtggtaccagcatcagccttctgcctgccctgtccttggctgctccagacccagggcagagaagcagctcccagccctcaccagccatctgctcagcccctgccaccctgacccccaggtccccacacgccagccgtacccccagctccccactccagagctgcactcccagtctctcaccccgtagccatgtccccagtccacaccaggctcttgtgaccaggccccagaaacctagcctggagttcaaggagtttgtagggttgccctgcaagaatcggccgccttttcccaggaccggagctaccaggggagcccaggagccctgctctgtctgggaacccccaaagaggcatcgtgatggttctgccttccagtatgagtatgagccaccctgcacgtccctctgtgctcgggtccaagctgtcaggcttcctccccagctcatggcctgggccttgcactttctgatggatgcacagccagggtctgagccaactccgatgtgagacgtcacgcaggacagataccgctccacactctgcttcctttgagttttttaataaaataatctcatgcggcagg

SEQ ID NO: 213643 - DNA, 1626 bp, Artificial Sequence
  derived and/or modified sequence
atgcccggtcggtgtcaatctgacgccgctatgcgagtgaacgggcctgcttctagagcaccagcgggatggacttcaggctccctgcacacaggccctagagctggcaggcctcgagctcaggcaaggggcgtgcgtggacgtggcctccttctgagacctcggcctgcaaaggagctgcccctgcctcgtaagggtggagcctgggcccctgccggaaaccctggaccccttcaccctctgggagtcgccgtcggcatggcagggtcgggaagactagtcttgcggccttggattcgcgaactcatcctgggttccgagacacccagttctcctagggctggacagctcctcgaggatgcagaagccgcagtggcagggcccagccacgcaccggacacaagtgacgtgggagcaacactgctagtgtctgatggcacccacagtgtccgttgcctggtgaccagggaagcactcgatactagcgactgggaagaaaaagaatttggctttcgaggaacagaaggacgactgttactcctgcaggattgcggtgtccacgtgcaagtcgccgaggggggcgctccagcggaattttatttacaggtcgataggttctccctgctgcccacggagcagccccggttaagggtacctggatgcaatcaggacttggatgtgcagaaaaagttgtacgactgcctcgaagagcatttgagtgaatccacgagtagtaacgcaggactgtctctctcacagcttctggacgagatgcgagaagaccaagagcaccagggcgcgctggtttgccttgccgagtcatgccttactttggaggggccatgtacagccccaccagtgacacactgggccgcaagccggtgcaaggccaccggcgaagcggtgtatacagttccatcttctatgctgtgtatcagcgaaaacgaccagttgatcctgagctcactgggtccttgtcagcggactcaggggcccgaacttcccccccctgatccagccttgcaggacttgtcccttaccttgatagcttcaccgccctcttcaccgtcctcctctggcacaccagcactgcccggacacatgtcttccgaggagtccgggacaagcatcagcctcctgcctgctcttagcctggcagcacctgatccaggtcagcgctcaagctctcagcccagccccgccatctgctctgcacctgccacattaacccctcggagcccccacgcttcaaggactcctagctcacccctccagtcctgtaccccatccctgtcaccaaggagccatgtgccatccccccatcaagcactcgtcacccggcctcaaaaacctagtctagagtttaaggagtttgtcggcttgccctgtaaaaaccgccctccatttccacgcacaggcgcaacgcgtggcgcacaagagccctgcagtgtttgggaaccaccgaagagacatcgtgatggcagtgcctttcagtacgagtacgagccaccctgtacgtcattgtgcgccagggtgcaggcggtgagactgcccccgcagctcatggcttgggccctgcacttcctgatggatgcccagccaggttctgagcctacccccatgtag

SEQ ID NO: 213644 - DNA, 1626 bp, Artificial Sequence
  derived and/or modified sequence
atgcctggccgctgccagagtgatgctgccatgagggtgaatggacctgccagccgggccccagctggctggaccagcggcagcctgcacacaggccccagggctggccggccccgggcccaggcccggggcgtgcggggccggggcctgctgctgcggcccaggcctgccaaggagctgcccctgcccaggaaaggaggagcctgggccccagctggcaaccctggccccctgcaccccctgggcgtggccgtgggcatggccggcagcggccgcctggtgctgcggccctggatccgggagctgatcctgggcagcgagacccccagcagcccccgggccggccagctgctggaggatgctgaggccgctgtggccggccccagccacgccccagacaccagtgatgtgggcgccaccctgctggtgtctgatggcacccacagcgtgcgctgcctggtgacccgggaggccctggacaccagtgactgggaggagaaggagtttggcttccggggcacagagggccgcctgctgctgctgcaggactgtggggtgcacgtgcaggtggccgagggcggggccccagctgagttctacctgcaggtggaccgcttcagcctgctgcccacagagcagccccggctgcgggtgcccggctgcaaccaggacctggatgtgcagaagaagctgtatgactgcctggaggagcacctgtctgagagcaccagcagcaatgccggcctgagcctgagccagctgctggatgagatgagggaggaccaggagcaccagggcgccctggtgtgcctggccgagagctgcctgaccctggagggcccctgcacagcccctcctgtgacccactgggccgccagccgctgcaaggccaccggggaggccgtgtacacagtgcccagctccatgctgtgcatcagtgaaaatgaccagctgatcctgagcagcctgggcccctgccagaggacccagggccctgagctgcccccaccagaccctgccctgcaggacctgagcctgaccctgattgccagcccccccagcagccccagcagcagcggcaccccagccctgcccggccacatgagcagcgaggagagcggcaccagcatcagcctgctgcctgccctgagcctggccgccccagaccccggccagaggagcagcagccagcccagccctgccatctgcagcgccccagccaccctgacccccaggagcccccacgccagcaggacccccagcagccccctgcagagctgcacccccagcctgagccccaggagccacgtgcccagcccccaccaggccctggtgacccggccccagaagcccagcctggagttcaaggagtttgtgggcctgccctgcaagaacagaccacccttccccaggactggagccaccaggggggcccaggagccctgcagcgtgtgggagccccccaagaggcacagagatggcagcgccttccagtatgaatatgagcccccctgcaccagcctgtgtgcccgggtgcaggccgtgcggctgcccccccagctgatggcctgggccctgcacttcctgatggatgcccagcccggcagcgagcccacccccatgtag

SEQ ID NO: 213645 - DNA, 1626 bp, Artificial Sequence
  derived and/or modified sequence
atgcccggccggtgccagagcgacgccgccatgcgggtgaacggcccagcgagccgggcgcccgcaggctggacgtccggctcccttcacacaggccccagggccggaagaccaagagcccaggcaagaggggtgcgcggaagaggtctccttctcaggcctagacctgcaaaggaactcccactccctagaaaggggggtgcttgggcccccgccggtaaccctgggcctctgcaccccctcggagtggcagtgggcatggcaggatcggggcgcctggtactgcgaccctggatccgcgagctgattcttggttcagaaaccccaagctccccccgggctggtcagttgctcgaggacgccgaagccgcagtggctgggccctcacatgcacccgacaccagcgatgtgggcgccacacttcttgtatccgatggcacgcacagcgtgagatgtctggtcacccgtgaggccctggacaccagcgattgggaagagaaagagttcggcttccgtggaactgaggggcggctccttctcctgcaggactgtggcgtccacgtacaagtggccgaaggcggagcacccgcagagttctacttgcaggtcgatcgtttcagcctgctacccacagaacaaccaagactgagggttcccgggtgcaaccaggacctggacgtgcagaaaaagctttatgactgcctggaggagcacttaagtgaatctacatcctccaacgcaggcttgagccttagtcaactgctggatgagatgagggaggaccaggagcaccaaggcgctttggtgtgcctggcggagagctgtttgacgcttgaagggccctgcaccgctccaccagtgacacactgggccgctagtcggtgtaaagccactggggaggctgtatacacagttcctagtagtatgttgtgtatctctgaaaacgaccagctgattctcagttccctgggaccttgccagcgaacgcaagggcctgagctccccccccctgacccagcgctgcaggatttaagcctcactctgatcgcatccccaccatcatccccatcttcttctggaactcccgcacttcctggccacatgtcgtcagaagagagtggcacaagcatatccctgcttcccgctctcagtttggctgcgccagaccccggtcagagaagcagctctcagccttcacctgccatatgttctgcccccgccaccctgacacctcgctctcctcatgcctctagaacccccagctcccctctgcagtcctgtactcctagcctgtcacctcgtagccacgtgcccagccctcaccaggccttagtcactaggccccaaaaaccttccctcgaatttaaggagttcgttggcctgccgtgcaaaaaccgcccgcctttcccacggacaggtgccacaagaggggctcaggagccgtgttctgtttgggagcctccaaagcgccaccgagacggttccgctttccagtatgagtacgagcccccttgcacttcgctgtgcgcccgagtgcaggccgtgaggctccctcctcaacttatggcttgggcactccacttcctgatggacgctcaacctggaagtgagcccacacccatgtag

SEQ ID NO: 213646 - DNA, 1626 bp, Artificial Sequence
  derived and/or modified sequence
atgcctggacgatgccaatcagacgccgcaatgcgggttaacggacccgctagtagagcaccggctggctggacttccggatccttgcacacaggcccacgggctgggagaccaagagcccaagccaggggagtccggggacggggacttcttttgaggcctcgccctgccaaggaattgcccctcccccgaaaaggtggtgcctgggcccctgcagggaatcctggcccactccatcctctgggcgttgcagtgggcatggccggttccggcagactggtgcttcgcccatggattagagagttgatattaggatctgagaccccaagctcccccagggccggtcagctcttggaagacgccgaagccgctgtcgctggccctagccatgcgccagacacctcggacgtgggcgctacgttactcgtatccgatggtacgcacagcgtcagatgcctcgtgacacgcgaggccttagacacgtccgactgggaggaaaaagagtttgggtttcggggaacagaaggcagactcctcctgcttcaggactgtggagtgcacgtacaggtggctgaaggaggcgctcctgcagagttttatctgcaggtggacagattttccctcctgcccactgaacagccacgcctcagggtaccagggtgtaatcaggatttggacgtgcagaagaaactgtacgattgtctggaggagcacctttctgagtcgacttctagcaatgcgggactctcattgtcgcagctgcttgacgagatgagagaagatcaggagcaccagggggctctggtgtgcctggctgagagctgtctcactctcgaaggaccgtgcaccgcgcctcccgtgacacactgggccgctagcaggtgcaaggccactggagaagccgtgtataccgttccttcctcaatgctctgtatatccgagaatgatcaactgattctgtcctctctcgggccttgccagaggactcagggccctgagttaccgcctccggatcccgcactgcaggacctgtctctgacattgattgcctcgcctccctcttcaccgtcctcctctggaactcctgccctgccagggcacatgagctccgaagagagcggaacttctatctcgctcctccctgccctcagccttgcggctccagaccctggacagcggagctccagccagccgagtccagcgatatgttctgcacctgcgaccctgacccccaggagcccccatgcaagccgcacccccagttctccacttcagagttgtaccccaagtttgtctcccaggtctcacgtgcccagcccgcatcaggctctagtgacaaggccacagaagcccagtttggagtttaaggagtttgttgggctgccttgtaagaacaggccaccctttcccaggaccggggctacaaggggcgcacaggagccttgtagtgtatgggagccacccaaacggcaccgagacggcagtgccttccagtacgaatatgaacctccctgcacctcattgtgtgctagagttcaggcggtgaggctaccacctcaactgatggcttgggctctgcacttccttatggatgcgcagcccggaagtgagcctacgcccatgtag

SEQ ID NO: 213647 - DNA, 1626 bp, Artificial Sequence
  derived and/or modified sequence
atgcccggcagatgccagagcgacgccgccatgagagtgaacggccccgccagcagagcccccgccggctggaccagcggcagcctgcacaccggccccagagccggcagacccagagcccaggccagaggcgtgagaggcagaggcctgctgctgagacccagacccgccaaggagctgcccctgcccagaaagggcggcgcctgggcccccgccggcaaccccggccccctgcaccccctgggcgtggccgtgggcatggccggcagcggcagactggtgctgagaccctggatcagagagctgatcctgggcagcgagacccccagcagccccagagccggccagctgctggaggacgccgaggccgccgtggccggccccagccacgcccccgacaccagcgacgtgggcgccaccctgctggtgagcgacggcacccacagcgtgagatgcctggtgaccagagaggccctggacaccagcgactgggaggagaaggagttcggcttcagaggcaccgagggcagactgctgctgctgcaggactgcggcgtgcacgtgcaggtggccgagggcggcgcccccgccgagttctacctgcaggtggacagattcagcctgctgcccaccgagcagcccagactgagagtgcccggctgcaaccaggacctggacgtgcagaagaagctgtacgactgcctggaggagcacctgagcgagagcaccagcagcaacgccggcctgagcctgagccagctgctggacgagatgagagaggaccaggagcaccagggcgccctggtgtgcctggccgagagctgcctgaccctggagggcccctgcaccgccccccccgtgacccactgggccgccagcagatgcaaggccaccggcgaggccgtgtacaccgtgcccagcagcatgctgtgcatcagcgagaacgaccagctgatcctgagcagcctgggcccctgccagagaacccagggccccgagctgcccccccccgaccccgccctgcaggacctgagcctgaccctgatcgccagcccccccagcagccccagcagcagcggcacccccgccctgcccggccacatgagcagcgaggagagcggcaccagcatcagcctgctgcccgccctgagcctggccgcccccgaccccggccagagaagcagcagccagcccagccccgccatctgcagcgcccccgccaccctgacccccagaagcccccacgccagcagaacccccagcagccccctgcagagctgcacccccagcctgagccccagaagccacgtgcccagcccccaccaggccctggtgaccagaccccagaagcccagcctggagttcaaggagttcgtgggcctgccctgcaagaacagaccccccttccccagaaccggcgccaccagaggcgcccaggagccctgcagcgtgtgggagccccccaagagacacagagacggcagcgccttccagtacgagtacgagcccccctgcaccagcctgtgcgccagagtgcaggccgtgagactgcccccccagctgatggcctgggccctgcacttcctgatggacgcccagcccggcagcgagcccacccccatgtag

SEQ ID NO: 213648 - protein, 332 aa, Artificial Sequence
  derived and/or modified sequence
MASGLVRLLQQGHRCLLAPVAPKLVPPVRGVKKGFRAAFRFQKELERQRLLRCPPPPVRRSEKPNWDYHAEIQAFGHRLQENFSLDLLKTAFVNSCYIKSEEAKRQQLGIEKEAVLLNLKSNQELSEQGTSFSQTCLTQFLEDEYPDMPTEGIKNLVDFLTGEEVVCHVARNLAVEQLTLSEEFPVPPAVLQQTFFAVIGALLQSSGPERTALFIRDFLITQMTGKELFEMWKIINPMGLLVEELKKRNVSAPESRLTRQSGGTTALPLYFVGLYCDKKLIAEGPGETVLVAEEEAARVALRKLYGFTENRRPWNYSKPKETLRAEKSITAS

SEQ ID NO: 213649 - DNA, 999 bp, Artificial Sequence
  derived and/or modified sequence
atggcctctggattggtccgcctgctgcagcagggccaccgttgcttactcgcccctgtggcccctaagctggtgccccccgtgagaggagtaaagaaaggcttcagagctgcgtttagattccagaaggaactcgaacggcaaaggctactgcgttgtccgccccctcctgtaaggaggtcagaaaagccaaactgggattaccacgccgaaattcaggcatttggccacaggctccaggaaaacttctcattggacctgttgaagacggccttcgttaattcatgttacatcaagtccgaagaagccaaaaggcagcagcttggcatcgaaaaagaagcggtgttgctcaacctcaaaagcaatcaggagttgtccgaacagggtacatcgttttcacagacctgtctgacccagtttctggaggatgagtacccagatatgcctaccgaagggataaaaaatcttgttgacttcttgactggcgaggaagtggtatgtcatgtggcacgcaacctggccgtggagcagctcaccctgagtgaagagtttcccgtcccccctgcagtgctccagcaaactttcttcgctgtcattggcgctctgctacagtctagcggcccagaaaggaccgcactgttcatcagggattttctcatcactcaaatgactggaaaagagttgtttgaaatgtggaaaatcatcaatccaatggggctgttggtggaggagcttaagaaaagaaatgtctccgccccagaaagtcggctgaccagacaatctggtggtactaccgcactgccactatactttgttggcctgtattgcgacaaaaaactcatagcagagggccccggggagacagtcctggtggcagaagaagaagctgcccgggtcgccctgcgtaaattgtatggtttcactgaaaacaggcgtccctggaactattcaaaacccaaggaaacattgcgcgccgaaaagagcatcactgccagctag

SEQ ID NO: 213650 - DNA, 999 bp, Artificial Sequence
  derived and/or modified sequence
atggccagcggcctggtgcggctgctgcagcagggccaccgctgcctgctggcccctgtggcccccaagctggtgccccctgtgcggggcgtgaagaagggcttccgggccgccttccgcttccagaaggagctggagcggcagaggctgctgcgctgccccccacctcctgtgagaagaagtgagaagcccaactgggactaccacgccgagatccaggccttcggccaccggctgcaggagaacttcagcctggacctgctgaagacagcctttgtgaacagctgctacatcaagtctgaggaggccaagaggcagcagctgggcatcgagaaggaggccgtgctgctgaacctgaagagcaaccaggagctgtctgagcagggcaccagcttcagccagacctgcctgacccagttcctggaggatgagtacccagacatgcccacagagggcatcaagaacctggtggacttcctgactggagaggaggtggtgtgccacgtggccaggaacctggccgtggagcagctgaccctgtctgaggagttccctgtgcccccagctgtgctgcagcagaccttctttgctgtgattggagccctgctgcagagcagcggccctgagaggacagccctcttcatccgggacttcctgatcacccagatgaccgggaaggagctgtttgagatgtggaagatcatcaaccccatgggcctgctggtggaggagctgaagaagagaaatgtgtctgcccctgagagccggctgacccggcagagcggcggcaccacagccctgcccctgtactttgtgggcctgtactgtgacaagaagctgattgctgagggccctggagagaccgtgctggtggccgaggaggaggccgcccgggtggccctgaggaagctgtatggcttcacagaaaatagaagaccctggaactacagcaagcccaaggagaccctgcgggcagagaagagcatcacagccagctag

SEQ ID NO: 213651 - DNA, 1748 bp, Artificial Sequence
  derived and/or modified sequence
ggggaagtgtgttacggggacactggcccgactactttcgttccgtcttccatcgttttctctcgtgcaatggcgtccgggctggtaagattgctgcagcagggacatcgctgcctcctggctccagtcgcccccaagctggtccctccggttcggggagtgaagaagggattccgcgccgccttccgcttccagaaggagttagagcggcagcgccttctgcggtgcccgccgccgcccgtgcgccgttcagagaagccgaactgggattaccatgcagaaatacaagcttttggacatcggttacaggaaaacttttccttagatcttctcaaaactgcatttgttaatagctgctatattaaaagtgaggaggccaaacgccaacaacttgggatagagaaagaagctgttcttctgaatcttaaaagtaatcaagaactatccgaacaagggacatctttttcacagacttgccttacacagtttcttgaagacgagtacccagacatgcccactgaaggcataaaaaatcttgttgactttctcactggtgaggaagtcgtgtgtcacgtggctagaaacttggctgtggagcagttaacactgagtgaagaattcccagtgcccccagctgtgttacagcagactttctttgcagttattggagccctgttacagagcagtggacctgagaggactgcacttttcatcagggacttcttaattactcaaatgactggaaaagagctctttgagatgtggaagataataaatcccatggggctattggtagaagaactgaagaaaaggaatgtttcagctcctgaatcaagacttactaggcagtctggtggcaccacagctttgcctttgtattttgttggcttatactgtgataaaaagttgattgcagaaggacctggggaaacagtattggttgcagaagaagaggctgctcgagtggcccttagaaaactttatggattcacagaaaatagacggccgtggaactattccaagcccaaagaaaccttgagagcagaaaagagcatcactgccagctagccgccatggatgcagcagcctgaaacttgagagcgaaagtgagataaatgtcaaaggtgtttcaagccagacattttcacaattgtgaagaaatagatgttttgtttctgttttttactgtgttcccaaaattaaataagtgttaaccaagtcacagtgtttttggttttgtttttctgaaatcttggtttgatcaaatctttttttttttctcttgagatggagtcttactctgtcgcccaggctggactgcagtggtgcgatctcggctcactgcaacctccacctcacaggttcaagcgattctcgtggctcagcctccctagtagctgggattacaggcacacaccaccatacctggctaatttttgtatttttggtagacatggggtttcaccaagttggctaggctagtcttgaactcctgacctcaggtgatccacccgccttggcctcccaaagtgctgggattacaggtgtgagccactatacccgaccagatcaaatctttttttgacatttttgcaaaaaaattttcctaatgttcttgatttaattgtatagaatttgtataattaggtgtattttatttgcgtctagctttgaggtatcataatttatgtatcttatgtgaattttttgctgtaataccaataaagttttttttctccacatgttaa

SEQ ID NO: 213652 - DNA, 999 bp, Artificial Sequence
  derived and/or modified sequence
atggccagcggcctggtgcggctgctgcagcagggccaccggtgcctcctcgcaccagtggccccaaaacttgtaccacccgtgagaggcgtgaaaaagggattcagagcggcatttcggttccaaaaagaactggagcgacagcgtctgctacggtgccctcctccaccagtcagaagatcagaaaaaccaaattgggattatcacgcagagatccaagcatttgggcacaggttgcaagaaaacttcagcctcgacctacttaaaacggcctttgtcaattcatgttacatcaagtccgaagaagctaaaaggcagcaattaggcattgagaaagaagctgttctcctgaacttgaaatcgaaccaggaactcagcgaacaaggcaccagtttttcgcagacttgtctcacccaattcttagaggacgaataccccgacatgccaaccgagggaattaaaaatctggtagattttctgactggggaagaagtggtgtgtcatgtggctcgcaacctggctgtagaacaacttaccctgtccgaggaattcccagtgccccctgctgtgttgcagcagacgttttttgccgtaatcggagctctgttacagtcctccggaccagaacgtaccgcgctgtttattagggacttcctcattactcagatgaccgggaaggaactgtttgagatgtggaagataatcaatcccatgggtctccttgttgaggaacttaagaaaagaaatgttagtgctcccgagagtcggctcactcgccagagtggaggcacaaccgcgctgcctctctacttcgtcgggctttactgtgacaagaaactgatagccgagggacctggagagactgtccttgttgccgaggaagaagccgctcgtgttgccttgcgcaaactctacggcttcacagaaaacagaaggccttggaattattctaagcccaaagaaaccctgcgagcggaaaaatctatcaccgcatcgtag

SEQ ID NO: 213653 - DNA, 999 bp, Artificial Sequence
  derived and/or modified sequence
atggcaagcgggctggtgaggttactccagcagggacatcgctgtctgctggcccctgtggcaccaaagttggtccctccagttagaggcgtgaaaaaggggttccgcgctgcttttcgatttcagaaagaattggaacggcagagattgttgcgctgccccccaccccctgtccggagatccgagaagccaaactgggactaccatgccgaaattcaggctttcggacaccggctgcaggagaattttagtctagatctgctcaaaacagcgttcgttaattcatgctacatcaaaagcgaagaagcaaagcgtcagcagctgggcatcgagaaggaggccgttctgttgaacttaaaatcaaaccaagagctgagcgagcagggcacctccttctctcagacatgcttaactcagttcctcgaggacgaatatccggatatgcccactgagggcattaagaatctggtggactttttaacaggggaggaagtagtctgtcacgtggctcgcaatctggcggttgagcagctgaccctgtctgaagaattccctgtgccaccagctgtactgcagcagaccttctttgccgttataggagcactgctgcagtcctctggccctgagcgcactgccttattcattcgggatttcttgattactcagatgaccggtaaggagctctttgaaatgtggaagattatcaaccctatggggcttctcgtggaagagctgaaaaagaggaacgtgtctgcacccgagagccgtctcaccagacagtcagggggaacaaccgcgttgcccctgtattttgtgggtttatattgtgataagaagctaatcgctgaaggacctggggagaccgtcctcgttgctgaagaagaggccgctcgagtggctttaaggaagctgtatggtttcactgagaaccgtagaccatggaactactctaaacctaaagagactcttcgcgcagaaaaatcaattactgcctcatag

SEQ ID NO: 213654 - DNA, 999 bp, Artificial Sequence
  derived and/or modified sequence
atggccagcggcctggtgagactgctgcagcagggccacagatgcctgctggcccccgtggcccccaagctggtgccccccgtgagaggcgtgaagaagggcttcagagccgccttcagattccagaaggagctggagagacagagactgctgagatgcccccccccccccgtgagaagaagcgagaagcccaactgggactaccacgccgagatccaggccttcggccacagactgcaggagaacttcagcctggacctgctgaagaccgccttcgtgaacagctgctacatcaagagcgaggaggccaagagacagcagctgggcatcgagaaggaggccgtgctgctgaacctgaagagcaaccaggagctgagcgagcagggcaccagcttcagccagacctgcctgacccagttcctggaggacgagtaccccgacatgcccaccgagggcatcaagaacctggtggacttcctgaccggcgaggaggtggtgtgccacgtggccagaaacctggccgtggagcagctgaccctgagcgaggagttccccgtgccccccgccgtgctgcagcagaccttcttcgccgtgatcggcgccctgctgcagagcagcggccccgagagaaccgccctgttcatcagagacttcctgatcacccagatgaccggcaaggagctgttcgagatgtggaagatcatcaaccccatgggcctgctggtggaggagctgaagaagagaaacgtgagcgcccccgagagcagactgaccagacagagcggcggcaccaccgccctgcccctgtacttcgtgggcctgtactgcgacaagaagctgatcgccgagggccccggcgagaccgtgctggtggccgaggaggaggccgccagagtggccctgagaaagctgtacggcttcaccgagaacagaagaccctggaactacagcaagcccaaggagaccctgagagccgagaagagcatcaccgccagctag

SEQ ID NO: 213655 - protein, 596 aa, Artificial Sequence
  derived and/or modified sequence
MAAHLSYGRVNLNVLREAVRRELREFLDKCAGSKAIVWDEYLTGPFGLIAQYSLLKEHEVEKMFTLKGNRLPAADVKNIIFFVRPRLELMDIIAENVLSEDRRGPTRDFHILFVPRRSLLCEQRLKDLGVLGSFIHREEYSLDLIPFDGDLLSMESEGAFKECYLEGDQTSLYHAAKGLMTLQALYGTIPQIFGKGECARQVANMMIRMKREFTGSQNSIFPVFDNLLLLDRNVDLLTPLATQLTYEGLIDEIYGIQNSYVKLPPEKFAPKKQGDGGKDLPTEAKKLQLNSAEELYAEIRDKNFNAVGSVLSKKAKIISAAFEERHNAKTVGEIKQFVSQLPHMQAARGSLANHTSIAELIKDVTTSEDFFDKLTVEQEFMSGIDTDKVNNYIEDCIAQKHSLIKVLRLVCLQSVCNSGLKQKVLDYYKREILQTYGYEHILTLHNLEKAGLLKPQTGGRNNYPTIRKTLRLWMDDVNEQNPTDISYVYSGYAPLSVRLAQLLSRPGWRSIEEVLRILPGPHFEERQPLPTGLQKKRQPGENRVTLIFFLGGVTFAEIAALRFLSQLEDGGTEYVIATTKLMNGTSWIEALMEKPF

SEQ ID NO: 213656 - DNA, 1791 bp, Artificial Sequence
  derived and/or modified sequence
atggccgcccacctgagctacggcagagtgaacctgaacgtgctgagagaggccgtgagaagagagctgagagagttcctggacaagtgcgccggcagcaaggccatcgtgtgggacgagtacctgaccggccccttcggcctgatcgcccagtacagcctgctgaaggagcacgaggtggagaagatgttcaccctgaagggcaacagactgcccgccgccgacgtgaagaacatcatcttcttcgtgagacccagactggagctgatggacatcatcgccgagaacgtgctgagcgaggacagaagaggccccaccagagacttccacatcctgttcgtgcccagaagaagcctgctgtgcgagcagagactgaaggacctgggcgtgctgggcagcttcatccacagagaggagtacagcctggacctgatccccttcgacggcgacctgctgagcatggagagcgagggcgccttcaaggagtgctacctggagggcgaccagaccagcctgtaccacgccgccaagggcctgatgaccctgcaggccctgtacggcaccatcccccagatcttcggcaagggcgagtgcgccagacaggtggccaacatgatgatcagaatgaagagagagttcaccggcagccagaacagcatcttccccgtgttcgacaacctgctgctgctggacagaaacgtggacctgctgacccccctggccacccagctgacctacgagggcctgatcgacgagatctacggcatccagaacagctacgtgaagctgccccccgagaagttcgcccccaagaagcagggcgacggcggcaaggacctgcccaccgaggccaagaagctgcagctgaacagcgccgaggagctgtacgccgagatcagagacaagaacttcaacgccgtgggcagcgtgctgagcaagaaggccaagatcatcagcgccgccttcgaggagagacacaacgccaagaccgtgggcgagatcaagcagttcgtgagccagctgccccacatgcaggccgccagaggcagcctggccaaccacaccagcatcgccgagctgatcaaggacgtgaccaccagcgaggacttcttcgacaagctgaccgtggagcaggagttcatgagcggcatcgacaccgacaaggtgaacaactacatcgaggactgcatcgcccagaagcacagcctgatcaaggtgctgagactggtgtgcctgcagagcgtgtgcaacagcggcctgaagcagaaggtgctggactactacaagagagagatcctgcagacctacggctacgagcacatcctgaccctgcacaacctggagaaggccggcctgctgaagccccagaccggcggcagaaacaactaccccaccatcagaaagaccctgagactgtggatggacgacgtgaacgagcagaaccccaccgacatcagctacgtgtacagcggctacgcccccctgagcgtgagactggcccagctgctgagcagacccggctggagaagcatcgaggaggtgctgagaatcctgcccggcccccacttcgaggagagacagcccctgcccaccggcctgcagaagaagagacagcccggcgagaacagagtgaccctgatcttcttcctgggcggcgtgaccttcgccgagatcgccgccctgagattcctgagccagctggaggacggcggcaccgagtacgtgatcgccaccaccaagctgatgaacggcaccagctggatcgaggccctgatggagaagcccttctag

SEQ ID NO: 213657 - DNA, 1791 bp, Artificial Sequence
  derived and/or modified sequence
atggccgcacatctttcatacggaagggtcaacttgaatgttctaagggaagccgttcgccgagagctgcgggagttcttggataagtgtgccggcagtaaagccatcgtgtgggacgagtacctcacgggtccatttgggcttatcgcccaatattcacttctgaaagagcacgaggtagaaaaaatgttcacactgaaagggaacaggctccccgctgccgacgtgaaaaacatcatcttttttgttaggcctagactggagcttatggatattatcgcagagaatgttctgagtgaggatcgacgggggcccactcgtgactttcacatcctgttcgtgcctcggcggtcccttctgtgtgagcagcggcttaaagacctgggcgtgctcgggtcattcattcacagagaggaatactcgctggatctgatcccttttgacggtgacctgctttcaatggagtcagagggagcctttaaggagtgttatttagagggggatcagacttctctttaccacgccgccaaaggtttaatgactctccaggctctctacgggactattccccagatcttcgggaagggggagtgtgcccgacaggtggctaacatgatgattcgtatgaagagggagttcacagggtcccagaattctatatttccagtgttcgataacttgctcctgttggatagaaacgtggacctgttgaccccgctggcaacccagctgacttacgaaggactgatagacgagatctatggcattcagaattcctacgtgaaactgcctcccgagaagtttgctcccaaaaagcaaggtgacggcggcaaggacctaccaacagaggccaagaagcttcagcttaattccgccgaagaattgtatgcagagatcagagataagaattttaacgccgtggggagcgtgttgtccaagaaagctaaaatcattagcgccgcgttcgaagagcgccacaatgccaaaaccgtcggagagatcaagcaattcgtgagccagttgccccatatgcaggctgcgagaggctctctggctaatcacacctccatcgccgaactgatcaaagacgtgaccacctcggaagatttctttgataagttgaccgtagagcaggaatttatgtccggcatcgacaccgataaggtgaacaattacatcgaagattgcatcgcacagaagcacagtctgatcaaggtacttagattggtgtgcttgcagtcggtttgcaactccggtttgaaacagaaggtgctggactattacaagagggagatccttcagacgtacgggtacgaacatatccttacactgcacaaccttgagaaagcagggttgctcaagccacagacaggtgggcggaacaattaccctacgattagaaaaacattgagactctggatggacgacgtgaacgagcaaaatccaaccgacatcagctacgtgtactctggttacgcccccctctctgtcaggctcgctcaactgcttagccggcccggttggcggagcattgaggaggtgttgcggatcctgccgggcccacatttcgaagagcgacagccactgccgaccgggcttcaaaagaaacgccagccaggagagaatcgtgttaccctaatctttttcctcgggggagtcacctttgcagagatagccgctctccgattccttagccagctggaggatgggggtacagagtatgttattgctacgaccaaactaatgaatgggacctcctggatcgaagcactgatggagaagccattctag

SEQ ID NO: 213658 - DNA, 1791 bp, Artificial Sequence
  derived and/or modified sequence
atggccgcccacctgtcctatggccgggtgaacctgaatgtgctgcgggaggccgtgcggcgggagctgcgggagttcctggacaagtgtgccggcagcaaggccatcgtgtgggatgagtacctgaccggccccttcggcctgattgcccagtacagcctgctgaaggagcacgaggtggagaagatgttcaccctgaagggcaaccggctgcctgctgctgatgtgaagaacatcatcttctttgtgcggccccggctggagctgatggacatcatcgcagaaaatgtgctgtctgaggaccggcggggccccacccgggacttccacatcctgtttgtgccccggcgcagcctgctgtgtgagcagaggctgaaggacctgggcgtgctgggcagcttcatccaccgggaggagtacagcctggacctgatcccctttgatggagacctgctgtccatggagagcgagggcgccttcaaggagtgctacctggagggggaccagaccagcctgtaccacgccgccaagggcctgatgaccctgcaggccctgtatggcaccatcccccagatctttggaaaaggagaatgtgcccggcaggtggccaacatgatgatccgcatgaagcgggagttcaccggcagccagaacagcatcttccctgtgtttgacaacctgctgctgctggacagaaatgtggacctgctgacccccctggccacccagctgacctatgagggcctgattgatgagatctacggcatccagaacagctatgtgaagctgcccccagagaagtttgcccccaagaagcagggagatggcggcaaggacctgcccacagaggccaagaagctgcagctgaacagcgctgaggagctgtatgcagagatccgggacaagaacttcaatgctgtgggctctgtgctgagcaagaaggccaagatcatctctgctgcctttgaggagcggcacaatgccaagacagtgggggagatcaagcagtttgtgtcccagctgccccacatgcaggccgcccggggcagcctggccaaccacaccagcattgctgagctgatcaaggatgtgaccaccagcgaggacttctttgacaagctgactgtggagcaggagttcatgagcggcatcgacacagacaaggtgaacaactacatcgaggactgcatcgcccagaagcacagcctcatcaaggtgctgcggctggtgtgcctgcagagcgtgtgcaacagcggcctgaagcagaaggtgctggactactacaagcgggagatcctgcagacctacggctatgagcacatcctgaccctgcacaacctggagaaggccggcctgctgaagccccagacaggaggcaggaacaactaccccaccatcaggaagaccctgcggctgtggatggatgatgtgaatgagcagaaccccacagacatctcctatgtgtacagcggctacgcccccctgtctgtgcggctggcccagctgctgagccggcccggctggaggagcattgaggaggtgctgcgcatcctgcccggcccccactttgaggagcggcagcccctgcccaccggcctgcagaagaagaggcagcctggagaaaatagagtgaccctcatcttcttcctgggcggcgtgacctttgctgagattgctgccctgcgcttcctgagccagctggaggatggcggcacagaatatgtgattgccaccaccaagctgatgaatggcacctcctggattgaggccctgatggagaagcccttctag

SEQ ID NO: 213659 - DNA, 1791 bp, Artificial Sequence
  derived and/or modified sequence
atggccgcccacctgagctacggccgggtgaacctgaacgtgctgcgggaggcagtgagaagagaactccgggaattcctcgacaagtgcgcagggtcgaaggcaattgtttgggacgagtacttgaccggtccatttggactcatcgctcagtactcccttctgaaggagcacgaagtcgagaagatgtttacattaaaaggaaacaggctgccagcagcggatgtgaaaaacatcatcttctttgtaagaccaaggctggagctgatggacataattgcagagaatgtgctttccgaggatcggcgcggacctacacgggactttcacatactttttgtgccccgcagatctctgctttgcgagcagagactgaaggatctcggcgtgctgggaagttttatccacagggaggaatacagtttggatctgattccctttgacggggacttattgtcaatggaatcagaaggtgccttcaaggaatgctacctcgaaggagaccagacctccttgtaccacgcagccaaggggctgatgacccttcaagctctttatgggactattccccaaatttttggaaaaggcgagtgtgccagacaggtggccaacatgatgataagaatgaaacgggagttcaccgggtctcaaaattcgatctttcctgttttcgacaatcttctcctgctggaccgaaacgtcgacctgctgacgcccttagctacgcagctaacatatgaaggcctgatcgatgagatctacggtatccagaacagctacgtgaagttgcctcctgagaagttcgccccaaagaagcagggtgatgggggaaaggacctgcccacagaggctaaaaagcttcagctgaactctgccgaagagctttatgccgagatcagggacaagaattttaatgccgtgggctctgtcctgagcaaaaaggccaaaatcatctcagccgctttcgaggagcggcacaatgcaaaaacagttggagagatcaaacagttcgtgagtcagctgccccatatgcaggccgcaagaggttctctcgcaaatcacacatccatcgccgagctcatcaaggatgtgacgacctccgaggatttcttcgataaactgaccgttgagcaggagtttatgtctgggatcgacactgacaaggttaacaattacatcgaagactgcattgctcagaaacattcactgataaaagtcctgaggctggtgtgcctgcaatccgtgtgtaattccggactcaagcaaaaagtgttggattattacaaacgcgaaatcctgcagacatacgggtatgaacacatacttaccctgcacaatttggagaaagcgggattgctgaagccacagacgggcggtaggaacaactatcccacaatccggaaaactcttagactctggatggacgacgtgaatgaacaaaatccaacagacatttcatatgtttactccgggtacgcacccctgtcggtgagattggcccagctcctttcccgacccgggtggaggagtattgaagaggtcctgaggattctcccagggcctcactttgaagagagacagcctctgcccacagggctgcagaaaaaacggcagccgggggagaatcgggtgaccctgattttcttcctgggaggcgtcacatttgctgagatagccgccctcagattcctgtcacagctggaggatggcgggacagaatacgtcatcgctaccactaagttgatgaacggtacatcctggattgaagctctgatggaaaagcccttttag

SEQ ID NO: 213660 - DNA, 1791 bp, Artificial Sequence
  derived and/or modified sequence
atggctgcccacctgtcatacggcagggtaaacctcaacgtgttacgggaggctgtgcgaagagaacttagggaatttctcgataagtgcgccggatcaaaagctatagtgtgggacgaatatctgactggtccctttggacttattgctcaatatagcttgctgaaggagcacgaggtggaaaagatgtttacactgaagggcaatcgcctccccgcagccgacgttaagaacatcattttctttgttcggcctaggctggaactgatggatataatcgctgagaatgtgctcagcgaagaccgtcgcggacctaccagagacttccatatcctcttcgtgccgagaaggtcgcttctgtgtgagcagaggctgaaggacctgggtgtgctggggagttttatccaccgggaagagtattcacttgacctcatccctttcgatggcgacctattaagcatggagtctgagggcgcttttaaggaatgttacttagaaggtgatcagacctcattgtaccatgcagctaagggcttgatgacattgcaagcattgtacggcacaattcctcagattttcggcaaaggggaatgtgcgaggcaagtggcgaacatgatgatacgcatgaagagagagttcacggggtcccagaactccatctttcccgtgtttgataatctacttctactggatcgcaatgttgaccttttgacaccattggccacccagcttacctatgaaggattgattgacgagatctacggcatccaaaattcttatgttaaacttccccctgaaaagttcgccccaaaaaagcaaggcgacggcggaaaggatctgccaacagaagccaagaaactacagcttaactccgctgaggagctgtatgccgagattcgtgacaagaatttcaatgctgttggctcggtcctttccaaaaaggctaaaataattagtgctgccttcgaagagcggcataatgctaaaaccgtgggcgaaattaaacagtttgtcagccaattaccccacatgcaggcagcgagaggtagtctggctaatcatacttccatagccgagctgataaaggacgtcacaacctcagaagacttttttgataagcttacagttgaacaggagtttatgtctggaattgacacagacaaagtgaataactacatcgaagactgtatagcccagaaacattctctgattaaggtgcttcgactggtttgtctgcagtcagtgtgtaacagtggtctgaagcagaaggtgctggactattataagcgtgaaatccttcagacctacgggtatgaacatattctgactttgcacaaccttgagaaagccggtctcttaaagccccaaactggcggaaggaataattacccaactattaggaagacgcttcgcctgtggatggatgacgtgaacgagcagaacccgacagacatttcctatgtctactcaggttatgctccactgagtgtcaggctcgcgcagctgttgtcaaggcccggatggcgcagtattgaagaggtgctgcggatcctgcctggtccacatttcgaagagagacagcctctgccgacaggcctgcagaagaagcgccagcccggagaaaatcgtgttactctgatctttttcctcggtggcgtgaccttcgcagaaatcgcagccctgcgcttcctgtcacagctcgaagatgggggaacagagtatgtgatcgcaaccacgaaactcatgaatggcactagctggattgaggcgctgatggagaagccgttctag

SEQ ID NO: 213661 - DNA, 3405 bp, Artificial Sequence
  derived and/or modified sequence
gtgcgctgccgtaccggtcacgtggacgtttggtcacgtgactgcgtccgtggtcctcccgtaggaaccggcggactcggttggcgttgtggggcagggggtggtggagcaagatggcggctcatctgtcctacggccgagtgaacctaaacgtgttgcgcgaggcggtgcgtcgcgagctgcgcgagttcctggacaagtgcgcaggaagcaaggcaatagtttgggatgaatacctaactggaccctttggcctgattgcacagtattcactattgaaggaacatgaagtggaaaaaatgttcacacttaaaggaaatcgtttgccggcagctgatgtgaagaatataattttttttgtcagacccaggctagagttgatggatataatcgctgaaaacgtgctcagtgaagatagacgaggcccaacgagagattttcatattctgtttgtgccacgccgtagcctgttgtgcgaacagcggttgaaggatctgggtgtcttgggatcctttattcacagggaggagtacagcttagatctcattccattcgatggggatctcttatccatggaatcagagggtgcattcaaagagtgctacctggagggtgaccagacgagcctgtaccacgcagccaaggggctgatgaccctgcaagctctgtatggaacgatcccccagatctttgggaaaggagaatgcgctcggcaagtggccaatatgatgatcaggatgaagagagagtttacaggaagccagaattcaatatttcctgtttttgataatctcttgttgcttgatcggaatgtggatttattaacacctcttgccactcagctgacatatgaaggactcattgatgaaatttatggcattcagaacagttatgtgaaattacctccagagaaatttgcacctaagaaacagggcgatggtggtaaggacctccccacggaagcaaagaagctgcagctgaattctgcagaggagctctatgctgagatccgagataagaacttcaacgcagttggctctgtgctcagcaagaaagcaaagatcatctctgcagcattcgaggaaagacacaatgctaagaccgtgggggagatcaagcagtttgtttcccagttgccccacatgcaggcagcaaggggctcgcttgcaaaccatacctcaattgcagaattgatcaaagatgtcactacttctgaagacttttttgataaattaaccgtggaacaggagtttatgtctggaatagacactgataaggtcaacaattacattgaggattgtatcgcccaaaagcactcgttgatcaaggtgttaagactagtttgcctccaatccgtgtgtaatagtgggctcaaacaaaaagttttggattattacaaaagagagattctccagacatacggctatgagcacatattgaccttacacaacctggagaaggccggcctgctgaaaccgcagacggggggcagaaacaattacccaactatacggaaaacattacgcctctggatggatgatgttaatgagcaaaaccccacggacatatcgtatgtgtacagtgggtatgccccgctcagtgtgcggctggcccagctgctttcccggcctggctggcggagcatcgaggaggtcctccgcatcctcccagggccccactttgaggagcggcagccactgcccacaggactgcagaagaaacgtcaaccgggagaaaaccgagtgactctgatatttttccttgggggcgtaaccttcgctgaaattgctgccctgcgatttctctcccagttggaagatggaggtacagaatatgtcattgccaccactaaactaatgaatggaaccagttggatagaggctctgatggaaaaacctttctaggatgttcagaggagacttaacaagtgtactgcagaataaactacctctttgaagaaattgctgaaaggaagtaaaaccccatagaagaaacatgggaatacagaatatattctggggtcagcttcttaaattatactactgtttactgctttctccgtctcttttgtattccctttttttttttcctttgagacggagtcttgctctgtcacccagactagagtgcagtggcacggtctcacctcactgcaacctccacctcctaggttcaagcaattctcctgcctcagcctcctgagtagctgggactacaggcatgcaccaccacacccggctaatttttgtatttttagtagccatggtgtttcaccatgttggccaggctggtctcaaactcctgacctcaggtgatccacctgcctcggcctcccacagtgctgggattacaggcctgagccaccgtgcctggcccctaatctgctgaagaaagaagaatagaagaaaatcaacctgagtaaaagcagcactggttttgagttttctaagctcagggtcttcattagagacctctggaaatacattaaggatggtgggggtagataatccattcagccagacaaacggggccagctcttaaaataagaaagctgagactgaggaggtgaaactgaaaataaaaagagaaagttcatcctctaatccccagtgctgtatttcttcaaggcgcatcaggcctaggacagtggttaagtgttgggagctggagatcattttatcactgagttgagatttctttttcctgcagagtgtgggagattatatttagggtcatcagtcactgtcgcaactgatcactaaggcaagtttgcttccttctacttcttacaaagcaagaggtttaggggagcttcttgcccagaaacaaagtttatgctctatgtgatcagctacatctccttaggttccatacttatcaggggcttttgacatggaagaatgtgataattggggagcaaccttctgagaattcagcctttgaagtaattcaaagacagtttcttagcacacacgttaactccagacacagcagtggtgggtgcctccattgaggtttccgttttctcttctgtccatcaagggcccaacatccaactggtcccacagtgagcaggggcaactcttgcttcttcagcatctggccacttcgtttccatggtaactgccacgtgtacttttctagcagtctgtggccactccgtactcagctgaaaacactgtttcagccccctctctggtgacctcagccttctccaggtgtatctcttgatgatcttggagaccagcagccacagctgctgctactcctgcaggagactgtcaggctgtggtggggggcaggggtgttggaggagaagttgaaaatccgtgtgttctctgcccctctgctcctccatcttagcttctggaggagttaaggcaccaagggcaccaagtcaggttg

SEQ ID NO: 213662 - protein, 1146 aa, Artificial Sequence
  derived and/or modified sequence
MGPAPAGEQLRGATGEPEVMEPALEGTGKEGKKASSRKRTLAEPPAKGLLQPVKLSRAELYKEPTNEELNRLRETEILFHSSLLRLQVEELLKEVRLSEKKKDRIDAFLREVNQRVVRVPSVPETELTDQAWLPAGVRVPLHQVPYAVKGCFRFLPPAQVTVVGSYLLGTCIRPDINVDVALTMPREILQDKDGLNQRYFRKRALYLAHLAHHLAQDPLFGSVCFSYTNGCHLKPSLLLRPRGKDERLVTVRLHPCPPPDFFRPCRLLPTKNNVRSAWYRGQSPAGDGSPEPPTPRYNTWVLQDTVLESHLQLLSTILSSAQGLKDGVALLKVWLRQRELDKGQGGFTGFLVSMLVVFLVSTRKIHTTMSGYQVLRSVLQFLATTDLTVNGISLCLSSDPSLPALADFHQAFSVVFLDSSGHLNLCADVTASTYHQVQHEARLSMMLLDSRADDGFHLLLMTPKPMIRAFDHVLHLRPLSRLQAACHRLKLWPELQDNGGDYVSAALGPLTTLLEQGLGARLNLLAHSRPPVPEWDISQDPPKHKDSGTLTLGLLLRPEGLTSVLELGPEADQPEAAKFRQFWGSRSELRRFQDGAIREAVVWEAASMSQKRLIPHQVVTHLLALHADIPETCVHYVGGPLDALIQGLKETSSTGEEALVAAVRCYDDLSRLLWGLEGLPLTVSAVQGAHPVLRYTEVFPPTPVRPAFSFYETLRERSSLLPRLDKPCPAYVEPMTVVCHLEGSGQWPQDAEAVQRVRAAFQLRLAELLTQQHGLQCRATATHTDVLKDGFVFRIRVAYQREPQILKEVQSPEGMISLRDTAASLRLERDTRQLPLLTSALHGLQQQHPAFSGVARLAKRWVRAQLLGEGFADESLDLVAAALFLHPEPFTPPSSPQVGFLRFLFLVSTFDWKNNPLFVNLNNELTVEEQVEIRSGFLAARAQLPVMVIVTPQDRKNSVWTQDGPSAQILQQLVVLAAEALPMLEKQLMDPRGPGDIRTVFRPPLDIYDVLIRLSPRHIPRHRQAVDSPAASFCRGLLSQPGPSSLMPVLGYDPPQLYLTQLREAFGDLALFFYDQHGGEVIGVLWKPTSFQPQPFKASSTKGRMVMSRGGELVMVPNVEAILEDFAVLGEGLVQTVEARSERWTV

SEQ ID NO: 213663 - protein, 1007 aa, Artificial Sequence
  derived and/or modified sequence
MGPAPAGEQLRGATGEPEVMEPALEGTGKEGKKASSRKRTLAEPPAKGLLQPVKLSRAELYKEPTNEELNRLRETEILFHSSLLRLQVEELLKEVRLSEKKKDRIDAFLREVNQRVVRVPSVPETELTDQAWLPAGVRVPLHQVPYAVKGCFRFLPPAQVTVVGSYLLGTCIRPDINVDVALTMPREILQDKDGLNQRYFRKRALYLAHLAHHLAQDPLFGSVCFSYTNGCHLKPSLLLRPRGKDERLVTVRLHPCPPPDFFRPCRLLPTKNNVRSAWYRGQSPAGDGSPEPPTPRYNTWVLQDTVLESHLQLLSTILSSAQGLKDGVALLKVWLRQRELDKGQGGFTGFLVSMLVVFLVSTRKIHTTMSGYQVLRSVLQFLATTDLTVNGISLCLSSDPSLPALADFHQAFSVVFLDSSGHLNLCADVTASTYHQVQHEARLSMMLLDSRADDGFHLLLMTPKPMIRAFDHVLHLRPLSRLQAACHRLKLWPELQDNGGDYVSAALGPLTTLLEQGLGARLNLLAHSRPPVPEWDISQDPPKHKDSGTLTLGLLLRPEGLTSVLELGPEADQPEAAKFRQFWGSRSELRRFQDGAIREAVVWEAASMSQKRLIPHQVVTHLLALHADIPETCVHYVGGPLDALIQGLKETSSTGEEALVAAVRCYDDLSRLLWGLEGLPLTVSAVQGAHPVLRYTEVFPPTPVRPAFSFYETLRERSSLLPRLDKPCPAYVEPMTVVCHLEGSGQWPQDAEAVQRVRAAFQLRLAELLTQQHGLQCRATATHTDVLKDGFVFRIRVAYQREPQILKEVQSPEGMISLRDTAASLRLERDTRQLPLLTSALHGLQQQHPAFSGVARLAKRWVRAQLLGEGFADESLDLVAAALFLHPEPFTPPSSPQVGFLRFLFLVSTFDWKNNPLFVNLNNELTVEEQVEIRSGFLAARAQLPVMVIVTPQDRKNSVWTQDGPSAQILQQLVVLAAEALPMLEKQLMDPRGPGDIRWDPAKMWPF

SEQ ID NO: 213664 - protein, 200 aa, Artificial Sequence
  derived and/or modified sequence
MVIVTPQDRKNSVWTQDGPSAQILQQLVVLAAEALPMLEKQLMDPRGPGDIRTVFRPPLDIYDVLIRLSPRHIPRHRQAVDSPAASFCRGLLSQPGPSSLMPVLGYDPPQLYLTQLREAFGDLALFFYDQHGGEVIGVLWKPTSFQPQPFKASSTKGRMVMSRGGELVMVPNVEAILEDFAVLGEGLVQTVEARSERWTV

SEQ ID NO: 213665 - protein, 1023 aa, Artificial Sequence
  derived and/or modified sequence
MGPAPAGEQLRGATGEPEVMEPALEGTGKEGKKASSRKRTLAEPPAKGLLQPVKLSRAELYKEPTNEELNRLRETEILFHSSLLRLQVEELLKEVRLSEKKKDRIDAFLREVNQRVVRVPSVPETELTDQAWLPAGVRVPLHQVPYAVKGCFRFLPPAQVTVVGSYLLGTCIRPDINVDVALTMPREILQDKDGLNQRYFRKRALYLAHLAHHLAQDPLFGSVCFSYTNGCHLKPSLLLRPRGKDERLVTVRLHPCPPPDFFRPCRLLPTKNNVRSAWYRGQSPAGDGSPEPPTPRYNTWVLQDTVLESHLQLLSTILSSAQGLKDGVALLKVWLRQRELDKGQGGFTGFLVSMLVVFLVSTRKIHTTMSGYQVLRSVLQFLATTDLTVNGISLCLSSDPSLPALADFHQAFSVVFLDSSGHLNLCADVTASTYHQVQHEARLSMMLLDSRADDGFHLLLMTPKPMIRAFDHVLHLRPLSRLQAACHRLKLWPELQDNGGDYVSAALGPLTTLLEQGLGARLNLLAHSRPPVPEWDISQDPPKHKDSGTLTLGLLLRPEGLTSVLELGPEADQPEAAKFRQFWGSRSELRRFQDGAIREAVVWEAASMSQKRLIPHQVVTHLLALHADIPETCVHYVGGPLDALIQGLKETSSTGEEALVAAVRCYDDLSRLLWGLEGLPLTVSAVQGAHPVLRYTEVFPPTPVRPAFSFYETLRERSSLLPRLDKPCPAYVEPMTVVCHLEGSGQWPQDAEAVQRVRAAFQLRLAELLTQQHGLQCRATATHTDVLKDGFVFRIRVAYQREPQILKEVQSPEGMISLRDTAASLRLERDTRQLPLLTSALHGLQQQHPAFSGVARLAKRWVRAQLLGEGFADESLDLVAAALFLHPEPFTPPSSPQVGFLRFLFLVSTFDWKNNPLFVNLNNELTVEEQVEIRSGFLAARAQLPVMVIVTPQDRKNSVWTQDGPSAQILQQLVVLAAEALPMLEKQLMDPRGPGDIRMGPSENVALLSHITDTEQWKGAICV

SEQ ID NO: 213666 - protein, 1094 aa, Artificial Sequence
  derived and/or modified sequence
MGPAPAGEQLRGATGEPEVMEPALEGTGKEGKKASSRKRTLAEPPAKGLLQPVKLSRAELYKEPTNEELNRLRETEILFHSSLLRLQVEELLKEVRLSEKKKDRIDAFLREVNQRVVRVPSVPETEEILQDKDGLNQRYFRKRALYLAHLAHHLAQDPLFGSVCFSYTNGCHLKPSLLLRPRGKDERLVTVRLHPCPPPDFFRPCRLLPTKNNVRSAWYRGQSPAGDGSPEPPTPRYNTWVLQDTVLESHLQLLSTILSSAQGLKDGVALLKVWLRQRELDKGQGGFTGFLVSMLVVFLVSTRKIHTTMSGYQVLRSVLQFLATTDLTVNGISLCLSSDPSLPALADFHQAFSVVFLDSSGHLNLCADVTASTYHQGWSLLWLQVQHEARLSMMLLDSRADDGFHLLLMTPKPMIRAFDHVLHLRPLSRLQAACHRLKLWPELQDNGGDYVSAALGPLTTLLEQGLGARLNLLAHSRPPVPEWDISQDPPKHKDSGTLTLGLLLRPEGLTSVLELGPEADQPEAAKFRQFWGSRSELRRFQDGAIREAVVWEAASMSQKRLIPHQVVTHLLALHADIPETCVHYVGGPLDALIQGLKETSSTGEEALVAAVRCYDDLSRLLWGLEGLPLTVSAVQGAHPVLRYTEVFPPTPVRPAFSFYETLRERSSLLPRLDKPCPAYVEPMTVVCHLEGSGQWPQDAEAVQRVRAAFQLRLAELLTQQHGLQCRATATHTDVLKDGFVFRIRVAYQREPQILKEVQSPEGMISLRDTAASLRLERDTRQLPLLTSALHGLQQQHPAFSGVARLAKRWVRAQLLGEGFADESLDLVAAALFLHPEPFTPPSSPQVGFLRFLFLVSTFDWKNNPLFVNLNNELTVEEQVEIRSGFLAARAQLPVMVIVTPQDRKNSVWTQDGPSAQILQQLVVLAAEALPMLEKQLMDPRGPGDIRTVFRPPLDIYDVLIRLSPRHIPRHRQAVDSPAASFCRGLLSQPGPSSLMPVLGYDPPQLYLTQLREAFGDLALFFYDQHGGEVIGVLWKPTSFQPQPFKASSTKGRMVMSRGGELVMVPNVEAILEDFAVLGEGLVQTVEARSERWTV

SEQ ID NO: 213667 - protein, 702 aa, Artificial Sequence [sequence omitted]

SEQ ID NO: 213668 - DNA, 3441 bp, Artificial Sequence
  derived and/or modified sequence
atggggccggcgcctgcaggagaacagctgaggggcgctactggagagccggaagtgatggagcccgcccttgagggaactggaaaagaaggaaaaaaggcttcatcacggaaaaggacattggctgaaccccccgccaaggggctgctgcagcctgtgaagctgtcccgggctgagctttataaagagcccacgaatgaagagttaaatcgcctccgcgaaactgaaatactgttccactcttcacttctgcgtctacaggtcgaagaattgctcaaggaggtaaggctatctgaaaagaaaaaagatcgaatcgacgctttcctccgagaggtgaatcaaagggtagtgcgagtgcctagcgtccctgaaacagagcttactgatcaggcctggttgccagccggcgtccgggtcccactgcatcaggtgccttacgccgtgaagggctgctttcgtttcctgcctcccgctcaggtgacggtggtggggagttacctactgggtacctgtatcagacccgacatcaatgttgatgttgctcttacaatgcctcgggagatactccaggataaagatgggttgaaccagagatactttcgaaagcgtgccctctatctcgcccacctagcacaccacctggctcaggacccactttttggctccgtgtgttttagctatactaatggatgccatttgaagccaagcctattactccgcccccgtggcaaggacgaacgcctggtgaccgtgagattgcatccctgcccgcctcccgacttcttcaggccatgtcgacttctgcctacaaagaataatgtcagaagcgcttggtatcgcggtcagtcaccagccggagacggctcccctgagccaccaactccgcgctataacacatgggttctccaggacacagttctcgaaagccacctgcaactcttatccactatcctcagcagcgcacaggggctgaaggatggcgttgcccttttgaaggtctggcttagacaacgggaactggataaaggccagggtggatttacgggattccttgtgagcatgcttgtggtgtttctggtgtctactcgcaagattcacactacaatgtctggctatcaggtgttgcgttccgtactccagttcctggctaccaccgatctgactgtgaacggtatatcactgtgcttgtctagtgacccaagtctccccgcactggccgatttccatcaagccttctccgtggtcttcttggactcatctgggcacctgaatctgtgtgcagatgtgacagcgagcacctatcatcaggtgcaacacgaagcacgtctgtcaatgatgctgttagattctcgggcggatgacgggtttcatctgctgctcatgacccccaagcctatgatccgagcattcgaccatgtgctccacctgcggcctctcagccgactccaggcagcttgtcacaggcttaaactttggccggaattgcaagataacggtggcgactacgtgtcggctgccctcggacccctgaccacactcctggaacaaggtctcggcgctagactcaatctgttggctcacagccggccccctgtacccgagtgggacatttcacaggaccctcctaagcacaaggatagcggaaccctgacactggggctgctattgaggccagaaggactcacaagtgtgcttgagctggggccagaggccgaccagcctgaggccgccaaattcaggcagttttgggggagcagaagcgagcttaggcgattccaggatggggccattagggaggccgtggtgtgggaggcagcttctatgagccaaaaaaggctgatcccacaccaggtagtgactcatctcctggctttgcacgcggatatccctgagacctgtgtgcactatgtcggagggcctctcgacgccctgattcaaggtctgaaggagacatctagcactggagaggaagctttggtggctgctgtgaggtgttatgacgatctgagcaggctcctctggggcctcgagggtttacctctgacagtctccgccgtccagggcgcacaccccgtcttacgctacaccgaggtgttcccgccaactccagtgcgccccgcttttagcttctacgagacactccgcgaaaggagtagcctcctgcccaggcttgacaagccctgccctgcatacgtggaacctatgaccgtggtttgccatcttgaggggagtggtcagtggccccaggatgccgaggccgtacagcgtgtccgagcagccttccaactccgcctggccgaattgcttactcagcaacacggactccagtgccgggcaacagccacgcacactgacgtgttgaaggacggcttcgtcttcagaatcagagtggcctaccagagagagccacagatcttgaaggaagttcagagccccgaaggtatgatatcccttagggatactgctgcatctctccgtctcgaaagagacacacggcaactccccctgctgacttcggctctgcacggtctgcagcagcagcatcccgcattttcaggagtcgcccggctggcaaagaggtgggtacgagctcagctgctaggggaagggtttgccgacgaaagcctcgatctggtcgccgctgcccttttccttcatcctgagccatttacgcctccgtctagcccccaagtggggtttctgcgttttctgtttctggtctccactttcgactggaagaacaatcctctgtttgttaacttaaataacgagctgactgtggaggagcaggtcgagattagatccggcttcctggctgctagggcacaattgcccgtcatggtgattgtcaccccgcaggaccgcaagaacagcgtctggacccaggatggtccctcggcacaaattcttcagcaactggtggtacttgccgctgaagccctgccaatgctggagaagcagctgatggatcctaggggaccgggggatataaggacagtctttcgtcctcccctggacatttatgatgtgctgattagattaagtccgcgtcatatcccacgccacagacaagcggtcgatagccctgctgcatcattctgccggggactgctgtcccagccaggaccctcatccctcatgcctgtgctggggtacgaccctccccaactctacctcacccagctgagagaagctttcggcgatttagctctgtttttctacgaccagcacggcggagaggttattggagtcttgtggaagcctacttcttttcagccccaaccttttaaggctagtagtacaaagggccgaatggtgatgagtaggggaggcgagctggtaatggtcccaaatgtggaagctatcctcgaggattttgcagtcctcggggagggcctggtgcagacagttgaggcccgctcagagcgatggaccgtgtag

SEQ ID NO: 213669 - DNA, 3024 bp, Artificial Sequence
  derived and/or modified sequence
atgggcccagcaccagcaggtgaacaactgcgtggagccaccggggagcctgaggtcatggagccggcactagagggtacaggcaaggaaggtaaaaaagccagctcccgaaaacgcactcttgccgaaccaccagcgaagggtctgctccagccggtgaaactgtcacgtgccgaactgtacaaagagcctactaacgaagaattaaatcgcctgcgcgagaccgagattctgtttcactcgagcctactgaggcttcaggtagaggaactcctcaaggaagtccgactgtctgagaaaaagaaggataggatcgatgccttcctacgggaggtaaaccagcgggttgttagagtgccatctgttcccgaaaccgaattgacggaccaggcttggctgccagctggagttcgcgtaccactccatcaggtgccttatgccgtgaaggggtgctttaggttcctcccacctgctcaagtcacagtggtggggtcatacctcctcggtacctgcattagaccagatattaatgtagatgtggccttgaccatgccgcgggagatcttgcaggataaggacggactcaaccagagatactttagaaagcgggcactctacctggcacatctcgcccatcatctcgctcaggatcctctctttggctcagtgtgtttcagttacactaacggttgtcatctgaagccatctcttcttctgcgcccacggggaaaagacgagcgccttgtgacagtgaggctgcatccctgccccccaccagacttcttccggccttgtcgcttgctgcctacaaagaataatgtccggtccgcttggtacaggggccagagccccgctggtgacgggtctcccgaacctcctactccccgctacaatacctgggttctgcaggatacggtactcgaaagtcacctgcaacttcttagtaccatcctcagttcagcccagggcctgaaggacggcgtcgccctgttaaaagtgtggctgcgtcaaagagaacttgacaagggacagggtggctttacgggatttctggtgagcatgttagtggtcttcctggttagtactaggaaaatccacacaactatgtcaggttaccaagtgttgagaagcgtcctccagttcctggccaccaccgatttgacagtaaacggcatctccttgtgcctttctagcgacccaagtctgccggccttagctgattttcatcaggcattttccgtcgtattccttgacagctccggccacttgaacctgtgcgccgacgtaactgcttccacctatcaccaagtgcagcacgaagccaggctcagcatgatgctgctggatagcagagcggatgatggattccacttactcctgatgaccccaaaacccatgataagagccttcgaccatgtattacacctgcggcctctatctcgtcttcaggctgcttgccacaggcttaagttgtggccagaacttcaggacaatgggggcgattacgtttcagccgccctgggccctctaacgaccctgctagaacaaggcctgggcgcaagactgaatctcttagctcacagccgacctcctgtacccgaatgggacatttcgcaggacccgcctaagcacaaggactccggaacccttacactaggccttctcctgaggccagaaggtttaacatctgtcctcgagttgggaccggaggccgatcagcccgaggctgccaaatttagacagttctggggatctcggagcgagctgcgccgctttcaggatggtgccattagggaagcagtggtgtgggaggctgcctccatgagccaaaagagactgatcccgcatcaggtggtgactcaccttctggctctgcatgcagacattccagagacctgcgttcactacgttggcgggccgttggatgccctaatccaaggtctgaaggagacatcatcaactggagaggaagctctcgttgctgctgtgaggtgctatgatgatctgagtcgactcctgtgggggctggagggattgcctctgaccgtgtctgccgtacagggcgcccatcctgtccttcgttacaccgaggtgttccccccaactcctgtgaggcccgctttttctttttacgagactttgagagaaagatcctctctacttccaagactggataagccatgtcccgcctatgtagaaccaatgacagtggtgtgtcatttggaagggtctggacagtggccccaggacgctgaggctgttcagagagtcagagcggcatttcagctccggctggccgagctgctcacgcaacagcacggtctgcagtgcagggcaacagctacacatactgatgtgctgaaagatggattcgtgttcagaatacgagtcgcgtatcagcgggaacctcagatcctgaaagaagtccaatcacccgagggcatgattagccttcgggataccgcagcctcacttcgtctcgagagagacactagacagcttcctttgttgaccagcgctctccatggcctccagcagcagcatcctgctttcagcggagtcgctagactcgctaagagatgggtgcgcgctcagcttctgggagagggctttgccgatgagtccctggacctggtcgcagccgctctttttctgcacccggagccctttacgcctccatcaagcccccaggtgggtttcttgaggtttctgtttctggttagcacctttgactggaagaataaccccctcttcgtaaacctgaataatgagcttaccgttgaggaacaagtagagattcgcagcggattccttgctgctcgggcacagctgcccgtcatggtcattgtcacacctcaggacagaaagaacagtgtgtggacccaagatggcccatccgcccagatattgcagcagctggtcgtgctggccgccgaagctctgcccatgctggagaagcaactgatggatccacggggacccggagatattagatgggatcccgcgaagatgtggcccttctag

SEQ ID NO: 213670 - DNA, 603 bp, Artificial Sequence
  derived and/or modified sequence
atggtgattgtcacaccacaagaccgtaagaactcggtatggacgcaggatggccctagcgctcaaattctccagcaacttgtcgttctggcagccgaagctcttcccatgctggagaagcagctaatggatccccgaggaccaggggacatcagaaccgtgttccgtccgccgttagatatctacgatgtcctgattaggttatcgcctagacacatccccaggcacaggcaagccgtggacagccctgccgcctccttttgcagaggacttctgagtcagcccggcccgagctctctcatgccggtgctcggctatgaccccccccagctttacctgacacagcttagagaagcttttggcgatttggcactgttcttttatgaccagcacggtggggaagttattggtgtcctttggaaacccacaagcttccagcctcaaccgtttaaagcttcctccaccaagggacgtatggtgatgtccaggggtggcgaactcgtcatggtgccaaatgtggaagctatcctcgaggacttcgctgtgctaggagagggcctggtccagactgtcgaagcccgctccgagaggtggactgtgtag

SEQ ID NO: 213671 - DNA, 3072 bp, Artificial Sequence
  derived and/or modified sequence
atggggccagcaccggcaggtgaacaactgagaggagctacaggcgagcccgaggtcatggagcccgccctggaaggaacaggcaaggaaggaaaaaaagcatcaagcaggaagagaacactggctgaacctcccgccaagggtctgctgcaacccgtgaagctatctagagcagagctgtataaggagccgaccaacgaagagctgaataggctgagagaaacagaaatcctgtttcactctagtttattgcgcttgcaagtggaagaactcctcaaagaagtgcggctgtcagaaaaaaagaaggatcggatcgacgcttttctgcgggaggtgaaccagcgggtcgtgagagtgccatctgtgcctgagacggagctcaccgaccaagcatggctccccgcgggagtgcgcgtcccgctccaccaagttccatatgccgtcaaggggtgtttccggtttcttcctcctgcccaagtcacagtggttggctcatacctgctgggcacctgtatacgacctgacataaacgtcgatgtcgccctgacaatgcctcgggaaattcttcaggataaggatggcctgaatcagcgatactttagaaaacgagctttatacctggcccacctcgctcaccatctcgcccaggaccctctattcggcagcgtctgcttttcttacaccaatggctgtcacctcaagccttccctgctgctgagaccacgtgggaaggatgaacggctggtcacagtccgcctgcatccatgcccaccacccgacttcttccgaccctgtcgactgctgcctaccaagaacaatgtgcggtctgcttggtaccggggtcagagtcccgctggtgacggatcgccagagcctccaacccctcggtataatacgtgggtcctgcaggacactgtgttagagagtcacttgcagttgctgtctaccatcctcagctcagcgcagggtcttaaagatggagtggcactactgaaggtgtggctcaggcagagggagctagacaaagggcagggcggtttcactggctttcttgtgtctatgttggtagttttcttagtgagcactcgtaagattcacaccacgatgtcgggctatcaggttctgaggtcggttctgcagttcctcgcaacaactgacctgactgtgaatggcatcagcctttgcttaagctccgatccttcgctcccagccttggccgatttccaccaggcattcagcgttgtgttcctggacagctctgggcacctcaacctttgcgccgacgttactgcctctacctaccaccaggtgcagcacgaagctcggctttcgatgatgctcctggacagtcgggctgacgacgggtttcatctcctgctgatgacccccaagcccatgatccgggcctttgaccatgtgttacatcttaggcccctgtcaagactgcaggccgcgtgccacaggctgaaactttggcctgagctccaggacaacggcggggactatgtgtctgcagccctgggcccgttgactaccctgttggagcaaggccttggtgcccgcctgaacctcctggcacatagccgtccacctgttcctgagtgggatattagtcaggaccctccaaaacataaggactccggaactctcaccctgggcctcctcctgagacccgaaggactcactagcgtgctcgagctcggccccgaagctgatcaacctgaagccgccaaatttaggcagttttggggatcacgctccgagttaagacggttccaggatggcgcaatcagggaggcagttgtgtgggaagcagcctcgatgtcgcagaagcgcttaattcctcaccaagtggttactcacctcctcgccctgcatgcagatatccctgagacttgtgtgcattacgtcggcggtccgttggacgctctgatccaaggcctgaaagaaacatcctcaactggagaggaagcactcgtagctgccgtaaggtgttacgacgacctcagccggctgctgtggggcctcgaagggcttcctctgaccgtgagtgccgtgcagggtgctcacccagtgctgaggtacacagaggttttcccccccaccccagtgcgtccagctttctctttttacgagaccctgcgggaacggagcagcttgctcccaaggttggataaaccttgcccagcatatgtggagcccatgaccgtggtctgccatctggagggaagtggccaatggccacaggatgcggaggccgtacagcgcgtgcgggctgcatttcaattacgacttgccgaattgcttacccagcaacatgggcttcagtgtcgggctactgccacccacaccgacgtgctcaaagatggtttcgtgttcagaatcagggtcgcctaccaaagagaacctcagatccttaaggaggtgcaatcacccgaagggatgatttctctcagggacaccgctgctagtttgcgccttgagagagatacgagacagttgcccttgttaacgagcgctttgcacggcctgcagcagcagcaccccgcattctccggcgttgctcgactcgccaaaaggtgggtgcgtgcacagctactgggcgagggcttcgccgatgagagtctggacctggtagcagctgcactctttctgcacccagagccattcacccccccatcctcaccccaggtgggcttcctgcgcttcctctttttagtgtctaccttcgactggaagaataacccactgttcgtaaatcttaataacgagctgactgtcgaggagcaggtcgaaatacgcagtgggtttctggccgcccgtgcccagctgccggtgatggtgatcgtcacgcctcaggacagaaaaaactccgtgtggactcaggatggaccgagtgctcaaatcctgcaacagctcgtagtcttggcagccgaggcccttcctatgctcgaaaagcagttgatggatccacgcggaccaggggacattcggatgggcccctccgagaacgtggcgctccttagccacataacggataccgagcaatggaaaggggctatctgcgtgtag

SEQ ID NO: 213672 - DNA, 3285 bp, Artificial Sequence
  derived and/or modified sequence
atgggaccagcacccgcgggggagcagctgcgtggagcgacaggtgaacccgaggtgatggagcctgccctcgaaggcaccggaaaggaagggaagaaggctagttcccgcaagcgcaccctcgctgagccgccggccaagggacttcttcagccagtgaaactcagtagagcagagttgtacaaggaacccactaacgaagaactcaatcgcttacgcgagacagaaatcctgttccattctagcttgctgagactgcaagtcgaggaactgctgaaagaagtgcgtttgtctgagaaaaagaaagaccgcatagatgcattcctgcgggaggtgaaccaacgggtggtgcgtgtgccgtccgttcccgaaaccgaggagatcctgcaggacaaggatggacttaaccaaagatactttcgcaagcgggcactgtatctcgcccacttagcacaccatctggcccaggaccctctgtttggctctgtttgcttttcctatactaacggttgtcacttgaaacccagcctgttactccggccacgcgggaaagacgaaaggctagtaaccgtgagattgcacccctgtccgccccctgatttcttcagaccatgccggttactgcctactaagaacaacgtgcggagcgcctggtatagagggcaatcacccgcgggggacggaagtccggagccacccactccccgatacaatacctgggtgctgcaagacacagtgctggagtcacatctgcagctgttaagcacgatcttatcgagtgcccaaggattgaaggacggagtggcactgctgaaggtttggctgaggcaaagggagttagacaaagggcagggaggtttcacaggatttcttgtcagcatgctcgtggtgttcctcgtctcaacacggaagatacacacgacaatgtcggggtaccaggtgctgcgctctgtactccagttcttggccacgacagaccttaccgttaatggtattagtctctgtctcagcagtgatccttctcttccagccctggctgatttccaccaggcattcagcgtcgtctttctggattcttctggtcatttgaatttgtgtgctgacgtgaccgcctcaacctaccatcaggggtggagccttctgtggttgcaagtccagcacgaggctcgcttgagcatgatgctcctagattcaagagccgatgacggttttcacctgctgctgatgacaccaaagccaatgattagggcttttgaccatgtgctgcaccttcgtccattatcaaggctgcaagccgcttgtcacaggctgaaactctggcctgagttgcaggataatggcggggattacgtcagtgctgcactggggccgcttacaaccctgctcgaacagggcctgggggctcggttgaacttgttagctcactcccgcccgccagtccctgagtgggatatctcacaggaccctcctaaacacaaagatagtggaacccttacgctaggcctgcttctacggccggagggtctgacaagtgttctggaactgggacctgaagctgatcagccggaagcggctaagttcagacagttctggggctccaggtcagagcttagaagatttcaagatggggcaatcagggaggcagtagtgtgggaggcagcatcaatgtcccagaaacgtcttatcccccatcaagtcgtgacccacttactggcgcttcatgcagatattcctgagacctgtgtgcactatgtcggtgggcctctcgacgctctcattcagggattaaaagagactagttccaccggagaagaggctttggtggccgccgtcaggtgctacgacgatttgtcccgcctcctttggggcctggaagggttacctcttaccgtgtccgccgtgcaaggcgctcatcctgtgctgagatataccgaagtgttccctccgaccccagtgagaccagccttctctttttacgaaaccctgcgggaacggtcctctctcctgccaagactcgacaagccttgtcctgcatatgtagagcctatgacagtcgtttgtcatctcgagggaagtggccagtggccccaggacgccgaagccgttcagcgggttcgagcagctttccagttgagattagccgagctgctgacacagcagcacgggctgcagtgccgagcaactgccactcatacggacgttcttaaggacggcttcgtgttccgcatccgtgttgcctatcaaagagagccacagatcctgaaggaagtccaatcgccagaaggaatgatctcgttaagggatacagcggcttctttgagactagagagagataccagacagctgccgctgttaactagcgctctccacggccttcagcaacagcatcccgcattttctggggtcgcgcgcctggcaaaaagatgggtgagagcccaacttttgggagaagggtttgcagacgagagtctggacctcgtcgccgctgccctgttcttacaccccgagccatttacaccaccttcaagcccccaggtgggattcctcagattcctcttcctggttagtacctttgattggaagaacaatccactgtttgtgaacctgaataatgagctcacggttgaggagcaagtcgaaatccgctcaggatttttggccgccagagcgcagcttcctgtcatggtgatcgtgactccacaggatcggaaaaactctgtgtggacgcaggatgggccctcagcccaaatacttcagcagttggttgttctcgctgcagaggctctgccaatgcttgagaagcagctgatggatcccagagggcccggagatattagaacagtgtttcgtcctccactagatatttacgatgttctgatccgactgtcaccgcgtcacatccctcgacaccggcaggctgtggacagtccagctgccagcttttgtcgaggactgttgtcccagcccggacctagctcactgatgccagtgttgggctacgacccaccccaattgtacctgacccaactgagggaagccttcggagatctcgcccttttcttttacgatcagcatggtggtgaagtgatcggagttctgtggaagcctacctcttttcagcctcagcccttcaaggcttcttccactaaaggccgcatggtaatgtcccgaggcggcgaacttgttatggttcctaatgtggaggctatactggaagacttcgctgtcctcggagaggggctggttcagacagtggaagcaagaagcgagcggtggacggtatag

SEQ ID NO: 213673 - DNA, 2109 bp, Artificial Sequence
  derived and/or modified sequence
atgatgctactagatagccgcgctgatgatggattccacttgttgctcatgactccgaaaccgatgattagggcctttgatcatgtgttgcacctgcgcccattatcccggttgcaggctgcgtgccataggctgaaattgtggcctgagctgcaggacaatggaggagactatgtgagcgccgcgcttgggcctctcaccaccttgctggaacagggcctgggcgctcggctcaatctcctcgcccactcccgcccccctgtgccagagtgggatatctcccaggacccacccaagcataaagacagcggcactctgacattaggcttgcttctaaggcctgagggccttacatccgttctcgaactgggcccagaggccgaccagccagaagcagctaaattcagacagttctggggaagccggtccgagctcaggcggttccaggatggggccattcgagaagctgtggtctgggaagccgccagcatgtctcagaaaaggctgattccacaccaggtggttacacacctgctggctttgcacgctgatatccccgaaacatgtgtgcactacgttggaggcccactagatgcgctaatacaggggctgaaggagacttcttctacaggagaggaggcactagtggctgccgtgcgctgttacgacgacctttcacggttgctttggggactagaggggctgcccctcaccgtgtccgctgttcaaggggcccatccagtgctgcgctacactgaggtgttcccacccaccccagtacggccagcgttttctttttacgagaccctgagggagcgctcctccttgctgccccggcttgataagccttgccctgcatacgtagaacccatgaccgtcgtgtgtcatctggaggggtccggacagtggcctcaagacgcggaagccgtgcagcgtgtgcgcgccgcctttcagctgcggctggcggagttactcacacaacaacacggattgcaatgccgggcgaccgcaactcacaccgatgtgctgaaagacgggttcgtgttcaggatcagagtagcctaccagcgggagccccaaatactcaaagaggtgcagagcccggaggggatgatttcgcttcgcgataccgccgcaagcctccggctcgagagggacactcggcagttaccactgctgacttccgccctccatggtctccagcagcaacatcccgcttttagcggtgttgcccgcctcgctaagcgctgggtgagagctcagctgctcggcgagggcttcgctgatgaatcactcgatctagttgcggctgcattgttcttgcacccagaacctttcacacctcctagcagtccacaggtaggctttttaaggtttctttttttagtctctacattcgattggaaaaataaccccttgttcgtgaacttaaacaatgagctgaccgtggaggaacaggtggaaatcagatcaggcttcctggctgctcgagcacagctgcccgtgatggtcatagtcacaccccaggataggaaaaactccgtgtggacccaggacgggccatccgcgcagatcctgcagcaactggtggtgctggccgcagaagcattacctatgcttgagaaacagctcatggatcccagaggacctggagacatccggaccgttttcagaccaccactcgatatatatgatgtgctcattcggctgtccccacgacacattccacgccacaggcaggccgtagactctcccgccgcctccttctgccggggattactgtcacagccaggtccttcctccttgatgccggtcttaggatacgatcccccccagctatatttgacgcaactgagggaggcgttcggtgatctcgcgctttttttctatgaccagcacgggggtgaggtcattggtgtgctgtggaaaccgacatcttttcaaccgcagccattcaaggcctcctcaactaaagggagaatggtgatgtctcgcgggggagaacttgtcatggttcctaacgtggaggccattcttgaggactttgcagtgctgggcgaaggtttggtccagaccgtggaggctcggagcgaacgatggaccgtgtag

SEQ ID NO: 213674 - DNA, 3441 bp, Artificial Sequence
  derived and/or modified sequence
atgggccctgccccagctggggagcagctgcggggggccaccggggagcctgaggtgatggagcccgccctggagggcaccgggaaggagggcaagaaggccagcagcaggaagaggaccctggccgagcccccagccaagggcctgctgcagcctgtgaagctgagcagagctgagctgtacaaggagcccaccaatgaggagctgaaccggctgcgggagacagagatcctcttccacagcagcctgctgcggctgcaggtggaggagctgctgaaggaggtgcggctgtctgagaagaagaaggacagaattgatgccttcctgcgggaggtgaaccagagggtggtgcgggtgcccagcgtgcctgagacagagctgacagaccaggcctggctgcctgctggggtgcgggtgcccctgcaccaggtgccctatgctgtgaagggctgcttccgcttcctgcccccagcccaggtgacagtggtgggcagctacctgctgggcacctgcatccggccagacatcaacgtggatgtggccctgaccatgccccgggagatcctgcaggacaaggatggcctgaaccagcgctacttcaggaagagggccctgtacctggcccacctggcccaccacctggcccaggaccccctgtttggatctgtgtgcttctcctacaccaacggctgccacctgaagcccagcctgctgctgcggccccggggcaaggatgagcggctggtgacagtgcggctgcacccctgccccccaccagacttcttccggccctgccgcctgctgcccaccaagaacaacgtgcgcagcgcctggtaccggggccagagccctgctggagatggcagccctgagccccccaccccccgctacaacacctgggtgctgcaggacacagtgctggagagccacctgcagctgctgagcaccatcctgagcagcgcccagggcctgaaggatggagtggccctgctgaaggtgtggctgcggcagcgggagctggacaagggccagggcggcttcaccggcttcctggtgtccatgctggtggtgttcctggtgtccaccaggaagatccacaccaccatgagcggctaccaggtgctgcggtctgtgctgcagttcctggccaccacagacctgactgtgaatggcatcagcctgtgcctgagcagtgaccccagcctgcctgccctggccgacttccaccaggccttctctgtggtgttcctggacagcagcggccacctgaacctgtgtgctgatgtgacagccagcacctaccaccaggtgcagcacgaggcccggctgtccatgatgctgctggacagcagagcagatgatggcttccacctgctgctgatgacccccaagcccatgatccgggcctttgaccacgtgctgcacctgcggcccctgagccggctgcaggccgcctgccaccggctgaagctgtggccagagctgcaggacaatggaggagactatgtgtctgctgccctgggccccctgaccaccctgctggagcagggcctgggcgcccggctgaacctgctggcccacagccggccccctgtgcctgagtgggacatcagccaggacccccccaagcacaaggacagcggcaccctgaccctgggcctgctgctgcggcctgagggcctgacctctgtgctggagctgggccctgaggccgaccagcctgaggccgccaagttccggcagttctggggcagccgctctgagctgcggcgcttccaggatggagccatccgggaggccgtggtgtgggaggccgcctccatgagccagaagaggctcatcccccaccaggtggtgacccacctgctggccctgcatgctgacatccctgagacctgtgtgcactacgtgggcggccccctggatgccctgatccagggcctgaaggagaccagcagcactggagaggaggccctggtggccgctgtgcgctgctatgatgacctgagccggctgctgtggggcctggagggcctgcccctgactgtgtctgctgtgcagggcgcccaccctgtgctgcgctacacagaggtgttcccccccacccctgtgcggcctgccttctccttctatgagaccctgcgggagaggagcagcctgctgccccggctggacaagccctgcccagcctacgtggagcccatgacagtggtgtgccacctggagggcagcggccagtggccccaggatgctgaggccgtgcagagggtgcgggccgccttccagctgcggctggccgagctgctgacccagcagcacggcctgcagtgccgggccacagccacccacacagatgtgctgaaggatggctttgtgttccgcatccgggtggcctaccagcgggagccccagatcctgaaggaggtgcagagccctgagggcatgatcagcctgcgggacacagctgccagcctgcggctggagcgggacacccggcagctgcccctgctgaccagcgccctgcacggcctgcagcagcagcacccagccttcagcggcgtggcccggctggccaagcgctgggtgcgggcccagctgctgggggagggctttgctgatgagagcctggacctggtggccgccgccctcttcctgcaccctgagcccttcaccccacccagcagcccccaggtgggcttcctgcgcttcctgttcctggtgtccacctttgactggaagaacaaccccctgtttgtgaacctgaacaatgagctgactgtggaggagcaggtggagatccgcagcggcttcctggccgcccgggcccagctgcctgtgatggtgattgtgaccccccaggacaggaagaacagcgtgtggacccaggacggccccagcgcccagatcctgcagcagctggtggtgctggccgctgaggccctgcccatgctggagaagcagctgatggacccccggggccctggggacatcagaacagtgttccggccccccctggacatctatgatgtgctgatccggctgagccccaggcacatccccaggcaccggcaggccgtggacagccctgctgccagcttctgccggggcctgctgagccagcccggccccagcagcctgatgcctgtgctgggctatgaccccccccagctgtacctgacccagctgcgggaggccttcggggacctggccctcttcttctatgaccagcacggcggggaggtgattggagtgctgtggaagcccaccagcttccagccccagcccttcaaggccagcagcaccaagggccgcatggtgatgagccggggcggggagctggtgatggtgcccaacgtggaggccatcctggaggactttgctgtgctgggggagggcctggtgcagacagtggaggcccggtctgagcgctggacagtgtag

SEQ ID NO: 213675 - DNA, 3024 bp, Artificial Sequence
  derived and/or modified sequence
atgggccctgccccagctggggagcagctgcggggggccaccggggagcctgaggtgatggagcccgccctggagggcaccgggaaggagggcaagaaggccagcagcaggaagaggaccctggccgagcccccagccaagggcctgctgcagcctgtgaagctgagcagagctgagctgtacaaggagcccaccaatgaggagctgaaccggctgcgggagacagagatcctcttccacagcagcctgctgcggctgcaggtggaggagctgctgaaggaggtgcggctgtctgagaagaagaaggacagaattgatgccttcctgcgggaggtgaaccagagggtggtgcgggtgcccagcgtgcctgagacagagctgacagaccaggcctggctgcctgctggggtgcgggtgcccctgcaccaggtgccctatgctgtgaagggctgcttccgcttcctgcccccagcccaggtgacagtggtgggcagctacctgctgggcacctgcatccggccagacatcaacgtggatgtggccctgaccatgccccgggagatcctgcaggacaaggatggcctgaaccagcgctacttcaggaagagggccctgtacctggcccacctggcccaccacctggcccaggaccccctgtttggatctgtgtgcttctcctacaccaacggctgccacctgaagcccagcctgctgctgcggccccggggcaaggatgagcggctggtgacagtgcggctgcacccctgccccccaccagacttcttccggccctgccgcctgctgcccaccaagaacaacgtgcgcagcgcctggtaccggggccagagccctgctggagatggcagccctgagccccccaccccccgctacaacacctgggtgctgcaggacacagtgctggagagccacctgcagctgctgagcaccatcctgagcagcgcccagggcctgaaggatggagtggccctgctgaaggtgtggctgcggcagcgggagctggacaagggccagggcggcttcaccggcttcctggtgtccatgctggtggtgttcctggtgtccaccaggaagatccacaccaccatgagcggctaccaggtgctgcggtctgtgctgcagttcctggccaccacagacctgactgtgaatggcatcagcctgtgcctgagcagtgaccccagcctgcctgccctggccgacttccaccaggccttctctgtggtgttcctggacagcagcggccacctgaacctgtgtgctgatgtgacagccagcacctaccaccaggtgcagcacgaggcccggctgtccatgatgctgctggacagcagagcagatgatggcttccacctgctgctgatgacccccaagcccatgatccgggcctttgaccacgtgctgcacctgcggcccctgagccggctgcaggccgcctgccaccggctgaagctgtggccagagctgcaggacaatggaggagactatgtgtctgctgccctgggccccctgaccaccctgctggagcagggcctgggcgcccggctgaacctgctggcccacagccggccccctgtgcctgagtgggacatcagccaggacccccccaagcacaaggacagcggcaccctgaccctgggcctgctgctgcggcctgagggcctgacctctgtgctggagctgggccctgaggccgaccagcctgaggccgccaagttccggcagttctggggcagccgctctgagctgcggcgcttccaggatggagccatccgggaggccgtggtgtgggaggccgcctccatgagccagaagaggctcatcccccaccaggtggtgacccacctgctggccctgcatgctgacatccctgagacctgtgtgcactacgtgggcggccccctggatgccctgatccagggcctgaaggagaccagcagcactggagaggaggccctggtggccgctgtgcgctgctatgatgacctgagccggctgctgtggggcctggagggcctgcccctgactgtgtctgctgtgcagggcgcccaccctgtgctgcgctacacagaggtgttcccccccacccctgtgcggcctgccttctccttctatgagaccctgcgggagaggagcagcctgctgccccggctggacaagccctgcccagcctacgtggagcccatgacagtggtgtgccacctggagggcagcggccagtggccccaggatgctgaggccgtgcagagggtgcgggccgccttccagctgcggctggccgagctgctgacccagcagcacggcctgcagtgccgggccacagccacccacacagatgtgctgaaggatggctttgtgttccgcatccgggtggcctaccagcgggagccccagatcctgaaggaggtgcagagccctgagggcatgatcagcctgcgggacacagctgccagcctgcggctggagcgggacacccggcagctgcccctgctgaccagcgccctgcacggcctgcagcagcagcacccagccttcagcggcgtggcccggctggccaagcgctgggtgcgggcccagctgctgggggagggctttgctgatgagagcctggacctggtggccgccgccctcttcctgcaccctgagcccttcaccccacccagcagcccccaggtgggcttcctgcgcttcctgttcctggtgtccacctttgactggaagaacaaccccctgtttgtgaacctgaacaatgagctgactgtggaggagcaggtggagatccgcagcggcttcctggccgcccgggcccagctgcctgtgatggtgattgtgaccccccaggacaggaagaacagcgtgtggacccaggacggccccagcgcccagatcctgcagcagctggtggtgctggccgctgaggccctgcccatgctggagaagcagctgatggacccccggggccctggggacatccgctgggaccctgccaagatgtggcccttctag

SEQ ID NO: 213676 - DNA, 603 bp, Artificial Sequence
  derived and/or modified sequence
atggtgattgtgaccccccaggacaggaagaacagcgtgtggacccaggacggccccagcgcccagatcctgcagcagctggtggtgctggccgctgaggccctgcccatgctggagaagcagctgatggacccccggggccctggggacatcagaacagtgttccggccccccctggacatctatgatgtgctgatccggctgagccccaggcacatccccaggcaccggcaggccgtggacagccctgctgccagcttctgccggggcctgctgagccagcccggccccagcagcctgatgcctgtgctgggctatgaccccccccagctgtacctgacccagctgcgggaggccttcggggacctggccctcttcttctatgaccagcacggcggggaggtgattggagtgctgtggaagcccaccagcttccagccccagcccttcaaggccagcagcaccaagggccgcatggtgatgagccggggcggggagctggtgatggtgcccaacgtggaggccatcctggaggactttgctgtgctgggggagggcctggtgcagacagtggaggcccggtctgagcgctggacagtgtag

SEQ ID NO: 213677 - DNA, 3072 bp, Artificial Sequence
  derived and/or modified sequence
atgggccctgccccagctggggagcagctgcggggggccaccggggagcctgaggtgatggagcccgccctggagggcaccgggaaggagggcaagaaggccagcagcaggaagaggaccctggccgagcccccagccaagggcctgctgcagcctgtgaagctgagcagagctgagctgtacaaggagcccaccaatgaggagctgaaccggctgcgggagacagagatcctcttccacagcagcctgctgcggctgcaggtggaggagctgctgaaggaggtgcggctgtctgagaagaagaaggacagaattgatgccttcctgcgggaggtgaaccagagggtggtgcgggtgcccagcgtgcctgagacagagctgacagaccaggcctggctgcctgctggggtgcgggtgcccctgcaccaggtgccctatgctgtgaagggctgcttccgcttcctgcccccagcccaggtgacagtggtgggcagctacctgctgggcacctgcatccggccagacatcaacgtggatgtggccctgaccatgccccgggagatcctgcaggacaaggatggcctgaaccagcgctacttcaggaagagggccctgtacctggcccacctggcccaccacctggcccaggaccccctgtttggatctgtgtgcttctcctacaccaacggctgccacctgaagcccagcctgctgctgcggccccggggcaaggatgagcggctggtgacagtgcggctgcacccctgccccccaccagacttcttccggccctgccgcctgctgcccaccaagaacaacgtgcgcagcgcctggtaccggggccagagccctgctggagatggcagccctgagccccccaccccccgctacaacacctgggtgctgcaggacacagtgctggagagccacctgcagctgctgagcaccatcctgagcagcgcccagggcctgaaggatggagtggccctgctgaaggtgtggctgcggcagcgggagctggacaagggccagggcggcttcaccggcttcctggtgtccatgctggtggtgttcctggtgtccaccaggaagatccacaccaccatgagcggctaccaggtgctgcggtctgtgctgcagttcctggccaccacagacctgactgtgaatggcatcagcctgtgcctgagcagtgaccccagcctgcctgccctggccgacttccaccaggccttctctgtggtgttcctggacagcagcggccacctgaacctgtgtgctgatgtgacagccagcacctaccaccaggtgcagcacgaggcccggctgtccatgatgctgctggacagcagagcagatgatggcttccacctgctgctgatgacccccaagcccatgatccgggcctttgaccacgtgctgcacctgcggcccctgagccggctgcaggccgcctgccaccggctgaagctgtggccagagctgcaggacaatggaggagactatgtgtctgctgccctgggccccctgaccaccctgctggagcagggcctgggcgcccggctgaacctgctggcccacagccggccccctgtgcctgagtgggacatcagccaggacccccccaagcacaaggacagcggcaccctgaccctgggcctgctgctgcggcctgagggcctgacctctgtgctggagctgggccctgaggccgaccagcctgaggccgccaagttccggcagttctggggcagccgctctgagctgcggcgcttccaggatggagccatccgggaggccgtggtgtgggaggccgcctccatgagccagaagaggctcatcccccaccaggtggtgacccacctgctggccctgcatgctgacatccctgagacctgtgtgcactacgtgggcggccccctggatgccctgatccagggcctgaaggagaccagcagcactggagaggaggccctggtggccgctgtgcgctgctatgatgacctgagccggctgctgtggggcctggagggcctgcccctgactgtgtctgctgtgcagggcgcccaccctgtgctgcgctacacagaggtgttcccccccacccctgtgcggcctgccttctccttctatgagaccctgcgggagaggagcagcctgctgccccggctggacaagccctgcccagcctacgtggagcccatgacagtggtgtgccacctggagggcagcggccagtggccccaggatgctgaggccgtgcagagggtgcgggccgccttccagctgcggctggccgagctgctgacccagcagcacggcctgcagtgccgggccacagccacccacacagatgtgctgaaggatggctttgtgttccgcatccgggtggcctaccagcgggagccccagatcctgaaggaggtgcagagccctgagggcatgatcagcctgcgggacacagctgccagcctgcggctggagcgggacacccggcagctgcccctgctgaccagcgccctgcacggcctgcagcagcagcacccagccttcagcggcgtggcccggctggccaagcgctgggtgcgggcccagctgctgggggagggctttgctgatgagagcctggacctggtggccgccgccctcttcctgcaccctgagcccttcaccccacccagcagcccccaggtgggcttcctgcgcttcctgttcctggtgtccacctttgactggaagaacaaccccctgtttgtgaacctgaacaatgagctgactgtggaggagcaggtggagatccgcagcggcttcctggccgcccgggcccagctgcctgtgatggtgattgtgaccccccaggacaggaagaacagcgtgtggacccaggacggccccagcgcccagatcctgcagcagctggtggtgctggccgctgaggccctgcccatgctggagaagcagctgatggacccccggggccctggggacatccgcatgggccccagtgaaaatgtggccctgctgagccacatcacagacacagagcagtggaagggggccatctgtgtgtag

SEQ ID NO: 213678 - DNA, 3285 bp, Artificial Sequence
  derived and/or modified sequence
atgggccctgccccagctggggagcagctgcggggggccaccggggagcctgaggtgatggagcccgccctggagggcaccgggaaggagggcaagaaggccagcagcaggaagaggaccctggccgagcccccagccaagggcctgctgcagcctgtgaagctgagcagagctgagctgtacaaggagcccaccaatgaggagctgaaccggctgcgggagacagagatcctcttccacagcagcctgctgcggctgcaggtggaggagctgctgaaggaggtgcggctgtctgagaagaagaaggacagaattgatgccttcctgcgggaggtgaaccagagggtggtgcgggtgcccagcgtgcctgagacagaggagatcctgcaggacaaggatggcctgaaccagcgctacttcaggaagagggccctgtacctggcccacctggcccaccacctggcccaggaccccctgtttggatctgtgtgcttctcctacaccaacggctgccacctgaagcccagcctgctgctgcggccccggggcaaggatgagcggctggtgacagtgcggctgcacccctgccccccaccagacttcttccggccctgccgcctgctgcccaccaagaacaacgtgcgcagcgcctggtaccggggccagagccctgctggagatggcagccctgagccccccaccccccgctacaacacctgggtgctgcaggacacagtgctggagagccacctgcagctgctgagcaccatcctgagcagcgcccagggcctgaaggatggagtggccctgctgaaggtgtggctgcggcagcgggagctggacaagggccagggcggcttcaccggcttcctggtgtccatgctggtggtgttcctggtgtccaccaggaagatccacaccaccatgagcggctaccaggtgctgcggtctgtgctgcagttcctggccaccacagacctgactgtgaatggcatcagcctgtgcctgagcagtgaccccagcctgcctgccctggccgacttccaccaggccttctctgtggtgttcctggacagcagcggccacctgaacctgtgtgctgatgtgacagccagcacctaccaccagggctggagcctgctgtggctgcaggtgcagcacgaggcccggctgtccatgatgctgctggacagcagagcagatgatggcttccacctgctgctgatgacccccaagcccatgatccgggcctttgaccacgtgctgcacctgcggcccctgagccggctgcaggccgcctgccaccggctgaagctgtggccagagctgcaggacaatggaggagactatgtgtctgctgccctgggccccctgaccaccctgctggagcagggcctgggcgcccggctgaacctgctggcccacagccggccccctgtgcctgagtgggacatcagccaggacccccccaagcacaaggacagcggcaccctgaccctgggcctgctgctgcggcctgagggcctgacctctgtgctggagctgggccctgaggccgaccagcctgaggccgccaagttccggcagttctggggcagccgctctgagctgcggcgcttccaggatggagccatccgggaggccgtggtgtgggaggccgcctccatgagccagaagaggctcatcccccaccaggtggtgacccacctgctggccctgcatgctgacatccctgagacctgtgtgcactacgtgggcggccccctggatgccctgatccagggcctgaaggagaccagcagcactggagaggaggccctggtggccgctgtgcgctgctatgatgacctgagccggctgctgtggggcctggagggcctgcccctgactgtgtctgctgtgcagggcgcccaccctgtgctgcgctacacagaggtgttcccccccacccctgtgcggcctgccttctccttctatgagaccctgcgggagaggagcagcctgctgccccggctggacaagccctgcccagcctacgtggagcccatgacagtggtgtgccacctggagggcagcggccagtggccccaggatgctgaggccgtgcagagggtgcgggccgccttccagctgcggctggccgagctgctgacccagcagcacggcctgcagtgccgggccacagccacccacacagatgtgctgaaggatggctttgtgttccgcatccgggtggcctaccagcgggagccccagatcctgaaggaggtgcagagccctgagggcatgatcagcctgcgggacacagctgccagcctgcggctggagcgggacacccggcagctgcccctgctgaccagcgccctgcacggcctgcagcagcagcacccagccttcagcggcgtggcccggctggccaagcgctgggtgcgggcccagctgctgggggagggctttgctgatgagagcctggacctggtggccgccgccctcttcctgcaccctgagcccttcaccccacccagcagcccccaggtgggcttcctgcgcttcctgttcctggtgtccacctttgactggaagaacaaccccctgtttgtgaacctgaacaatgagctgactgtggaggagcaggtggagatccgcagcggcttcctggccgcccgggcccagctgcctgtgatggtgattgtgaccccccaggacaggaagaacagcgtgtggacccaggacggccccagcgcccagatcctgcagcagctggtggtgctggccgctgaggccctgcccatgctggagaagcagctgatggacccccggggccctggggacatcagaacagtgttccggccccccctggacatctatgatgtgctgatccggctgagccccaggcacatccccaggcaccggcaggccgtggacagccctgctgccagcttctgccggggcctgctgagccagcccggccccagcagcctgatgcctgtgctgggctatgaccccccccagctgtacctgacccagctgcgggaggccttcggggacctggccctcttcttctatgaccagcacggcggggaggtgattggagtgctgtggaagcccaccagcttccagccccagcccttcaaggccagcagcaccaagggccgcatggtgatgagccggggcggggagctggtgatggtgcccaacgtggaggccatcctggaggactttgctgtgctgggggagggcctggtgcagacagtggaggcccggtctgagcgctggacagtgtag

SEQ ID NO: 213679 - DNA, 2109 bp, Artificial Sequence
  derived and/or modified sequence
atgatgctgctggacagcagagcagatgatggcttccacctgctgctgatgacccccaagcccatgatccgggcctttgaccacgtgctgcacctgcggcccctgagccggctgcaggccgcctgccaccggctgaagctgtggccagagctgcaggacaatggaggagactatgtgtctgctgccctgggccccctgaccaccctgctggagcagggcctgggcgcccggctgaacctgctggcccacagccggccccctgtgcctgagtgggacatcagccaggacccccccaagcacaaggacagcggcaccctgaccctgggcctgctgctgcggcctgagggcctgacctctgtgctggagctgggccctgaggccgaccagcctgaggccgccaagttccggcagttctggggcagccgctctgagctgcggcgcttccaggatggagccatccgggaggccgtggtgtgggaggccgcctccatgagccagaagaggctcatcccccaccaggtggtgacccacctgctggccctgcatgctgacatccctgagacctgtgtgcactacgtgggcggccccctggatgccctgatccagggcctgaaggagaccagcagcactggagaggaggccctggtggccgctgtgcgctgctatgatgacctgagccggctgctgtggggcctggagggcctgcccctgactgtgtctgctgtgcagggcgcccaccctgtgctgcgctacacagaggtgttcccccccacccctgtgcggcctgccttctccttctatgagaccctgcgggagaggagcagcctgctgccccggctggacaagccctgcccagcctacgtggagcccatgacagtggtgtgccacctggagggcagcggccagtggccccaggatgctgaggccgtgcagagggtgcgggccgccttccagctgcggctggccgagctgctgacccagcagcacggcctgcagtgccgggccacagccacccacacagatgtgctgaaggatggctttgtgttccgcatccgggtggcctaccagcgggagccccagatcctgaaggaggtgcagagccctgagggcatgatcagcctgcgggacacagctgccagcctgcggctggagcgggacacccggcagctgcccctgctgaccagcgccctgcacggcctgcagcagcagcacccagccttcagcggcgtggcccggctggccaagcgctgggtgcgggcccagctgctgggggagggctttgctgatgagagcctggacctggtggccgccgccctcttcctgcaccctgagcccttcaccccacccagcagcccccaggtgggcttcctgcgcttcctgttcctggtgtccacctttgactggaagaacaaccccctgtttgtgaacctgaacaatgagctgactgtggaggagcaggtggagatccgcagcggcttcctggccgcccgggcccagctgcctgtgatggtgattgtgaccccccaggacaggaagaacagcgtgtggacccaggacggccccagcgcccagatcctgcagcagctggtggtgctggccgctgaggccctgcccatgctggagaagcagctgatggacccccggggccctggggacatcagaacagtgttccggccccccctggacatctatgatgtgctgatccggctgagccccaggcacatccccaggcaccggcaggccgtggacagccctgctgccagcttctgccggggcctgctgagccagcccggccccagcagcctgatgcctgtgctgggctatgaccccccccagctgtacctgacccagctgcgggaggccttcggggacctggccctcttcttctatgaccagcacggcggggaggtgattggagtgctgtggaagcccaccagcttccagccccagcccttcaaggccagcagcaccaagggccgcatggtgatgagccggggcggggagctggtgatggtgcccaacgtggaggccatcctggaggactttgctgtgctgggggagggcctggtgcagacagtggaggcccggtctgagcgctggacagtgtag

SEQ ID NO: 213680 - DNA, 3441 bp, Artificial Sequence
  derived and/or modified sequence
atgggccccgcccccgccggcgagcagctgcggggcgccaccggcgaaccagaggtgatggaacccgccctggagggtactggcaaagagggcaaaaaggcatcctcaagaaaacgaaccctggccgaacccccagccaagggtctccttcagccagttaaactgtcgcgggccgaactgtacaaagagcccacaaacgaggagctgaacagactgagagagacagaaatcctttttcactcatcccttctcagactgcaggtggaagagttacttaaggaagtacgtctgtccgaaaaaaagaaagataggatcgacgctttcctgagggaggtgaatcagagggttgttcgggtacccagtgtgcccgaaacagagctcacagaccaggcttggttacccgctggtgtgcgtgtgcctcttcaccaggtgccatacgccgtgaaggggtgctttcgattcttacctcccgcgcaagtaactgttgtgggatcttatctgctagggacttgtattaggcccgacattaatgtagacgtagcactgactatgccccgcgagattttgcaggacaaggatggattgaatcaacggtatttcaggaagagggctttgtatctggcccacctcgcgcatcacctggctcaggatcctctttttggctctgtttgtttctcctacacgaacggttgccatttgaagccttccctgttactcagaccacgcggaaaggatgagcgcctggttacagtgcggcttcacccttgccctccacccgatttctttcggccttgtcggctcctccctacgaagaataatgtccgcagtgcctggtatcggggccagtctcctgcgggcgatgggtcccccgagcctcctacacctcggtacaacacctgggttctccaggatacagtcctcgagagccacctccagctgttatctactatcttgtcttcggctcagggcttgaaagatggggtggctttgctgaaggtctggctacgtcaacgcgaactggataaagggcaaggtggtttcaccgggttcctcgtctctatgttagtagtgtttctggtctccaccagaaagatacatacgactatgtccggttatcaggttttgaggagcgtcttacagtttcttgccacgactgacttgaccgtgaacggcataagtctttgcttgagctccgatcccagcctgccggctctggcggattttcaccaggcattctcggtagtctttctagactcttctggtcatctgaatttatgcgccgacgttaccgccagcacatatcaccaggtgcagcacgaggctcgcctgagtatgatgctattagacagtagggctgacgatggctttcatctacttctgatgaccccgaagcctatgattagggctttcgaccacgtgcttcatctgcgacctttaagccgtctgcaggccgcttgccatcgcctaaagctttggcccgagctgcaggacaatggtggcgactatgtgagcgcggcgcttggccctcttaccacccttctggaacagggactaggcgctaggctgaaccttctggcccacagtagacctcctgttccggaatgggacatcagtcaggatccccccaagcacaaggatagcggtacattaactttggggcttctcctgaggcctgagggtcttacttccgtgctggaactaggcccagaggcggaccagccagaagctgccaagttccggcagttttggggaagtcggtccgagctgagacgctttcaggacggagccatcagggaagccgttgtctgggaagccgccagcatgagccagaaacgtttaattccccaccaagtagttacgcatctgctggccttgcacgccgatatccccgagacctgcgtgcactacgtgggcggacccctcgatgccctgatccaggggctgaaagagacctcctcaactggcgaagaagcattagtggcagctgttagatgctatgacgatttgtcccgtctcctctggggcttagaaggcctgccccttaccgtcagcgcagtccagggagcacatcccgtgttgaggtacaccgaagttttccctccgacccctgtgcggccagcattcagcttctatgagactctgcgagaacggagctccctcctacctcggttggataagccttgtccggcatacgtagaaccaatgactgtggtctgtcaccttgagggcagcggacagtggcctcaggacgcagaagcggttcagcgtgtgcgagccgcctttcagctgcgattggccgagctcctgacacaacagcatggcctgcaatgcagagctactgccacccataccgacgtcctgaaagatggcttcgttttccggatccgtgttgcctaccagcgggagcctcagattttgaaagaggtgcagagtcccgaggggatgatcagcctgagggacacggccgcatcccttaggctggagcgggataccagacaactaccgctgttaaccagtgccctgcatggactccagcagcagcatccagcattctctggcgttgcccgcctggccaagcggtgggttcgggctcagctgctcggcgagggattcgccgatgagagcctcgatttggtcgcagccgccctttttttgcaccctgagccttttacccctccttctagtccccaagttggcttcctaaggttcctgttcctggtgtctacgttcgattggaaaaacaatccactcttcgtgaatctgaacaacgagctaactgtagaagagcaggtggaaattagaagtgggttcctcgccgctcgggcccagctgccggtcatggttatcgtcacaccccaggaccggaagaacagcgtttggacccaggacggacctagcgcgcagatactccagcagctcgtagtgctcgcagcagaggcattgcctatgctcgaaaagcagctaatggatccacgtgggcctggagatatcagaacagtattcagaccgcccctggatatttacgacgtgctgatcagattgagccctcggcatatcccacgacatagacaggccgtcgatagtcccgccgcttcattctgcagaggtttattgagccagccagggcctagttcccttatgccagttttgggatatgaccccccacaactgtacctgacacagctgagggaggctttcggggacctggccttgtttttttatgaccagcacggcggggaagtgatcggagtattgtggaagccgacaagctttcagcctcagccatttaaggcttcctccaccaaaggacgaatggtaatgtctcgcggcggcgagttggttatggtgcctaatgtcgaagcaatcttggaagattttgctgttctcggcgaaggactggtacagaccgtggaggcccgaagcgagaggtggactgtgtag

SEQ ID NO: 213681 - DNA, 3024 bp, Artificial Sequence
  derived and/or modified sequence
atgggccccgcccccgccggcgagcagctgcggggcgccaccggcgagcccgaagtaatggaacctgcccttgaaggtacaggaaaggaaggtaagaaagcctcaagccgcaagcgcaccttagccgagccgcctgctaagggacttttgcagcccgtgaaactgtcccgagcagagttatataaggaacccacaaatgaagaactcaataggctgagggagaccgagattttgtttcacagctcgctgctcagactgcaggtggaggagctactgaaggaagtgcgactgagcgagaagaagaaggatcgaatcgacgcatttcttagagaggtgaaccaaagggtggtgcgagttccctctgtgcctgaaaccgaactgactgatcaggcatggctgccagctggcgtgagagtgcccctgcaccaggtaccatacgcagttaagggctgcttccgattcttgccgcccgcccaggtgaccgtggtgggatcctatctattagggacctgcatccggccagatataaacgttgatgtggccctgactatgccgcgggagattctccaggataaggatgggctcaatcagcgttatttcagaaagcgggcactctacctggcacacttagcacatcacctggcgcaagacccacttttcggctccgtttgctttagttacaccaatggctgtcacttgaagccaagcctcttgctgcgaccgcggggcaaggatgagagactcgtgaccgtgcgactgcatccatgcccgcccccggacttctttcgcccgtgccgactgttgcctacgaagaacaacgtgcggtcggcctggtaccgagggcagagcccagccggcgatggatcccccgagccccccaccccccgctacaacacctgggtgcttcaagacactgttctggagagccacctgcagctgttgtccactatcctgagctccgcacaaggcctgaaggacggcgttgcccttctgaaagtatggctgaggcagagggagctggataaggggcagggcggttttacgggtttccttgtgagcatgctggttgtgttccttgtaagcactaggaagatccacaccacgatgagcgggtatcaggttctgcgcagcgtgttgcagttcctggccacgaccgacttgaccgtaaatggcatctccctatgtctcagttcggatccatcacttcctgcgctggcagacttccaccaagccttttctgttgtgtttttagattcctcaggccacctgaatctgtgtgccgatgtgaccgcctccacataccatcaggtccagcacgaggcccgactgtctatgatgctgctcgactcccgcgccgacgacgggtttcacctgctcctcatgacacctaagcccatgatcagagcatttgaccatgtgcttcacctccggccgttgtctcgcttgcaggctgcctgccatcgtttgaagctctggcccgaactccaggataatggtggcgactacgtgtcggctgccttgggtcccctcaccaccctgctggagcagggactcggagctcgcctgaacctcctagcacattcccgccctcctgtcccagagtgggatatctcacaggatccacctaaacataaggatagtggcaccttgacactcggcctgctcctgagaccagaaggcctaacgagtgtccttgagctgggacccgaagccgatcagcccgaagctgccaagtttcgacagttctggggcagccgcagtgagctgcggaggttccaagacggtgccataagggaagccgtagtctgggaagctgctagcatgtcacaaaaacgcctgataccacatcaggtggtcacccacttgcttgccttacacgccgacattcccgagacgtgtgttcattacgtgggcgggccgctcgatgccctgatccaaggtctgaaagagactagtagcacaggagaggaagccctcgtggccgctgtgcgctgttacgatgacctctctcgcctcctctggggtctagaaggactgccgctgaccgtctccgccgttcagggagctcatccggttctcagatacacagaagttttcccccccactcccgttagacccgccttcagcttctatgagacgctcagagagaggtccagtcttctgccacgcctcgacaaaccgtgtccagcctacgtagagcccatgacagttgtatgccacctggaggggagtggtcagtggccccaggatgctgaggccgtgcagcgggtgcgagcagctttccaactgcgcttagccgagctgctaacccagcagcacggcctccaatgtcgggcaacagccacgcacaccgacgtgctgaaggatggtttcgtgtttagaattcgagttgcctatcagagggagcctcaaatcttaaaggaggttcagagccctgaagggatgatcagcctgcgagacacggccgcgtccttacggctggaaagagataccaggcagctgccgcttctgacctccgccctgcacggtctgcaacagcagcatccggctttctctggcgtggccagactagcgaaaagatgggtcagagcgcagcttctgggggaaggtttcgctgacgaatcgctggatctggttgctgctgcacttttcctccaccccgaaccgtttactcctccttccagcccccaagtgggatttctcagattcctgtttctggttagtactttcgactggaaaaataaccccctcttcgtgaacctgaataatgagctgacagtggaggagcaagtggagattagatccgggtttctggctgcaagggcccagctgccagtcatggtgatcgtgactcctcaagatagaaagaactccgtgtggacccaagatggtccaagcgcacagattctgcaacaactggtagtcctcgcagcggaggctctgcctatgctagagaaacagctcatggatccccgcggtcccggagacatccggtgggacccagccaaaatgtggcccttctag

SEQ ID NO: 213682 - DNA, 603 bp, Artificial Sequence
  derived and/or modified sequence
atggtgatcgtgaccccccaggaccggaagaacagcgtgtggacccaagacggcccatcagcccagatcctgcagcagctggtcgtccttgctgccgaggccctgccaatgctcgagaagcagctgatggacccgcgaggccctggcgacatcagaacagtcttccggccaccactggatatatacgacgtgctgatacgattgtcacccaggcatatcccccgacatagacaggcagtagactcccctgcggcttctttttgcagggggctgttatcacagcccggaccatcaagcctgatgcccgtgcttgggtatgatccaccacaactgtacctgacccagctgcgtgaggccttcggggacctggctctgttcttctacgatcagcatggaggggaggttatcggagttctgtggaaaccgacgagtttccagcctcaaccattcaaggcaagtagcaccaagggccgcatggtcatgtcgagagggggcgagctggtgatggtgcctaatgtagaagcgatcttagaagactttgctgtattgggcgaaggcctggtacaaaccgtcgaagcccggtccgaacgatggaccgtatag

SEQ ID NO: 213683 - DNA, 3072 bp, Artificial Sequence
  derived and/or modified sequence
atgggccccgcccccgccggcgagcagctgcggggcgccaccggcgaaccagaggtgatggagcctgccttggagggtacaggaaaggagggtaagaaagctagctcccgcaagcgcactctcgcggagccacctgccaagggccttctccagcccgtgaagctgtcccgggcagagctttataaagagcccactaacgaggagctgaatcgattgagagagactgaaatactgtttcattcctctctgcttcgactccaggttgaagagctgctgaaagaggttaggctatctgaaaagaaaaaggataggattgacgcctttttgcgggaggttaatcagcgggtcgtccgagtgcccagcgtgccagagacagaactgacagatcaggcctggctccccgctggggtccgagtccccctacaccaggtgccgtatgccgttaaaggttgctttcgattcctgccacctgcccaggtgacagtagtagggtcttacctcttgggcacatgcattcgcccagatatcaacgtggacgtggccctaaccatgccccgcgagatcctgcaggataaagacggcctcaaccagcgatacttccgaaagagagccctctatctggcccatttggcacatcatttggctcaggaccccctattcggatctgtttgtttcagctacacaaatggatgccacttgaaacccagcctactcctgcggccaagggggaaggatgaaaggctggtcaccgtgaggctccacccttgtcccccaccagatttcttccgcccttgccggctgttgcccactaaaaataacgtcagatctgcttggtatagggggcagtcccccgccggggatggttcaccggaacctcctacgccacggtataacacctgggtgctgcaggacacagtgctggaatcccacctccagttattgtccaccattctatcttcagcccaggggttgaaggatggcgtggcactgcttaaggtatggctacgccagcgggaattggataagggtcagggtggttttactgggtttctggtaagcatgttggtggtgtttctagtctctactaggaagattcatacaacgatgtcaggttaccaggtactgcgaagcgttctccaattcctagcaacaaccgacctgacagtcaacggcatcagtctgtgcctcagctcagatccaagcttgcctgcattggccgacttccatcaagcattttccgtggtatttttagactcctctgggcacctgaacctttgcgccgacgtaacagcttcaacgtatcaccaagtgcagcatgaagcgagacttagcatgatgctgctagactcacgagcagatgatggattccaccttctccttatgaccccaaagccaatgatccgggctttcgaccacgtgctccacttacgtccactgtccaggctgcaagcagcctgtcacaggctgaaactctggcccgaattgcaggataacggtggtgattacgtgtcagcagccctgggtcccttgaccaccttgctcgagcagggcctcggtgctcgcctgaaccttttggcccactcccgacccccggtgcccgaatgggacatcagtcaggatccacctaagcataaagacagtggcaccctgactctgggtctgctactgagaccggaaggactcacctctgtgctagaacttgggccggaggctgaccaacccgaggccgcaaaatttcgtcagttttggggatcacggagcgagttacgtcgctttcaggacggggcaatccgcgaggctgtagtatgggaagccgcctccatgtcacagaaaaggctcattccacaccaagtggtcactcatctattagcccttcacgccgatatcccagagacctgtgtgcactatgtcggagggccactggacgctctgatccagggcctcaaggagacgagttctactggcgaagaggccttagttgcggctgttagatgctatgatgatttgtctcgcttgctgtggggattagaggggctacccctcactgtaagcgccgtccaaggcgctcacccagttctgcggtacacagaagtgtttcccccaaccccggtaaggccagccttttcgttttatgaaacattgagggaacgctctagccttctgccccgcctcgacaaaccatgccctgcatacgtggagcccatgactgtagtctgccatctggaaggatctggtcaatggcctcaggatgcggaggctgtccagagggtccgtgcagcgttccagcttagactcgccgaactcttgacgcaacagcatggcctacagtgccgtgcaactgccacccacactgatgtgctcaaggacggcttcgtatttcggattagggtggcataccagagggagccgcagatcctgaaggaggttcagagcccagaaggcatgataagtcttcgagataccgccgcaagcctccggctggagagggataccagacagctgcctctgctcacgagtgccctgcacgggctgcaacagcagcacccagcattctccggtgtagcaagactggcgaaacgatgggtgagagctcagctgctaggcgaaggctttgcggacgagtcgctcgatctcgtcgcggccgcccttttcctccacccagagccatttacacccccaagtagcccccaagtaggattcctgcgatttctgttcctagttagcaccttcgattggaagaacaacccattgttcgttaacctaaataacgaacttacagtcgaggagcaggtggagattcggagcggcttcctggcggcaagagcacaactgcccgttatggtcatcgtcactccacaggaccgtaaaaatagcgtgtggacacaggatggcccttccgcccagattcttcagcagctggttgttctagcagccgaggcgttgccaatgctcgaaaagcagctaatggatccccgggggccaggagatattaggatgggaccctcagaaaatgttgctttactctctcatataactgataccgaacagtggaaaggggccatctgtgtatag

SEQ ID NO: 213684 - DNA, 3285 bp, Artificial Sequence
  derived and/or modified sequence
atgggccccgcccccgccggcgagcagctgcggggcgccaccggcgaacccgaggtcatggaacccgctctcgaaggaaccggcaaggagggcaagaaagctagctcacgtaaaagaaccctggctgagcccccagccaaagggctactgcagccagtgaaactatcacgggccgagctctacaaagaacccacaaatgaggagcttaatcggcttagggaaaccgaaatcttattccacagctccctactgcgtctccaggtggaagaattgctgaaagaggtgagactgagcgagaagaagaaggacaggatagacgcattcctcagggaggtcaatcaacgtgtagtcagggtcccctccgtaccggagactgaggagattttacaggataaagatggattgaatcagagatactttagaaaaagggctctgtacctcgcacacctggcgcatcacctggcccaggaccccctgtttggatctgtgtgtttctcgtacaccaatggctgtcacctgaaaccatccttactgctccgacctagaggcaaggacgagcgcctggttactgtccggctgcacccctgtccgccccctgatttcttccgcccttgtcggctacttccgacgaagaacaatgtgagaagtgcttggtatcggggccaatccccagcaggggatggatccccagagccccctaccccacggtacaacacatgggtcctgcaagataccgtcctagaaagccatctccaacttttaagcactatcctgagttctgcgcagggacttaaagacggcgttgccctgctgaaggtgtggctgagacaaagagaactggacaaagggcagggcggtttcaccggatttttggttagcatgttagtggtgtttctggtctcgaccaggaagatccacacaacaatgagcgggtaccaggtgcttcgtagtgtcctgcagtttctcgcaaccacagacttgaccgtgaatggcattagcctgtgcctgagcagtgacccctcactccccgctcttgccgatttccatcaggcgttcagcgtcgttttcttagattcgagcggccacctgaacctctgcgctgacgtgacagccagtacatatcatcagggatggtcccttctgtggctgcaggtccagcacgaggctcgcttgtccatgatgctgttagacagcagagcagacgatggattccacttgttattaatgactcccaaaccaatgattcgagcctttgatcatgtactgcaccttaggcccttgagtaggttgcaagcggcctgccatcgattgaaactttggccagagctgcaggataatgggggcgattatgtatccgctgccctcggccctctaacgacacttctggagcaagggctgggtgccaggctgaatctgctcgctcactcacgaccgcctgtgccagagtgggatatttctcaggatcctcctaagcacaaagactccggcacactcacactcggcctgctgctccgcccagagggactgactagcgtgttagaactgggacctgaggccgatcaaccagaggcagctaagtttaggcaattctggggctcccgctctgagctccggcgctttcaggatggcgctattagggaggcagttgtgtgggaagcagccagtatgtcacaaaagaggctaatcccccaccaagtcgtcacacacctcctcgctctgcacgcggacatccctgagacctgtgtgcactacgtcgggggccctctggacgccttgatccagggtctgaaggaaacgtccagcacaggagaggaagcgctggttgctgcagtgaggtgctacgacgacctgagccgactcctttggggcctagagggcctcccattgaccgtaagtgccgtccaaggcgcccatccagtgttacgctataccgaagtctttcctcctacaccagtcagacctgccttcagtttctatgagactctgagagagaggtctagcctactccccaggttggataagccatgcccagcttacgtggagcctatgaccgtcgtctgccaccttgagggttcaggccagtggcctcaggatgccgaggctgtgcagagagtgcgcgccgccttccaattgcgcctcgccgagctgcttacacagcaacacggactgcagtgtagggccaccgctacacacactgacgtgctgaaagatgggttcgtgtttagaatccgagtggcctatcagagggagccccagattctgaaggaagtacaatcgcctgaagggatgattagtctcagagatactgccgccagtcttcgtctggaacgtgatactagacagcttccactactcacaagcgcgttacacggattacagcagcagcaccccgcctttagtggggtggcacgtctggctaaacgttgggtaagagcccagctcttaggtgaaggcttcgctgatgaaagcctggacttggtggctgctgccctgttcctgcacccagaacctttcactcctccttcttcaccgcaggtgggttttctgaggtttttgttcctggtatccaccttcgattggaaaaataatccgctcttcgttaaccttaataacgagttaacggtcgaggaacaagtcgagatcagatcgggctttctagccgcccgagcccagctcccagtgatggttattgtgactccccaggataggaaaaacagcgtgtggacccaggacggcccctctgcccagatcctgcagcagctcgtggtcctagcagccgaggctctaccaatgctggagaagcagttgatggatccacggggtcctggagacatcagaacagttttcagaccaccactcgatatctatgatgtcttgattagactgagccctcgccatattccaagacatcggcaggccgttgacagtccggccgcttccttctgccggggcttgctgagtcaacctggcccttcgtccctcatgcccgtcctgggctatgacccgcctcaactgtacctgactcagttacgggaagccttcggagaccttgccctttttttctatgaccagcatgggggtgaagttataggcgtcctctggaaaccaacgtcctttcaaccccagcccttcaaggcttcttccaccaagggcaggatggtcatgagccgaggtggagagctggtcatggtgcctaacgtggaggcaattttagaggattttgctgtcctgggggaaggtttggtgcaaactgtggaggcccgatcggaacggtggaccgtgtag

SEQ ID NO: 213685 - DNA, 2109 bp, Artificial Sequence
  derived and/or modified sequence
atgatgctgctggacagccgggccgacgacggcttccacctgctgctgatgacacccaagcccatgatccgggccttcgatcacgtcctccatctgcgacccctctccagactgcaggctgcatgccaccgcctgaagttgtggccggagctgcaggacaacgggggggactacgtgagtgccgctctgggcccccttaccactctgttggagcaagggttaggcgctcggctgaaccttctcgctcattccaggccacccgtgcccgagtgggatatatcccaagaccctccgaaacataaagatagcggaaccttaaccctcgggctcctgttgcggcccgaggggctgacctcggtcctcgagctgggacctgaggccgaccaacctgaggccgcaaagtttagacagttctggggtagtcggagcgaactcagaaggtttcaggacggagccatccgcgaggctgtggtgtgggaggctgctagcatgtctcagaaaagactaatcccacaccaggtcgtgacacacctattggcactccatgccgacatcccggagacatgcgtgcactacgtgggtggtcccttggacgcactgatccagggcctaaaggaaacctcctccacgggtgaagaggcattggtggcagccgttagatgctatgatgatttgagcagactcctgtggggcttagaaggcctgccacttacggtgtctgctgttcagggggcacaccctgtgttgagatacaccgaggtattcccccccacccctgtccggccggcgttctccttttatgagaccctgcgggaacggtcatccttgctgcccagactggacaagccctgtcccgcgtatgtagagcccatgactgtcgtctgtcacttggaggggagcggacagtggccccaggacgccgaggccgtgcagcgggtgagagccgccttccagctgcggctcgccgagctcctgacccagcaacatggcctgcagtgtagagcgactgctacgcatacggacgtgctgaaggacggcttcgtgttcagaattcgagtggcatatcagcgggagcctcagatccttaaggaggtgcaatccccagagggcatgatatccctgcgcgacactgccgcgagcctccggctggaacgggacacccggcaacttcccctgctgacatctgctctgcacggactacaacaacagcaccctgccttctcaggggtggcccgcctggccaagaggtgggttcgggcacaattgttgggtgaaggcttcgccgacgagagccttgatctagtagccgccgcgctctttctccaccctgagccttttacccccccatccagcccacaagtgggctttctgagattcctgtttctcgtgtctacttttgactggaaaaacaacccattgtttgttaatctgaataatgaactgacggttgaagagcaagtagaaatccgttctggatttctggcggcgagggcccagctgcccgtgatggtaattgtaacacctcaggacaggaaaaactcagtctggacccaagatggcccctccgcacaaattctgcagcagttagtggtcctggcagccgaagcactcccaatgctcgagaaacagttgatggacccgcgggggcccggagatattaggaccgtgtttcgtccacccctcgatatctacgatgtcctcattaggctctcccctcgtcacattcccaggcatcgccaggccgtggactccccggctgcatcattctgcagaggactgctctcccagccaggaccgtcttctttgatgccagtgctaggatatgatccgccgcagctgtacttgacacagcttcgagaagctttcggcgacctggcactgttcttttatgaccagcacggcggggaagtcataggtgtgctctggaagcccaccagtttccaaccgcagccattcaaagcctccagcactaaaggcaggatggttatgtctcggggcggcgaattggtgatggtgcccaacgtcgaggcgatactcgaggactttgccgttttgggcgaaggcctggtgcaaaccgtcgaagcccgctctgaaaggtggacggtgtag

SEQ ID NO: 213686 - DNA, 4741 bp, Artificial Sequence
  derived and/or modified sequence
ggagttaggcatttccgcccacgtgggaagctatgaggtatagacccggctagaatctgaagtgcgggagagtgctggaccctgagtgatggggccggcgccagctggagagcagcttcgcggagcgactggagagccagaggtgatggaaccagccctggaaggcacaggcaaagaggggaagaaagcatcctccaggaagcgtacattggctgaacctccagcgaagggcctcctgcagccagtgaagctcagcagggcagaactgtacaaggagcctaccaatgaggagcttaatcgccttcgggagactgagatcttgttccactccagcttgcttcgtttacaggtagaggagctactaaaggaagtaaggctgtcagagaagaagaaggatcggattgatgccttcctacgggaggtcaaccagcgggttgtgagggtgccctcagtccctgagacagagctcactgaccaggcatggctcccagctggggttcgagtgcccctccaccaagtgccctatgccgtgaagggctgtttccgcttcctgcccccagcccaggttactgttgtgggcagctaccttctgggcacctgcatccgaccagacatcaatgtggatgtggcactgaccatgcccagggaaatcctacaggacaaggacgggctgaaccagcgctacttccgcaagcgtgccctctacctggcccacttggctcaccacctggcccaggaccccctctttggcagtgtttgcttctcctacacaaatggctgccacctgaaaccctcactgttgctgcggccgcgtggaaaggatgagcgcctggtcactgtacgtctgcatccgtgccctccacctgacttcttccgcccgtgccgcttgctgccaaccaagaacaatgtgcgctctgcctggtaccgagggcagagtcctgcaggggatggtagcccagagcctcctaccccccgctataacacatgggtcctgcaagatacagttctcgagtcccatttgcagctgctgtcaaccattctgagttcagcccagggcctgaaggatggcgtggcacttctgaaggtctggctgcggcagcgggagctggacaagggccagggtgggtttactgggttccttgtctccatgctggttgtcttccttgtgtctacacgcaagatccataccaccatgagtggctaccaggtcctgagaagtgtcttgcagtttctggccactacagacctgacagtcaacgggatcagtttatgtctcagctcagatccctctttgccggccctggctgacttccaccaggccttctccgttgtcttcctggattcctcaggccatctcaacctctgtgctgatgtcactgcctctacttaccaccaggtacagcatgaggcacggctgtctatgatgttgctggacagcagagctgacgacgggttccacctgctgttgatgactcccaaacccatgatccgggcttttgaccatgtcctgcatctccgtccactgagtcgcctgcaggcagcgtgccaccggctgaagctctggccagagctgcaggacaatggtggggactatgtctcagctgctttgggccccctgaccaccctcctggagcagggcctgggggctcggctgaacctgctggctcactctcgacccccagtcccagagtgggacatcagccaagatccaccaaagcacaaagactctgggaccctgaccctgggactccttctccggcctgagggactgaccagcgtccttgagctgggtccagaggcagaccagcctgaggctgctaaattccgccagttctggggatcccgctcggagcttcggcgtttccaggacggagccattcgggaagctgtggtctgggaggcagcctctatgtcccagaagcgccttattccccaccaggtggtcacccacctcttggcactccatgctgacatcccagaaacctgtgtccactatgtggggggccccctggatgcacttatccaaggcctgaaagagacctccagcacaggtgaggaggccctggtagcggcggtacgttgctacgacgacctcagtcgcctactgtgggggctagagggtctcccactgaccgtgtctgctgttcagggagctcacccagtgctgcgctacacagaggtgttcccaccaactccagtccgtccagccttctccttctatgagactctgcgggagcggtcctcactgctgccccggctcgataagccctgtccggcctacgtggagcccatgaccgtggtttgtcacctggagggcagtggccagtggccacaggacgctgaggccgtgcagcgggtccgagctgccttccagctgcgcctggcagagctgttgacacaacagcatggtctgcagtgccgtgccactgccacgcacacggatgtccttaaggatggatttgtgtttcggattcgcgtggcctatcagcgggagccccagatcctgaaggaggtgcagagcccagaggggatgatctcgctgagggacacagctgcctccctccgccttgagagagacacaaggcagttgccactgctcaccagtgccctgcacggactgcagcagcagcacccagccttctctggtgtggcacggctggccaagcggtgggtgcgtgcccagcttcttggtgagggtttcgctgatgagagcctggatctggtggccgctgcccttttcctgcaccctgagcccttcacccctccgagttccccccaggttggcttccttcgattccttttcttggtatcaacgtttgattggaagaacaaccccctctttgtcaacctcaataatgagctcactgtggaggagcaggtggagatccgcagtggcttcctggcagctcgggcacagctccccgtcatggtcattgttaccccccaagaccgcaaaaactctgtgtggacacaggatggaccctcagcccagatcctgcagcagcttgtggtcctggcagctgaagccctgcccatgttagagaagcagctcatggatccccggggacctggggacatcaggacagtgttccggccgcccttggacatttacgacgtgctgattcgcctgtctcctcgccatatcccgcggcaccgccaggctgtggactcgccagctgcctccttctgccggggcctgctcagccagccggggccctcatccctgatgcccgtgctgggctatgatcctcctcagctctatctgacgcagctcagggaggcctttggggatctggcccttttcttctatgaccagcatggtggagaggtgattggtgtcctctggaagcccaccagcttccagccgcagcccttcaaggcctccagcacaaaggggcgcatggtgatgtctcgaggtggggagctagtaatggtgcccaatgttgaagcaatcctggaggactttgctgtgctgggtgaaggcctggtgcagactgtggaggcccgaagtgagaggtggactgtgtgatcccagctctggagcaagctgtagacggacagcaggacattggacctctagagcaagatgtcagtaggatgacctccaccctccttggacatgaatcctccatggagggcctgctggctgaacatgctgaatcatctccaacaaaacccagccccaactttctctctgatgctccagcattggggcaggggcatggtggcccatgtagtctcctgggcctcaccatcccagaagaggagtgggagccagctcagagaaggaactgaacccaggagatccatccacctattagccctgggcctggacctccctgcgatttcccactcctttcttagtcttcttccagaaacagagaaggggatgtgtgcctgggagaggctctgtctccttcctgctgccaggacctgtgcctagacttagcatgcccttcactgcagtgtcaggcctttagatgggacccagcgaaaatgtggcccttctgagtcacatcaccgacactgagcagtggaaaggggctatatgtgtatgaatagaccacattgaaggagcacaatgccctcctgtgttgatgccacttcccagggtggagacagtggaaaagaaccgaggacaggaaaggattgggtaggtgaaggggtcaggggactggtagtcacccaatcttggagaggtgcaaaaagcactgggggctacccgttagctgcatctgccctggctgtttgcccgttcatgtcacaaactgccactactatgtacctgcagtggggttgcagagatgggggagactcaagtcttactccccaggagctcccagggcccaaggaggagaatgctgcctcctttcagtctggtctacacccactttctggtagcctctctgcttcctgtaattctggctgtttttccagactcagctcaaatagtgcccctccttaagcccatccctcgcccccagcctgaggtgatctttccctcctctgaactattagagcagttactgtctgttcagttcgtttggcaggcacacacagtggcataaattctattgttttgaactctgatttaaaattaaattgcagctgggcgtggtggcttatgcttgtaatcccaacacttagggagtcaggagaatcacttgagctcaggagttctagaccaatctgggcaacagagagaccccatctcttttaaataaaaagttaaattgcttaa

SEQ ID NO: 213687 - DNA, 3125 bp, Artificial Sequence
  derived and/or modified sequence
tggacttgggcctggagttaggcatttccgcccacgtgggaagctatgaggtatagacccggctagaatctgaagtgcgggagagtgctggaccctgagtgatggggccggcgccagctggagagcagcttcgcggagcgactggagagccagaggtgatggaaccagccctggaaggcacaggcaaagaggggaagaaagcatcctccaggaagcgtacattggctgaacctccagcgaagggcctcctgcagccagtgaagctcagcagggcagaactgtacaaggagcctaccaatgaggagcttaatcgccttcgggagactgagatcttgttccactccagcttgcttcgtttacaggtagaggagctactaaaggaagtaaggctgtcagagaagaagaaggatcggattgatgccttcctacgggaggtcaaccagcgggttgtgagggtgccctcagtccctgagacagagctcactgaccaggcatggctcccagctggggttcgagtgcccctccaccaagtgccctatgccgtgaagggctgtttccgcttcctgcccccagcccaggttactgttgtgggcagctaccttctgggcacctgcatccgaccagacatcaatgtggatgtggcactgaccatgcccagggaaatcctacaggacaaggacgggctgaaccagcgctacttccgcaagcgtgccctctacctggcccacttggctcaccacctggcccaggaccccctctttggcagtgtttgcttctcctacacaaatggctgccacctgaaaccctcactgttgctgcggccgcgtggaaaggatgagcgcctggtcactgtacgtctgcatccgtgccctccacctgacttcttccgcccgtgccgcttgctgccaaccaagaacaatgtgcgctctgcctggtaccgagggcagagtcctgcaggggatggtagcccagagcctcctaccccccgctataacacatgggtcctgcaagatacagttctcgagtcccatttgcagctgctgtcaaccattctgagttcagcccagggcctgaaggatggcgtggcacttctgaaggtctggctgcggcagcgggagctggacaagggccagggtgggtttactgggttccttgtctccatgctggttgtcttccttgtgtctacacgcaagatccataccaccatgagtggctaccaggtcctgagaagtgtcttgcagtttctggccactacagacctgacagtcaacgggatcagtttatgtctcagctcagatccctctttgccggccctggctgacttccaccaggccttctccgttgtcttcctggattcctcaggccatctcaacctctgtgctgatgtcactgcctctacttaccaccaggtacagcatgaggcacggctgtctatgatgttgctggacagcagagctgacgacgggttccacctgctgttgatgactcccaaacccatgatccgggcttttgaccatgtcctgcatctccgtccactgagtcgcctgcaggcagcgtgccaccggctgaagctctggccagagctgcaggacaatggtggggactatgtctcagctgctttgggccccctgaccaccctcctggagcagggcctgggggctcggctgaacctgctggctcactctcgacccccagtcccagagtgggacatcagccaagatccaccaaagcacaaagactctgggaccctgaccctgggactccttctccggcctgagggactgaccagcgtccttgagctgggtccagaggcagaccagcctgaggctgctaaattccgccagttctggggatcccgctcggagcttcggcgtttccaggacggagccattcgggaagctgtggtctgggaggcagcctctatgtcccagaagcgccttattccccaccaggtggtcacccacctcttggcactccatgctgacatcccagaaacctgtgtccactatgtggggggccccctggatgcacttatccaaggcctgaaagagacctccagcacaggtgaggaggccctggtagcggcggtacgttgctacgacgacctcagtcgcctactgtgggggctagagggtctcccactgaccgtgtctgctgttcagggagctcacccagtgctgcgctacacagaggtgttcccaccaactccagtccgtccagccttctccttctatgagactctgcgggagcggtcctcactgctgccccggctcgataagccctgtccggcctacgtggagcccatgaccgtggtttgtcacctggagggcagtggccagtggccacaggacgctgaggccgtgcagcgggtccgagctgccttccagctgcgcctggcagagctgttgacacaacagcatggtctgcagtgccgtgccactgccacgcacacggatgtccttaaggatggatttgtgtttcggattcgcgtggcctatcagcgggagccccagatcctgaaggaggtgcagagcccagaggggatgatctcgctgagggacacagctgcctccctccgccttgagagagacacaaggcagttgccactgctcaccagtgccctgcacggactgcagcagcagcacccagccttctctggtgtggcacggctggccaagcggtgggtgcgtgcccagcttcttggtgagggtttcgctgatgagagcctggatctggtggccgctgcccttttcctgcaccctgagcccttcacccctccgagttccccccaggttggcttccttcgattccttttcttggtatcaacgtttgattggaagaacaaccccctctttgtcaacctcaataatgagctcactgtggaggagcaggtggagatccgcagtggcttcctggcagctcgggcacagctccccgtcatggtcattgttaccccccaagaccgcaaaaactctgtgtggacacaggatggaccctcagcccagatcctgcagcagcttgtggtcctggcagctgaagccctgcccatgttagagaagcagctcatggatccccggggacctggggacatcaggtgggacccagcgaaaatgtggcccttctga

SEQ ID NO: 213688 - DNA, 2190 bp, Artificial Sequence
  derived and/or modified sequence
actttttccccagctgagaagtttccttgcggccagccatcatccttcgtgctgcaccctaagtctacatgggaatgggtggttgagcaagtggcagaaggggttctaagatgccctgccctgccaatccacaccagggggtctgagctccatagcctgagagaagcctggggatatgtggctgggccctggattctttgcttactccagccctttagttccccccaggttggcttccttcgattccttttcttggtatcaacgtttgattggaagaacaaccccctctttgtcaacctcaataatgagctcactgtggaggagcaggtggagatccgcagtggcttcctggcagctcgggcacagctccccgtcatggtcattgttaccccccaagaccgcaaaaactctgtgtggacacaggatggaccctcagcccagatcctgcagcagcttgtggtcctggcagctgaagccctgcccatgttagagaagcagctcatggatccccggggacctggggacatcaggacagtgttccggccgcccttggacatttacgacgtgctgattcgcctgtctcctcgccatatcccgcggcaccgccaggctgtggactcgccagctgcctccttctgccggggcctgctcagccagccggggccctcatccctgatgcccgtgctgggctatgatcctcctcagctctatctgacgcagctcagggaggcctttggggatctggcccttttcttctatgaccagcatggtggagaggtgattggtgtcctctggaagcccaccagcttccagccgcagcccttcaaggcctccagcacaaaggggcgcatggtgatgtctcgaggtggggagctagtaatggtgcccaatgttgaagcaatcctggaggactttgctgtgctgggtgaaggcctggtgcagactgtggaggcccgaagtgagaggtggactgtgtgatcccagctctggagcaagctgtagacggacagcaggacattggacctctagagcaagatgtcagtaggatgacctccaccctccttggacatgaatcctccatggagggcctgctggctgaacatgctgaatcatctccaacaaaacccagccccaactttctctctgatgctccagcattggggcaggggcatggtggcccatgtagtctcctgggcctcaccatcccagaagaggagtgggagccagctcagagaaggaactgaacccaggagatccatccacctattagccctgggcctggacctccctgcgatttcccactcctttcttagtcttcttccagaaacagagaaggggatgtgtgcctgggagaggctctgtctccttcctgctgccaggacctgtgcctagacttagcatgcccttcactgcagtgtcaggcctttagatgggacccagcgaaaatgtggcccttctgagtcacatcaccgacactgagcagtggaaaggggctatatgtgtatgaatagaccacattgaaggagcacaatgccctcctgtgttgatgccacttcccagggtggagacagtggaaaagaaccgaggacaggaaaggattgggtaggtgaaggggtcaggggactggtagtcacccaatcttggagaggtgcaaaaagcactgggggctacccgttagctgcatctgccctggctgtttgcccgttcatgtcacaaactgccactactatgtacctgcagtggggttgcagagatgggggagactcaagtcttactccccaggagctcccagggcccaaggaggagaatgctgcctcctttcagtctggtctacacccactttctggtagcctctctgcttcctgtaattctggctgtttttccagactcagctcaaatagtgcccctccttaagcccatccctcgcccccagcctgaggtgatctttccctcctctgaactattagagcagttactgtctgttcagttcgtttggcaggcacacacagtggcataaattctattgttttgaactctgatttaaaattaaattgcagctgggcgtggtggcttatgcttgtaatcccaacacttagggagtcaggagaatcacttgagctcaggagttctagaccaatctgggcaacagagagaccccatctcttttaaataaaaagttaaattgcttaa

SEQ ID NO: 213689 - DNA, 3843 bp, Artificial Sequence
  derived and/or modified sequence
ggagttaggcatttccgcccacgtgggaagctatgaggtatagacccggctagaatctgaagtgcgggagagtgctggaccctgagtgatggggccggcgccagctggagagcagcttcgcggagcgactggagagccagaggtgatggaaccagccctggaaggcacaggcaaagaggggaagaaagcatcctccaggaagcgtacattggctgaacctccagcgaagggcctcctgcagccagtgaagctcagcagggcagaactgtacaaggagcctaccaatgaggagcttaatcgccttcgggagactgagatcttgttccactccagcttgcttcgtttacaggtagaggagctactaaaggaagtaaggctgtcagagaagaagaaggatcggattgatgccttcctacgggaggtcaaccagcgggttgtgagggtgccctcagtccctgagacagagctcactgaccaggcatggctcccagctggggttcgagtgcccctccaccaagtgccctatgccgtgaagggctgtttccgcttcctgcccccagcccaggttactgttgtgggcagctaccttctgggcacctgcatccgaccagacatcaatgtggatgtggcactgaccatgcccagggaaatcctacaggacaaggacgggctgaaccagcgctacttccgcaagcgtgccctctacctggcccacttggctcaccacctggcccaggaccccctctttggcagtgtttgcttctcctacacaaatggctgccacctgaaaccctcactgttgctgcggccgcgtggaaaggatgagcgcctggtcactgtacgtctgcatccgtgccctccacctgacttcttccgcccgtgccgcttgctgccaaccaagaacaatgtgcgctctgcctggtaccgagggcagagtcctgcaggggatggtagcccagagcctcctaccccccgctataacacatgggtcctgcaagatacagttctcgagtcccatttgcagctgctgtcaaccattctgagttcagcccagggcctgaaggatggcgtggcacttctgaaggtctggctgcggcagcgggagctggacaagggccagggtgggtttactgggttccttgtctccatgctggttgtcttccttgtgtctacacgcaagatccataccaccatgagtggctaccaggtcctgagaagtgtcttgcagtttctggccactacagacctgacagtcaacgggatcagtttatgtctcagctcagatccctctttgccggccctggctgacttccaccaggccttctccgttgtcttcctggattcctcaggccatctcaacctctgtgctgatgtcactgcctctacttaccaccaggtacagcatgaggcacggctgtctatgatgttgctggacagcagagctgacgacgggttccacctgctgttgatgactcccaaacccatgatccgggcttttgaccatgtcctgcatctccgtccactgagtcgcctgcaggcagcgtgccaccggctgaagctctggccagagctgcaggacaatggtggggactatgtctcagctgctttgggccccctgaccaccctcctggagcagggcctgggggctcggctgaacctgctggctcactctcgacccccagtcccagagtgggacatcagccaagatccaccaaagcacaaagactctgggaccctgaccctgggactccttctccggcctgagggactgaccagcgtccttgagctgggtccagaggcagaccagcctgaggctgctaaattccgccagttctggggatcccgctcggagcttcggcgtttccaggacggagccattcgggaagctgtggtctgggaggcagcctctatgtcccagaagcgccttattccccaccaggtggtcacccacctcttggcactccatgctgacatcccagaaacctgtgtccactatgtggggggccccctggatgcacttatccaaggcctgaaagagacctccagcacaggtgaggaggccctggtagcggcggtacgttgctacgacgacctcagtcgcctactgtgggggctagagggtctcccactgaccgtgtctgctgttcagggagctcacccagtgctgcgctacacagaggtgttcccaccaactccagtccgtccagccttctccttctatgagactctgcgggagcggtcctcactgctgccccggctcgataagccctgtccggcctacgtggagcccatgaccgtggtttgtcacctggagggcagtggccagtggccacaggacgctgaggccgtgcagcgggtccgagctgccttccagctgcgcctggcagagctgttgacacaacagcatggtctgcagtgccgtgccactgccacgcacacggatgtccttaaggatggatttgtgtttcggattcgcgtggcctatcagcgggagccccagatcctgaaggaggtgcagagcccagaggggatgatctcgctgagggacacagctgcctccctccgccttgagagagacacaaggcagttgccactgctcaccagtgccctgcacggactgcagcagcagcacccagccttctctggtgtggcacggctggccaagcggtgggtgcgtgcccagcttcttggtgagggtttcgctgatgagagcctggatctggtggccgctgcccttttcctgcaccctgagcccttcacccctccgagttccccccaggttggcttccttcgattccttttcttggtatcaacgtttgattggaagaacaaccccctctttgtcaacctcaataatgagctcactgtggaggagcaggtggagatccgcagtggcttcctggcagctcgggcacagctccccgtcatggtcattgttaccccccaagaccgcaaaaactctgtgtggacacaggatggaccctcagcccagatcctgcagcagcttgtggtcctggcagctgaagccctgcccatgttagagaagcagctcatggatccccggggacctggggacatcaggatgggacccagcgaaaatgtggcccttctgagtcacatcaccgacactgagcagtggaaaggggctatatgtgtatgaatagaccacattgaaggagcacaatgccctcctgtgttgatgccacttcccagggtggagacagtggaaaagaaccgaggacaggaaaggattgggtaggtgaaggggtcaggggactggtagtcacccaatcttggagaggtgcaaaaagcactgggggctacccgttagctgcatctgccctggctgtttgcccgttcatgtcacaaactgccactactatgtacctgcagtggggttgcagagatgggggagactcaagtcttactccccaggagctcccagggcccaaggaggagaatgctgcctcctttcagtctggtctacacccactttctggtagcctctctgcttcctgtaattctggctgtttttccagactcagctcaaatagtgcccctccttaagcccatccctcgcccccagcctgaggtgatctttccctcctctgaactattagagcagttactgtctgttcagttcgtttggcaggcacacacagtggcataaattctattgttttgaactctgatttaaaattaaattgcagctgggcgtggtggcttatgcttgtaatcccaacacttagggagtcaggagaatcacttgagctcaggagttctagaccaatctgggcaacagagagaccccatctcttttaaataaaaagttaaattgcttaa

SEQ ID NO: 213690 - DNA, 3412 bp, Artificial Sequence
  derived and/or modified sequence
agctatgaggtatagacccggctagaatctgaagtgcgggagagtgctggaccctgagtgatggggccggcgccagctggagagcagcttcgcggagcgactggagagccagaggtgatggaaccagccctggaaggcacaggcaaagaggggaagaaagcatcctccaggaagcgtacattggctgaacctccagcgaagggcctcctgcagccagtgaagctcagcagggcagaactgtacaaggagcctaccaatgaggagcttaatcgccttcgggagactgagatcttgttccactccagcttgcttcgtttacaggtagaggagctactaaaggaagtaaggctgtcagagaagaagaaggatcggattgatgccttcctacgggaggtcaaccagcgggttgtgagggtgccctcagtccctgagacagaggaaatcctacaggacaaggacgggctgaaccagcgctacttccgcaagcgtgccctctacctggcccacttggctcaccacctggcccaggaccccctctttggcagtgtttgcttctcctacacaaatggctgccacctgaaaccctcactgttgctgcggccgcgtggaaaggatgagcgcctggtcactgtacgtctgcatccgtgccctccacctgacttcttccgcccgtgccgcttgctgccaaccaagaacaatgtgcgctctgcctggtaccgagggcagagtcctgcaggggatggtagcccagagcctcctaccccccgctataacacatgggtcctgcaagatacagttctcgagtcccatttgcagctgctgtcaaccattctgagttcagcccagggcctgaaggatggcgtggcacttctgaaggtctggctgcggcagcgggagctggacaagggccagggtgggtttactgggttccttgtctccatgctggttgtcttccttgtgtctacacgcaagatccataccaccatgagtggctaccaggtcctgagaagtgtcttgcagtttctggccactacagacctgacagtcaacgggatcagtttatgtctcagctcagatccctctttgccggccctggctgacttccaccaggccttctccgttgtcttcctggattcctcaggccatctcaacctctgtgctgatgtcactgcctctacttaccaccagggatggtcccttctgtggctccaggtacagcatgaggcacggctgtctatgatgttgctggacagcagagctgacgacgggttccacctgctgttgatgactcccaaacccatgatccgggcttttgaccatgtcctgcatctccgtccactgagtcgcctgcaggcagcgtgccaccggctgaagctctggccagagctgcaggacaatggtggggactatgtctcagctgctttgggccccctgaccaccctcctggagcagggcctgggggctcggctgaacctgctggctcactctcgacccccagtcccagagtgggacatcagccaagatccaccaaagcacaaagactctgggaccctgaccctgggactccttctccggcctgagggactgaccagcgtccttgagctgggtccagaggcagaccagcctgaggctgctaaattccgccagttctggggatcccgctcggagcttcggcgtttccaggacggagccattcgggaagctgtggtctgggaggcagcctctatgtcccagaagcgccttattccccaccaggtggtcacccacctcttggcactccatgctgacatcccagaaacctgtgtccactatgtggggggccccctggatgcacttatccaaggcctgaaagagacctccagcacaggtgaggaggccctggtagcggcggtacgttgctacgacgacctcagtcgcctactgtgggggctagagggtctcccactgaccgtgtctgctgttcagggagctcacccagtgctgcgctacacagaggtgttcccaccaactccagtccgtccagccttctccttctatgagactctgcgggagcggtcctcactgctgccccggctcgataagccctgtccggcctacgtggagcccatgaccgtggtttgtcacctggagggcagtggccagtggccacaggacgctgaggccgtgcagcgggtccgagctgccttccagctgcgcctggcagagctgttgacacaacagcatggtctgcagtgccgtgccactgccacgcacacggatgtccttaaggatggatttgtgtttcggattcgcgtggcctatcagcgggagccccagatcctgaaggaggtgcagagcccagaggggatgatctcgctgagggacacagctgcctccctccgccttgagagagacacaaggcagttgccactgctcaccagtgccctgcacggactgcagcagcagcacccagccttctctggtgtggcacggctggccaagcggtgggtgcgtgcccagcttcttggtgagggtttcgctgatgagagcctggatctggtggccgctgcccttttcctgcaccctgagcccttcacccctccgagttccccccaggttggcttccttcgattccttttcttggtatcaacgtttgattggaagaacaaccccctctttgtcaacctcaataatgagctcactgtggaggagcaggtggagatccgcagtggcttcctggcagctcgggcacagctccccgtcatggtcattgttaccccccaagaccgcaaaaactctgtgtggacacaggatggaccctcagcccagatcctgcagcagcttgtggtcctggcagctgaagccctgcccatgttagagaagcagctcatggatccccggggacctggggacatcaggacagtgttccggccgcccttggacatttacgacgtgctgattcgcctgtctcctcgccatatcccgcggcaccgccaggctgtggactcgccagctgcctccttctgccggggcctgctcagccagccggggccctcatccctgatgcccgtgctgggctatgatcctcctcagctctatctgacgcagctcagggaggcctttggggatctggcccttttcttctatgaccagcatggtggagaggtgattggtgtcctctggaagcccaccagcttccagccgcagcccttcaaggcctccagcacaaaggggcgcatggtgatgtctcgaggtggggagctagtaatggtgcccaatgttgaagcaatcctggaggactttgctgtgctgggtgaaggcctggtgcagactgtggaggcccgaagtgagaggtggactgtgtgatcccagctctggagcaagctgtagacggacagcaggacattggacctctagagcaagatgtcagtag

SEQ ID NO: 213691 - DNA, 2757 bp, Artificial Sequence
  derived and/or modified sequence
ctcagctcagatccctctttgccggccctggctgacttccaccaggccttctccgttgtcttcctggattcctcaggccatctcaacctctgtgctgatgtcactgcctctacttaccaccaggtacagcatgaggcacggctgtctatgatgttgctggacagcagagctgacgacgggttccacctgctgttgatgactcccaaacccatgatccgggcttttgaccatgtcctgcatctccgtccactgagtcgcctgcaggcagcgtgccaccggctgaagctctggccagagctgcaggacaatggtggggactatgtctcagctgctttgggccccctgaccaccctcctggagcagggcctgggggctcggctgaacctgctggctcactctcgacccccagtcccagagtgggacatcagccaagatccaccaaagcacaaagactctgggaccctgaccctgggactccttctccggcctgagggactgaccagcgtccttgagctgggtccagaggcagaccagcctgaggctgctaaattccgccagttctggggatcccgctcggagcttcggcgtttccaggacggagccattcgggaagctgtggtctgggaggcagcctctatgtcccagaagcgccttattccccaccaggtggtcacccacctcttggcactccatgctgacatcccagaaacctgtgtccactatgtggggggccccctggatgcacttatccaaggcctgaaagagacctccagcacaggtgaggaggccctggtagcggcggtacgttgctacgacgacctcagtcgcctactgtgggggctagagggtctcccactgaccgtgtctgctgttcagggagctcacccagtgctgcgctacacagaggtgttcccaccaactccagtccgtccagccttctccttctatgagactctgcgggagcggtcctcactgctgccccggctcgataagccctgtccggcctacgtggagcccatgaccgtggtttgtcacctggagggcagtggccagtggccacaggacgctgaggccgtgcagcgggtccgagctgccttccagctgcgcctggcagagctgttgacacaacagcatggtctgcagtgccgtgccactgccacgcacacggatgtccttaaggatggatttgtgtttcggattcgcgtggcctatcagcgggagccccagatcctgaaggaggtgcagagcccagaggggatgatctcgctgagggacacagctgcctccctccgccttgagagagacacaaggcagttgccactgctcaccagtgccctgcacggactgcagcagcagcacccagccttctctggtgtggcacggctggccaagcggtgggtgcgtgcccagcttcttggtgagggtttcgctgatgagagcctggatctggtggccgctgcccttttcctgcaccctgagcccttcacccctccgagttccccccaggttggcttccttcgattccttttcttggtatcaacgtttgattggaagaacaaccccctctttgtcaacctcaataatgagctcactgtggaggagcaggtggagatccgcagtggcttcctggcagctcgggcacagctccccgtcatggtcattgttaccccccaagaccgcaaaaactctgtgtggacacaggatggaccctcagcccagatcctgcagcagcttgtggtcctggcagctgaagccctgcccatgttagagaagcagctcatggatccccggggacctggggacatcaggacagtgttccggccgcccttggacatttacgacgtgctgattcgcctgtctcctcgccatatcccgcggcaccgccaggctgtggactcgccagctgcctccttctgccggggcctgctcagccagccggggccctcatccctgatgcccgtgctgggctatgatcctcctcagctctatctgacgcagctcagggaggcctttggggatctggcccttttcttctatgaccagcatggtggagaggtgattggtgtcctctggaagcccaccagcttccagccgcagcccttcaaggcctccagcacaaaggggcgcatggtgatgtctcgaggtggggagctagtaatggtgcccaatgttgaagcaatcctggaggactttgctgtgctgggtgaaggcctggtgcagactgtggaggcccgaagtgagaggtggactgtgtgatcccagctctggagcaagctgtagacggacagcaggacattggacctctagagcaagatgtcagtaggatgacctccaccctccttggacatgaatcctccatggagggcctgctggctgaacatgctgaatcatctccaacaaaacccagccccaactttctctctgatgctccagcattggggcaggggcatggtggcccatgtagtctcctgggcctcaccatcccagaagaggagtgggagccagctcagagaaggaactgaacccaggagatccatccacctattagccctgggcctggacctccctgcgatttcccactcctttcttagtcttcttccagctgccaggacctgtgcctagacttagcatgcccttcactgcagtgtcaggcctttagatgggacccagcgaaaatgtggcccttctgagtcacatcaccgacactgagcagtggaaaggggctatatgtgtatgaatagaccacattgaaggagc

SEQ ID NO: 213692 - DNA, 3441 bp, Artificial Sequence
  derived and/or modified sequence
atggggcctgcaccggcaggtgaacagttgcggggtgccacaggagagcccgaggtcatggagcctgcgctcgaggggactggaaaagagggcaaaaaggctagcagccgaaaaaggaccctcgcagagccccctgccaagggccttctgcagccagtgaaactgagccgggctgagctgtacaaagagcctacaaacgaggaactgaatcggctgcgggaaacagagattttgtttcattcctctctacttcggttgcaggtggaagagttgctcaaagaggttcgactttccgaaaagaagaaggatcggattgacgcttttctccgggaagttaatcagagagtggttcgagtgccttcggtacctgagaccgagctgacagatcaggcttggcttccagccggagttcgcgtccccctccaccaggtcccctatgctgttaagggttgcttccggttcctgcctcccgcacaggtgaccgtggtcggctcatatctgctgggcacctgcattcggcctgatatcaatgtcgacgttgcgttaacaatgcctagggagattctccaggacaaggatggactgaatcagcgatatttccgaaagagggcactctacttggcccatctggcacaccacctggcccaggatccattgtttgggtccgtctgtttcagttacacaaatggctgccatttgaaaccctccctgttgttgcgaccgaggggcaaggacgagaggcttgtgactgtcagattacacccctgcccccctcccgatttctttcggccatgtcgcttactgccgactaaaaacaatgtcagatcagcctggtataggggtcagtccccagccggagatggaagtcccgaaccgcctacacccaggtacaacacctgggtgcttcaagatacggtgttggagtctcacctgcagcttctcagcaccattctttcaagtgcgcaagggctgaaggatggagtcgcactccttaaagtgtggctacgacagcgagagctggacaaaggtcaaggaggctttactgggtttctggttagtatgttggtggtgttcctggtgtctactcgcaaaatccataccaccatgtcaggctatcaggttctcagatctgtcctgcaatttcttgcaacaacagacctgacagtgaacgggataagtctgtgtctcagctccgacccctccctcccagcactggcagacttccaccaagccttcagtgtggtatttcttgactcatctgggcacttaaacctatgcgccgacgtgacagcctctacttatcaccaggtccagcatgaagccagactctcaatgatgctgttggatagtagggcagacgacggcttccacctcctgctaatgactcccaaacctatgatccgggctttcgatcacgtgctgcatcttagaccgctgtcccggctgcaggccgcatgtcaccggctgaaactgtggcccgagctccaggacaacgggggagactacgtgtctgccgcactgggtcccttgactacactgttggagcaaggcctcggcgcacgccttaacttgctcgcccatagcagacctcccgttcccgagtgggatattagccaggatccacctaagcacaaagactccgggaccctcaccctcggcctcttgctccggcctgagggtctcaccagtgtcctcgagcttggccctgaggcagaccagcccgaagccgctaagttccgtcagttctggggatctcgtagcgagcttaggagattccaggatggggctatacgggaagcagtggtgtgggaggcagcctcaatgtcccagaagagactgattccccatcaagtggtgacgcatcttttggccctccacgccgatatcccagaaacctgtgtacattacgtggggggaccccttgacgcactcatccagggcctgaaggagaccagctccacaggggaggaggcactggttgctgccgttcgatgttacgatgacctatcgagactactgtggggtcttgagggcctgccactgaccgtgtccgcggtccagggtgcgcaccctgtcctgcgttacaccgaagtatttccacctactccagtcaggcctgcattctcattctacgaaaccttgcgagagcgaagttctctcctgccaagactggacaaaccgtgtcccgcttatgtggaaccaatgaccgtggtctgccatcttgagggctccggtcagtggccccaggacgcggaagccgttcagagagtcagagctgcctttcagcttcgcctggccgaactgctgactcagcagcatggcctccagtgcagagcgacggcgacccacactgacgtactcaaagacggttttgtctttcggattcgggtggcgtaccagcgcgagcctcaaattcttaaggaggtacagtcccccgaggggatgatttctctgcgagataccgcagcttcccttcgattggagcgcgatactaggcagttacctcttctgacttcagccctgcacgggctgcagcagcagcatccagcatttagcggagtggccagactcgccaagcgctgggtcagagctcagttgctgggggagggcttcgctgacgagtccttggacctggttgctgccgctctgtttctccatcctgagccctttacgccgccttcatccccgcaggtcggtttcctccgctttttgtttctggtcagtacttttgattggaagaataaccctctgtttgtgaatctgaataatgaacttacagtggaggaacaggtggaaattcggtctggattcctcgcagctcgcgctcagctgccagtgatggtcatcgtcacacctcaggaccgaaagaatagcgtctggacacaggacggtccgagcgcccagatccttcagcaactggtagtgcttgcagccgaggcactgccaatgctggagaaacagcttatggatcctcgaggacccggagatatccggacagtgttcagacctccactcgatatctatgatgtcctcatcaggctgtcaccacgtcatatacctcgacacagacaggctgtggattctccagccgcttctttctgtcggggtctcctgtcccaaccaggccctagctccctcatgccggtcctcgggtacgacccccctcagctgtaccttacccagctcagggaggcctttggcgacctggccttgttcttctacgaccagcacgggggtgaagtgataggggtactgtggaagccgacttcatttcaaccccagcctttcaaggcgagttccacaaaaggacgcatggttatgtcacgagggggagagttagtcatggtacctaatgtcgaggctatcctggaggatttcgccgtcttgggagagggtctggttcagactgtagaggctcgcagcgagaggtggaccgtatag

SEQ ID NO: 213693 - DNA, 3024 bp, Artificial Sequence
  derived and/or modified sequence
atggggcctgcacccgctggtgaacaactgaggggagccaccggcgagccggaggtcatggaaccagccctggaggggaccgggaaggaaggcaagaaagcttcttcgcgcaagagaacacttgccgagcctccagctaaaggtctgctgcagcccgttaaactgtcacgagccgaattgtataaggagcctacaaatgaggagttgaacaggctgcgggagacggaaatcctgttccattcaagcctactccgacttcaggtggaagaactcctcaaggaggtgagactgtcagagaaaaaaaaggacaggattgacgctttccttcgcgaagtgaatcagcgggtggtgcgggtgccgagtgtcccagagacagagcttaccgaccaggcttggttgcctgcaggagtgcgagtgccattgcaccaggtaccttatgccgtgaagggttgctttcgcttcttaccaccagctcaggtgaccgtagttggatcctatttgttaggcacctgcattaggccggacataaacgttgatgttgcgctcaccatgccacgggagatccttcaggataaagacggattgaaccagcgctattttcgtaagagagcgttgtaccttgcacacttagcgcaccatctggcccaggatcctctctttggcagtgtgtgtttctcctacaccaatgggtgtcatctgaagccatccctcttacttagacccaggggtaaggatgagcgcctggtgactgtccgcctacatccctgcccccctcctgattttttcagaccctgtcggcttcttccaaccaagaataatgtcagatccgcttggtatcgagggcagtcccctgccggtgatggttctcctgaacctcccaccccgcgatacaatacgtgggtcttgcaggatacagtgctggagtcacatctgcaactgctgtcaaccatcctctcaagtgcacagggtcttaaggatggggtggccttgctgaaggtgtggctgcggcagcgcgaactcgacaagggccaggggggttttacaggttttcttgtctctatgctggtggtcttcttagttagcaccaggaaaatccacaccacaatgtccggctaccaagtcctgcgctctgtactccaattccttgccactactgacctgacagttaacggcattagtttatgtctgtcctccgatcctagcctacccgcattagcagactttcaccaggcttttagtgtggtgtttttggatagttccggccatttaaacctctgtgctgacgtaactgcctccacttatcaccaggtgcagcacgaggcacgactgtccatgatgctgttggattctcgggctgatgacgggttccacctcctgttgatgacacccaaacccatgatcagagcgttcgatcatgttttacacttacggcctctttcaaggctacaagccgcttgtcatagattaaagctctggcccgagttgcaagataatggaggggattacgtgtccgctgctctggggccactgacgaccctgctggagcagggcttgggcgcacgactgaacttgttagcccacagtagacccccagtgccagaatgggacatctctcaggatccgcctaagcacaaggactcaggtaccctgaccctcgggctcctgctgcgtcctgaaggtcttacgagcgtgttggagttgggccctgaagctgatcagcctgaggccgctaagtttcgccagttttgggggagtagatccgagttgcgtcggttccaggacggcgcaattagagaggctgttgtgtgggaggccgcaagcatgagtcagaagagactgataccacaccaggtggtgacacatcttctcgctttacacgcagatatacccgagacctgcgttcactacgtggggggtccgctggatgctctgatccagggtctgaaggagacatcaagcaccggggaagaggctctggtcgccgctgtccgatgctatgacgacctgagcaggctgctctggggcttggagggcctgcctttgactgtgtctgccgtccagggagctcatcccgttctgagatatactgaagtgttcccccctacccctgtccgacccgctttcagcttctatgagactcttagggagcgtagtagtctgctgccgagactagacaaaccatgtccagcctacgtggagcccatgaccgttgtctgccatctcgagggctcgggacagtggccacaggatgctgaagcagtccagagagtgagagcagctttccagttgcgcttagcagagctcctgacacagcagcatggactccagtgcagagcgaccgccacacataccgatgtcctcaaggatgggttcgttttcaggatccgagttgcctaccagcgcgagccgcagatcctcaaagaggtgcaaagccccgagggtatgatctcattacgagatacggctgctagtttaagattggaacgcgacacccgccagctgccccttctgacttccgcacttcacggcttgcagcaacagcatcccgcttttagcggggtggcacggctggctaagagatgggttcgagcacagttgctaggcgagggatttgccgatgaatcattagatctcgtggcagccgctctgtttctccatccagaaccttttacaccaccctcctctcctcaggttggatttctgcgcttcctgttcttagtgagtacatttgactggaaaaacaatccactgttcgtaaacctgaataatgaattgacggtggaggaacaggtcgagatacggagcggctttctggccgctagggcccagctgcctgtgatggttattgtcacaccgcaagaccgaaagaatagtgtctggacgcaggatggaccaagtgcacagattctgcagcagctcgttgtccttgccgctgaggccctccccatgttagaaaaacagctcatggatccacggggtcccggagatatcagatgggatccagctaaaatgtggccgttctag

SEQ ID NO: 213694 - DNA, 603 bp, Artificial Sequence
  derived and/or modified sequence
atggtgatcgtcaccccacaggatcggaaaaactcggtgtggacccaggatggcccatcagcccagattttgcaacaattagtggtcttagcagctgaagcacttcccatgctggaaaagcaactcatggaccctcgtggtccaggcgatatcagaactgtgttcaggccaccactagacatttacgacgtgctgatccggctctctcccagacacatccccagacaccggcaagccgtggattcccccgcagcatcgttctgcaggggactactaagccagcctggacccagttcacttatgcctgtcctgggttacgaccctccacagctttacctgactcagctgcgcgaggcgttcggggatttggcactattcttctacgaccagcatggtggagaagtaatcggggtactgtggaagcccacctcattccaacctcagcctttcaaagcatcttccaccaagggcagaatggtcatgagcagaggtggcgagttagtgatggtgcccaacgtggaggccatcctcgaggactttgctgtcttaggtgagggcctggttcagacagtggaggcacgctctgaaaggtggacggtctag

SEQ ID NO: 213695 - DNA, 3072 bp, Artificial Sequence
  derived and/or modified sequence
atgggtcccgcacccgctggcgagcaattaagaggtgccactggcgagcccgaagtgatggagcccgcactggaaggaactggtaaagaaggtaagaaggctagttctaggaagaggacgctggccgagccaccagccaagggcttgctacaacccgtgaaactgtcccgcgcagagctttacaaggaacccactaatgaggaactcaaccggttgcgcgaaaccgagatcctgttccactcgtcgctccttagactgcaggtggaagaactcctcaaggaggtccggctgtcagagaagaaaaaggacaggattgacgcttttcttagagaggtgaaccagagagtggtgcgagtaccgagcgtgccagagaccgagttaactgatcaagcttggttgcctgccggtgtgagagtgcccctccaccaagtaccctacgcagtaaaaggctgcttccgcttcctgcctcccgctcaggtcacggtggtggggtcatacctgctcggcacctgcataagaccagatatcaacgtggatgtcgctctcactatgccaagagaaattctacaggacaaggacggcttgaatcagaggtactttcgtaagagagccttgtatttggcccacttagcgcaccatcttgcacaggaccctctgtttggcagcgtatgtttttcctatactaatggctgtcacctgaaacccagtttgctcctgaggccacggggaaaagacgagcgtttggtcaccgtcagactgcatccctgccctccacccgattttttcaggccttgtcggctactgccaaccaagaacaacgtgcggtctgcatggtacagaggacaatctcccgcaggcgatggctcgccagagcctcccacgcctcggtacaatacctgggtgttacaagacacagtcctggagagccacctccagctccttagtacaattctcagctcagcacaggggctgaaggatggggtggctctgctgaaagtgtggcttcggcaaagggagttggacaagggccagggaggtttcaccggttttctggtgagtatgctagtggtgtttctcgtaagtacccgaaaaatccacactactatgtcagggtaccaagtcctccgctccgtgttacaatttctcgccacaaccgacttaacagtgaacggaatctcactttgtctctccagtgacccgtcactgcctgcactggccgatttccatcaggccttctcagtggtgttcctggattcctccggacatttgaacctgtgtgccgacgtcacagcctccacgtaccaccaggtacagcacgaagccaggctgtccatgatgctgctggacagccgcgcagatgacggattccacctgctgcttatgacgcccaaacccatgattagggccttcgatcatgttcttcatcttcgccctctctcccgactacaggcagcctgccacaggctcaaattgtggccagagctgcaggacaacgggggtgactacgtgagtgctgccctggggcctctaaccactctgctagaacagggccttggcgctagactgaatctgttagcccactcccggccacctgttcccgaatgggatatctcccaggaccctccaaaacacaaagattccgggacattgactctgggactgctgctgagacctgaaggactcacatcagtgctggagctaggtccagaagctgatcagcctgaagcagctaaatttcggcagttttgggggtctagaagtgagcttcgaagattccaggacggggcaatcagagaagctgtggtttgggaagcggcttcaatgagtcagaaacgattaattcctcatcaggttgtcacccacttactggcactccacgcagacattcccgagacatgcgtgcactatgtaggtggccctctcgacgctctgattcagggcttaaaggaaactagcagtacaggcgaggaagctcttgtcgcagcagtgcgctgttacgatgatttgagccgcctcctatggggactggaaggcttgcctttgaccgtctctgccgtgcagggggctcacccggtactgagatacacggaggtgtttcctcccacacccgttagacctgcatttagcttttacgaaacgttgcgagagcgtagttccttgcttccacgtctcgacaaaccttgccccgcatacgtggagccgatgacagtcgtgtgtcaccttgagggctccgggcaatggccacaggatgccgaagctgtgcagcgcgtgcgcgctgcctttcaattgcgcctcgccgagttgttgactcaacagcacggcctgcagtgcagagcaaccgcaacccataccgacgtcctaaaagacgggttcgtgttccgtattcgcgttgcataccagcgcgagcctcagattttgaaggaggtccagtcgccagagggaatgatctctctgcgcgacacagctgcctctctgcgtcttgagcgcgacactcgccagttgcctcttctgactagcgccctccatggcctgcagcagcagcatccagccttctcgggggtggctagactggcgaagcgctgggtgagggcccagctgcttggtgaaggattcgccgacgagtcacttgacctcgtggctgccgctctttttctgcatccggagccattcacgcccccttcttcccctcaggtcgggtttctaagatttctttttctggtctccactttcgattggaagaataatcccctgtttgtgaaccttaataacgagcttaccgtggaggagcaggtcgaaatcaggtcaggatttttagcagcccgagcccagctgcctgtaatggtgatagttacgcctcaggataggaagaactccgtgtggacacaagacggcccttcagcacaaattttacagcaactggtcgtgctggcagcagaggcactcccaatgctggagaaacagctcatggatcctaggggccctggtgatattcgcatgggtccttctgaaaacgttgctctgctgtctcacataacggatactgagcagtggaagggggctatctgtgtgtag

SEQ ID NO: 213696 - DNA, 3285 bp, Artificial Sequence
  derived and/or modified sequence
atgggcccagccccagccggagagcagctccggggagctacaggagagccggaggtcatggaacccgcattggaaggaactgggaaagaagggaaaaaggcctcttcgcggaaacgcacactggcagaacctccggctaagggattgcttcagccagttaaacttagcagggcagaactatataaggagccaacaaacgaggagcttaatcgcctgcgggagaccgaaatcctgtttcactctagtcttctgcgtctccaggtcgaggagctgctgaaggaggtccgtcttagcgagaagaaaaaggataggatcgacgctttcttgagagaggttaaccagcgcgtggtgcgggtgcccagcgttcccgaaactgaggaaattctgcaagacaaagatggacttaaccagcggtactttcggaaaagagccctttatttagcccatctggcacatcacttagcacaagaccctctgttcggcagtgtctgctttagctacacgaacggctgccacctgaaaccttcactcttactgaggccaagagggaaggatgagagacttgtgactgtgagacttcacccttgtccgcctcccgacttttttagaccgtgtaggctcttacccacaaagaataatgtgcgctctgcgtggtaccgaggtcagagcccagctggtgatggttccccggaaccgcctacaccaagatacaatacatgggttcttcaggataccgtgctggaaagccacctgcagctgctctcaaccatcctgagttccgcgcagggtttaaaggatggcgtggctctgctgaaggtgtggcttaggcaacgggagttggacaaaggacagggcggtttcaccggtttccttgtttccatgcttgtcgtattcctggtctccaccagaaagatccacaccacaatgtcaggttatcaggtgctgcggtctgtgcttcagttcctcgctactaccgatcttacagttaacgggatttccctgtgtcttagcagcgatccaagtctccctgccctcgccgactttcaccaggcattctctgtggtatttctggactcttcaggacatctcaacctgtgtgcggacgtaactgcgtctacctaccaccaggggtggagtctgctgtggctgcaagtccaacacgaagcaagactctccatgatgctccttgacagtagggccgacgatgggtttcacctcctcttgatgaccccaaaacctatgattagagcttttgaccacgtcctccacctgagaccattgagcaggctgcaggctgcttgccaccggttaaaactatggcccgaactgcaggacaatggaggagattatgtgagcgcagccctgggcccactgaccaccctcttagagcagggcttgggcgctagacttaacttactggcccacagcaggcctccagttcccgaatgggacatttctcaggaccccccaaagcataaagacagtggcacccttacgctgggcctccttctccggcctgaaggattaaccagcgtgctcgagctggggcctgaagctgaccagcccgaggcggctaagtttcgtcagttttggggatccagatccgaactgcggaggttccaggacggcgctattcgagaggcggtggtatgggaagccgcttcaatgtcgcagaagcgactgattcctcaccaggttgttacacatttactggcactgcatgctgatatcccggaaacatgtgtccactatgtgggtggcccactcgacgccctgatccaaggactcaaggagacatcaagcactggggaagaggcgctggtcgcagcggtccggtgctacgatgatctttcacggctactctggggtctggagggtctgcctttgaccgtgtcagctgtccagggtgcccatcctgtccttaggtacactgaagtgttccccccaacacctgtgcgaccggctttttccttttacgaaactctccgcgagcggtcctcactactcccccgtctggataagccctgcccagcctatgtggaacctatgaccgtggtctgccatctcgagggcagcgggcaatggccccaagacgccgaggcagttcagagagtacgcgcagctttccagctaaggcttgctgagctcctcactcagcagcatggtttgcagtgtagggctaccgccacccacactgatgtcctgaaggatgggtttgtgttccgtatccgcgtggcttaccagcgagaaccccagattcttaaggaagttcagtctccggagggcatgattagtttgagggatacagccgcatcactgagactggaacgcgataccaggcaattacctctgctaacttccgctctgcacgggctccaacagcagcatcctgccttttctggcgtggcacggctagcgaaaagatgggtcagagctcagctcctcggtgagggcttcgctgacgagtctttagatttagtggctgccgctttattcttacatccagaaccttttacgccaccatctagccctcaggtagggttccttagatttctgtttctggtgtccacttttgactggaaaaataatccacttttcgtgaacctcaataatgaactgaccgtggaggaacaggttgagatccggagcggcttcctggcagcaagggcacagctcccagtcatggtaatcgttacaccacaggataggaagaattcggtttggacacaggatggcccttccgcccagatactgcagcagttggttgtgctggctgctgaggcccttccaatgctggaaaaacagctcatggacccaaggggacccggagacatccggacagtatttaggcccccattggatatctatgacgtgttgatacgcctttcccctaggcacatacctagacaccgacaggctgtggattcaccagctgcctcattctgcaggggtctactgtcccagcccggaccctccagcttgatgccagtgctggggtacgatcccccacagctgtacttaacacaattgcgggaggcctttggtgatctcgcactgtttttttacgatcagcacggcggagaagtgatcggggtcctttggaagccaacaagtttccaaccgcagccttttaaagcatcttccactaagggacgcatggtcatgagcagagggggagagttagtcatggtcccaaacgtggaggcaatcttggaggactttgcagtgcttggagaaggattagtccagactgtcgaggcacgatcggaacgatggacggtgtag

SEQ ID NO: 213697 - DNA, 2109 bp, Artificial Sequence
  derived and/or modified sequence
atgatgcttctggacagccgggcagatgatggattccacctactcttaatgacaccaaaacccatgatccgggctttcgaccacgtattgcatctacggccactgtcccgtttacaggccgcatgccacaggctgaaactgtggcctgagcttcaggacaacggaggcgactatgtcagcgccgcactggggccactcactacattgctggagcagggactcggggctaggctcaatctgctggctcactctcggccaccggtgcctgagtgggatatctcccaggacccaccaaagcacaaagacagtggcacgctcaccctcggcttgctcctgcgacccgagggactcacaagcgtgctggagctcgggcctgaagccgatcagccagaggcggctaaatttagacagttctgggggagtagatcagaactacggaggtttcaggacggggcaataagagaagctgtcgtgtgggaggccgcatctatgtctcagaaacgcctgatcccccatcaggtggtcacgcacttgctggcactccacgctgacattcccgaaacctgtgtgcattatgtgggtggtcccctggatgcattgatccaggggctcaaggagacatcatctactggagaggaagcattagtggcagcggtcagatgctacgacgatctgagcagactcctgtggggactcgagggattaccgttgactgtctccgccgtccagggtgcccaccctgtgcttcgttatacagaagtctttccacctacgcccgttagaccagccttttcattctatgaaacccttcgagaaaggtcatccctgttgcctaggttagataagccttgccccgcttatgttgagcctatgaccgttgtttgtcacctggagggctctggccaatggcctcaggacgccgaggcggttcagcgagtgcgagccgcattccagctccggttggcagagctgcttacgcaacagcacggcttgcagtgtcgagccacggcgacccacacagacgttttgaaggacggattcgtctttcgcattcgggtcgcgtatcagagagaaccacagatcctaaaggaagtccagagcccagaagggatgatcagtctcagagacaccgcggcttctctaagactagaacgagacacgcgccagcttcctctactgacttctgcactccatgggctgcaacagcagcatccagcgttctccggggtggcaagactagcgaagcggtgggtgagggctcagctcctgggcgaagggtttgctgatgaatcgttggacctcgttgctgccgctctgtttctacatcccgagcccttcactcctccttcaagcccgcaggtggggttcctccggttcctgtttctcgtgtcaacattcgattggaaaaacaatcctctcttcgtgaatcttaacaacgagttaacggttgaagagcaggtggaaattagatcagggttcctagctgcacgcgcacagctgccagttatggttatagtaaccccacaagaccgcaagaatagtgtgtggacgcaggacggcccatctgcccagatactccagcaactggttgttttagccgcagaggccttaccgatgctggagaaacagttgatggatcctcgcggaccgggtgatatccggaccgtgttcaggcctcctctggacatctacgatgtgctcatccgcctgagtcccaggcacatccccaggcatagacaggccgtcgactctcccgctgcatccttctgccggggattattgtcacagccgggtcctagcagcctcatgcccgtgctgggatacgatccccctcagctttacttaacgcagttgagagaggcattcggggacctggctctgtttttttatgatcaacacgggggagaagtgataggcgtactgtggaagcccaccagcttccagccccagccattcaaagcatcttccaccaagggcaggatggtcatgagcagaggtggcgaactggtcatggtgcccaacgtcgaggccatcctggaagactttgcagtcctgggagaaggcctcgtgcagactgtcgaagctaggtctgaaagatggaccgtctag

SEQ ID NO: 213698 - DNA, 3441 bp, Artificial Sequence
  derived and/or modified sequence
atgggccccgcccccgccggcgagcagctgagaggcgccaccggcgagcccgaggtgatggagcccgccctggagggcaccggcaaggagggcaagaaggccagcagcagaaagagaaccctggccgagccccccgccaagggcctgctgcagcccgtgaagctgagcagagccgagctgtacaaggagcccaccaacgaggagctgaacagactgagagagaccgagatcctgttccacagcagcctgctgagactgcaggtggaggagctgctgaaggaggtgagactgagcgagaagaagaaggacagaatcgacgccttcctgagagaggtgaaccagagagtggtgagagtgcccagcgtgcccgagaccgagctgaccgaccaggcctggctgcccgccggcgtgagagtgcccctgcaccaggtgccctacgccgtgaagggctgcttcagattcctgccccccgcccaggtgaccgtggtgggcagctacctgctgggcacctgcatcagacccgacatcaacgtggacgtggccctgaccatgcccagagagatcctgcaggacaaggacggcctgaaccagagatacttcagaaagagagccctgtacctggcccacctggcccaccacctggcccaggaccccctgttcggcagcgtgtgcttcagctacaccaacggctgccacctgaagcccagcctgctgctgagacccagaggcaaggacgagagactggtgaccgtgagactgcacccctgccccccccccgacttcttcagaccctgcagactgctgcccaccaagaacaacgtgagaagcgcctggtacagaggccagagccccgccggcgacggcagccccgagccccccacccccagatacaacacctgggtgctgcaggacaccgtgctggagagccacctgcagctgctgagcaccatcctgagcagcgcccagggcctgaaggacggcgtggccctgctgaaggtgtggctgagacagagagagctggacaagggccagggcggcttcaccggcttcctggtgagcatgctggtggtgttcctggtgagcaccagaaagatccacaccaccatgagcggctaccaggtgctgagaagcgtgctgcagttcctggccaccaccgacctgaccgtgaacggcatcagcctgtgcctgagcagcgaccccagcctgcccgccctggccgacttccaccaggccttcagcgtggtgttcctggacagcagcggccacctgaacctgtgcgccgacgtgaccgccagcacctaccaccaggtgcagcacgaggccagactgagcatgatgctgctggacagcagagccgacgacggcttccacctgctgctgatgacccccaagcccatgatcagagccttcgaccacgtgctgcacctgagacccctgagcagactgcaggccgcctgccacagactgaagctgtggcccgagctgcaggacaacggcggcgactacgtgagcgccgccctgggccccctgaccaccctgctggagcagggcctgggcgccagactgaacctgctggcccacagcagaccccccgtgcccgagtgggacatcagccaggacccccccaagcacaaggacagcggcaccctgaccctgggcctgctgctgagacccgagggcctgaccagcgtgctggagctgggccccgaggccgaccagcccgaggccgccaagttcagacagttctggggcagcagaagcgagctgagaagattccaggacggcgccatcagagaggccgtggtgtgggaggccgccagcatgagccagaagagactgatcccccaccaggtggtgacccacctgctggccctgcacgccgacatccccgagacctgcgtgcactacgtgggcggccccctggacgccctgatccagggcctgaaggagaccagcagcaccggcgaggaggccctggtggccgccgtgagatgctacgacgacctgagcagactgctgtggggcctggagggcctgcccctgaccgtgagcgccgtgcagggcgcccaccccgtgctgagatacaccgaggtgttcccccccacccccgtgagacccgccttcagcttctacgagaccctgagagagagaagcagcctgctgcccagactggacaagccctgccccgcctacgtggagcccatgaccgtggtgtgccacctggagggcagcggccagtggccccaggacgccgaggccgtgcagagagtgagagccgccttccagctgagactggccgagctgctgacccagcagcacggcctgcagtgcagagccaccgccacccacaccgacgtgctgaaggacggcttcgtgttcagaatcagagtggcctaccagagagagccccagatcctgaaggaggtgcagagccccgagggcatgatcagcctgagagacaccgccgccagcctgagactggagagagacaccagacagctgcccctgctgaccagcgccctgcacggcctgcagcagcagcaccccgccttcagcggcgtggccagactggccaagagatgggtgagagcccagctgctgggcgagggcttcgccgacgagagcctggacctggtggccgccgccctgttcctgcaccccgagcccttcaccccccccagcagcccccaggtgggcttcctgagattcctgttcctggtgagcaccttcgactggaagaacaaccccctgttcgtgaacctgaacaacgagctgaccgtggaggagcaggtggagatcagaagcggcttcctggccgccagagcccagctgcccgtgatggtgatcgtgaccccccaggacagaaagaacagcgtgtggacccaggacggccccagcgcccagatcctgcagcagctggtggtgctggccgccgaggccctgcccatgctggagaagcagctgatggaccccagaggccccggcgacatcagaaccgtgttcagaccccccctggacatctacgacgtgctgatcagactgagccccagacacatccccagacacagacaggccgtggacagccccgccgccagcttctgcagaggcctgctgagccagcccggccccagcagcctgatgcccgtgctgggctacgaccccccccagctgtacctgacccagctgagagaggccttcggcgacctggccctgttcttctacgaccagcacggcggcgaggtgatcggcgtgctgtggaagcccaccagcttccagccccagcccttcaaggccagcagcaccaagggcagaatggtgatgagcagaggcggcgagctggtgatggtgcccaacgtggaggccatcctggaggacttcgccgtgctgggcgagggcctggtgcagaccgtggaggccagaagcgagagatggaccgtgtag

SEQ ID NO: 213699 - DNA, 3024 bp, Artificial Sequence
  derived and/or modified sequence
atgggccccgcccccgccggcgagcagctgagaggcgccaccggcgagcccgaggtgatggagcccgccctggagggcaccggcaaggagggcaagaaggccagcagcagaaagagaaccctggccgagccccccgccaagggcctgctgcagcccgtgaagctgagcagagccgagctgtacaaggagcccaccaacgaggagctgaacagactgagagagaccgagatcctgttccacagcagcctgctgagactgcaggtggaggagctgctgaaggaggtgagactgagcgagaagaagaaggacagaatcgacgccttcctgagagaggtgaaccagagagtggtgagagtgcccagcgtgcccgagaccgagctgaccgaccaggcctggctgcccgccggcgtgagagtgcccctgcaccaggtgccctacgccgtgaagggctgcttcagattcctgccccccgcccaggtgaccgtggtgggcagctacctgctgggcacctgcatcagacccgacatcaacgtggacgtggccctgaccatgcccagagagatcctgcaggacaaggacggcctgaaccagagatacttcagaaagagagccctgtacctggcccacctggcccaccacctggcccaggaccccctgttcggcagcgtgtgcttcagctacaccaacggctgccacctgaagcccagcctgctgctgagacccagaggcaaggacgagagactggtgaccgtgagactgcacccctgccccccccccgacttcttcagaccctgcagactgctgcccaccaagaacaacgtgagaagcgcctggtacagaggccagagccccgccggcgacggcagccccgagccccccacccccagatacaacacctgggtgctgcaggacaccgtgctggagagccacctgcagctgctgagcaccatcctgagcagcgcccagggcctgaaggacggcgtggccctgctgaaggtgtggctgagacagagagagctggacaagggccagggcggcttcaccggcttcctggtgagcatgctggtggtgttcctggtgagcaccagaaagatccacaccaccatgagcggctaccaggtgctgagaagcgtgctgcagttcctggccaccaccgacctgaccgtgaacggcatcagcctgtgcctgagcagcgaccccagcctgcccgccctggccgacttccaccaggccttcagcgtggtgttcctggacagcagcggccacctgaacctgtgcgccgacgtgaccgccagcacctaccaccaggtgcagcacgaggccagactgagcatgatgctgctggacagcagagccgacgacggcttccacctgctgctgatgacccccaagcccatgatcagagccttcgaccacgtgctgcacctgagacccctgagcagactgcaggccgcctgccacagactgaagctgtggcccgagctgcaggacaacggcggcgactacgtgagcgccgccctgggccccctgaccaccctgctggagcagggcctgggcgccagactgaacctgctggcccacagcagaccccccgtgcccgagtgggacatcagccaggacccccccaagcacaaggacagcggcaccctgaccctgggcctgctgctgagacccgagggcctgaccagcgtgctggagctgggccccgaggccgaccagcccgaggccgccaagttcagacagttctggggcagcagaagcgagctgagaagattccaggacggcgccatcagagaggccgtggtgtgggaggccgccagcatgagccagaagagactgatcccccaccaggtggtgacccacctgctggccctgcacgccgacatccccgagacctgcgtgcactacgtgggcggccccctggacgccctgatccagggcctgaaggagaccagcagcaccggcgaggaggccctggtggccgccgtgagatgctacgacgacctgagcagactgctgtggggcctggagggcctgcccctgaccgtgagcgccgtgcagggcgcccaccccgtgctgagatacaccgaggtgttcccccccacccccgtgagacccgccttcagcttctacgagaccctgagagagagaagcagcctgctgcccagactggacaagccctgccccgcctacgtggagcccatgaccgtggtgtgccacctggagggcagcggccagtggccccaggacgccgaggccgtgcagagagtgagagccgccttccagctgagactggccgagctgctgacccagcagcacggcctgcagtgcagagccaccgccacccacaccgacgtgctgaaggacggcttcgtgttcagaatcagagtggcctaccagagagagccccagatcctgaaggaggtgcagagccccgagggcatgatcagcctgagagacaccgccgccagcctgagactggagagagacaccagacagctgcccctgctgaccagcgccctgcacggcctgcagcagcagcaccccgccttcagcggcgtggccagactggccaagagatgggtgagagcccagctgctgggcgagggcttcgccgacgagagcctggacctggtggccgccgccctgttcctgcaccccgagcccttcaccccccccagcagcccccaggtgggcttcctgagattcctgttcctggtgagcaccttcgactggaagaacaaccccctgttcgtgaacctgaacaacgagctgaccgtggaggagcaggtggagatcagaagcggcttcctggccgccagagcccagctgcccgtgatggtgatcgtgaccccccaggacagaaagaacagcgtgtggacccaggacggccccagcgcccagatcctgcagcagctggtggtgctggccgccgaggccctgcccatgctggagaagcagctgatggaccccagaggccccggcgacatcagatgggaccccgccaagatgtggcccttctag

SEQ ID NO: 213700 - DNA, 603 bp, Artificial Sequence
  derived and/or modified sequence
atggtgatcgtgaccccccaggacagaaagaacagcgtgtggacccaggacggccccagcgcccagatcctgcagcagctggtggtgctggccgccgaggccctgcccatgctggagaagcagctgatggaccccagaggccccggcgacatcagaaccgtgttcagaccccccctggacatctacgacgtgctgatcagactgagccccagacacatccccagacacagacaggccgtggacagccccgccgccagcttctgcagaggcctgctgagccagcccggccccagcagcctgatgcccgtgctgggctacgaccccccccagctgtacctgacccagctgagagaggccttcggcgacctggccctgttcttctacgaccagcacggcggcgaggtgatcggcgtgctgtggaagcccaccagcttccagccccagcccttcaaggccagcagcaccaagggcagaatggtgatgagcagaggcggcgagctggtgatggtgcccaacgtggaggccatcctggaggacttcgccgtgctgggcgagggcctggtgcagaccgtggaggccagaagcgagagatggaccgtgtag

SEQ ID NO: 213701 - DNA, 3072 bp, Artificial Sequence
  derived and/or modified sequence
atgggccccgcccccgccggcgagcagctgagaggcgccaccggcgagcccgaggtgatggagcccgccctggagggcaccggcaaggagggcaagaaggccagcagcagaaagagaaccctggccgagccccccgccaagggcctgctgcagcccgtgaagctgagcagagccgagctgtacaaggagcccaccaacgaggagctgaacagactgagagagaccgagatcctgttccacagcagcctgctgagactgcaggtggaggagctgctgaaggaggtgagactgagcgagaagaagaaggacagaatcgacgccttcctgagagaggtgaaccagagagtggtgagagtgcccagcgtgcccgagaccgagctgaccgaccaggcctggctgcccgccggcgtgagagtgcccctgcaccaggtgccctacgccgtgaagggctgcttcagattcctgccccccgcccaggtgaccgtggtgggcagctacctgctgggcacctgcatcagacccgacatcaacgtggacgtggccctgaccatgcccagagagatcctgcaggacaaggacggcctgaaccagagatacttcagaaagagagccctgtacctggcccacctggcccaccacctggcccaggaccccctgttcggcagcgtgtgcttcagctacaccaacggctgccacctgaagcccagcctgctgctgagacccagaggcaaggacgagagactggtgaccgtgagactgcacccctgccccccccccgacttcttcagaccctgcagactgctgcccaccaagaacaacgtgagaagcgcctggtacagaggccagagccccgccggcgacggcagccccgagccccccacccccagatacaacacctgggtgctgcaggacaccgtgctggagagccacctgcagctgctgagcaccatcctgagcagcgcccagggcctgaaggacggcgtggccctgctgaaggtgtggctgagacagagagagctggacaagggccagggcggcttcaccggcttcctggtgagcatgctggtggtgttcctggtgagcaccagaaagatccacaccaccatgagcggctaccaggtgctgagaagcgtgctgcagttcctggccaccaccgacctgaccgtgaacggcatcagcctgtgcctgagcagcgaccccagcctgcccgccctggccgacttccaccaggccttcagcgtggtgttcctggacagcagcggccacctgaacctgtgcgccgacgtgaccgccagcacctaccaccaggtgcagcacgaggccagactgagcatgatgctgctggacagcagagccgacgacggcttccacctgctgctgatgacccccaagcccatgatcagagccttcgaccacgtgctgcacctgagacccctgagcagactgcaggccgcctgccacagactgaagctgtggcccgagctgcaggacaacggcggcgactacgtgagcgccgccctgggccccctgaccaccctgctggagcagggcctgggcgccagactgaacctgctggcccacagcagaccccccgtgcccgagtgggacatcagccaggacccccccaagcacaaggacagcggcaccctgaccctgggcctgctgctgagacccgagggcctgaccagcgtgctggagctgggccccgaggccgaccagcccgaggccgccaagttcagacagttctggggcagcagaagcgagctgagaagattccaggacggcgccatcagagaggccgtggtgtgggaggccgccagcatgagccagaagagactgatcccccaccaggtggtgacccacctgctggccctgcacgccgacatccccgagacctgcgtgcactacgtgggcggccccctggacgccctgatccagggcctgaaggagaccagcagcaccggcgaggaggccctggtggccgccgtgagatgctacgacgacctgagcagactgctgtggggcctggagggcctgcccctgaccgtgagcgccgtgcagggcgcccaccccgtgctgagatacaccgaggtgttcccccccacccccgtgagacccgccttcagcttctacgagaccctgagagagagaagcagcctgctgcccagactggacaagccctgccccgcctacgtggagcccatgaccgtggtgtgccacctggagggcagcggccagtggccccaggacgccgaggccgtgcagagagtgagagccgccttccagctgagactggccgagctgctgacccagcagcacggcctgcagtgcagagccaccgccacccacaccgacgtgctgaaggacggcttcgtgttcagaatcagagtggcctaccagagagagccccagatcctgaaggaggtgcagagccccgagggcatgatcagcctgagagacaccgccgccagcctgagactggagagagacaccagacagctgcccctgctgaccagcgccctgcacggcctgcagcagcagcaccccgccttcagcggcgtggccagactggccaagagatgggtgagagcccagctgctgggcgagggcttcgccgacgagagcctggacctggtggccgccgccctgttcctgcaccccgagcccttcaccccccccagcagcccccaggtgggcttcctgagattcctgttcctggtgagcaccttcgactggaagaacaaccccctgttcgtgaacctgaacaacgagctgaccgtggaggagcaggtggagatcagaagcggcttcctggccgccagagcccagctgcccgtgatggtgatcgtgaccccccaggacagaaagaacagcgtgtggacccaggacggccccagcgcccagatcctgcagcagctggtggtgctggccgccgaggccctgcccatgctggagaagcagctgatggaccccagaggccccggcgacatcagaatgggccccagcgagaacgtggccctgctgagccacatcaccgacaccgagcagtggaagggcgccatctgcgtgtag

SEQ ID NO: 213702 - DNA, 3285 bp, Artificial Sequence
  derived and/or modified sequence
atgggccccgcccccgccggcgagcagctgagaggcgccaccggcgagcccgaggtgatggagcccgccctggagggcaccggcaaggagggcaagaaggccagcagcagaaagagaaccctggccgagccccccgccaagggcctgctgcagcccgtgaagctgagcagagccgagctgtacaaggagcccaccaacgaggagctgaacagactgagagagaccgagatcctgttccacagcagcctgctgagactgcaggtggaggagctgctgaaggaggtgagactgagcgagaagaagaaggacagaatcgacgccttcctgagagaggtgaaccagagagtggtgagagtgcccagcgtgcccgagaccgaggagatcctgcaggacaaggacggcctgaaccagagatacttcagaaagagagccctgtacctggcccacctggcccaccacctggcccaggaccccctgttcggcagcgtgtgcttcagctacaccaacggctgccacctgaagcccagcctgctgctgagacccagaggcaaggacgagagactggtgaccgtgagactgcacccctgccccccccccgacttcttcagaccctgcagactgctgcccaccaagaacaacgtgagaagcgcctggtacagaggccagagccccgccggcgacggcagccccgagccccccacccccagatacaacacctgggtgctgcaggacaccgtgctggagagccacctgcagctgctgagcaccatcctgagcagcgcccagggcctgaaggacggcgtggccctgctgaaggtgtggctgagacagagagagctggacaagggccagggcggcttcaccggcttcctggtgagcatgctggtggtgttcctggtgagcaccagaaagatccacaccaccatgagcggctaccaggtgctgagaagcgtgctgcagttcctggccaccaccgacctgaccgtgaacggcatcagcctgtgcctgagcagcgaccccagcctgcccgccctggccgacttccaccaggccttcagcgtggtgttcctggacagcagcggccacctgaacctgtgcgccgacgtgaccgccagcacctaccaccagggctggagcctgctgtggctgcaggtgcagcacgaggccagactgagcatgatgctgctggacagcagagccgacgacggcttccacctgctgctgatgacccccaagcccatgatcagagccttcgaccacgtgctgcacctgagacccctgagcagactgcaggccgcctgccacagactgaagctgtggcccgagctgcaggacaacggcggcgactacgtgagcgccgccctgggccccctgaccaccctgctggagcagggcctgggcgccagactgaacctgctggcccacagcagaccccccgtgcccgagtgggacatcagccaggacccccccaagcacaaggacagcggcaccctgaccctgggcctgctgctgagacccgagggcctgaccagcgtgctggagctgggccccgaggccgaccagcccgaggccgccaagttcagacagttctggggcagcagaagcgagctgagaagattccaggacggcgccatcagagaggccgtggtgtgggaggccgccagcatgagccagaagagactgatcccccaccaggtggtgacccacctgctggccctgcacgccgacatccccgagacctgcgtgcactacgtgggcggccccctggacgccctgatccagggcctgaaggagaccagcagcaccggcgaggaggccctggtggccgccgtgagatgctacgacgacctgagcagactgctgtggggcctggagggcctgcccctgaccgtgagcgccgtgcagggcgcccaccccgtgctgagatacaccgaggtgttcccccccacccccgtgagacccgccttcagcttctacgagaccctgagagagagaagcagcctgctgcccagactggacaagccctgccccgcctacgtggagcccatgaccgtggtgtgccacctggagggcagcggccagtggccccaggacgccgaggccgtgcagagagtgagagccgccttccagctgagactggccgagctgctgacccagcagcacggcctgcagtgcagagccaccgccacccacaccgacgtgctgaaggacggcttcgtgttcagaatcagagtggcctaccagagagagccccagatcctgaaggaggtgcagagccccgagggcatgatcagcctgagagacaccgccgccagcctgagactggagagagacaccagacagctgcccctgctgaccagcgccctgcacggcctgcagcagcagcaccccgccttcagcggcgtggccagactggccaagagatgggtgagagcccagctgctgggcgagggcttcgccgacgagagcctggacctggtggccgccgccctgttcctgcaccccgagcccttcaccccccccagcagcccccaggtgggcttcctgagattcctgttcctggtgagcaccttcgactggaagaacaaccccctgttcgtgaacctgaacaacgagctgaccgtggaggagcaggtggagatcagaagcggcttcctggccgccagagcccagctgcccgtgatggtgatcgtgaccccccaggacagaaagaacagcgtgtggacccaggacggccccagcgcccagatcctgcagcagctggtggtgctggccgccgaggccctgcccatgctggagaagcagctgatggaccccagaggccccggcgacatcagaaccgtgttcagaccccccctggacatctacgacgtgctgatcagactgagccccagacacatccccagacacagacaggccgtggacagccccgccgccagcttctgcagaggcctgctgagccagcccggccccagcagcctgatgcccgtgctgggctacgaccccccccagctgtacctgacccagctgagagaggccttcggcgacctggccctgttcttctacgaccagcacggcggcgaggtgatcggcgtgctgtggaagcccaccagcttccagccccagcccttcaaggccagcagcaccaagggcagaatggtgatgagcagaggcggcgagctggtgatggtgcccaacgtggaggccatcctggaggacttcgccgtgctgggcgagggcctggtgcagaccgtggaggccagaagcgagagatggaccgtgtag

SEQ ID NO: 213703 - DNA, 2109 bp, Artificial Sequence
  derived and/or modified sequence
atgatgctgctggacagcagagccgacgacggcttccacctgctgctgatgacccccaagcccatgatcagagccttcgaccacgtgctgcacctgagacccctgagcagactgcaggccgcctgccacagactgaagctgtggcccgagctgcaggacaacggcggcgactacgtgagcgccgccctgggccccctgaccaccctgctggagcagggcctgggcgccagactgaacctgctggcccacagcagaccccccgtgcccgagtgggacatcagccaggacccccccaagcacaaggacagcggcaccctgaccctgggcctgctgctgagacccgagggcctgaccagcgtgctggagctgggccccgaggccgaccagcccgaggccgccaagttcagacagttctggggcagcagaagcgagctgagaagattccaggacggcgccatcagagaggccgtggtgtgggaggccgccagcatgagccagaagagactgatcccccaccaggtggtgacccacctgctggccctgcacgccgacatccccgagacctgcgtgcactacgtgggcggccccctggacgccctgatccagggcctgaaggagaccagcagcaccggcgaggaggccctggtggccgccgtgagatgctacgacgacctgagcagactgctgtggggcctggagggcctgcccctgaccgtgagcgccgtgcagggcgcccaccccgtgctgagatacaccgaggtgttcccccccacccccgtgagacccgccttcagcttctacgagaccctgagagagagaagcagcctgctgcccagactggacaagccctgccccgcctacgtggagcccatgaccgtggtgtgccacctggagggcagcggccagtggccccaggacgccgaggccgtgcagagagtgagagccgccttccagctgagactggccgagctgctgacccagcagcacggcctgcagtgcagagccaccgccacccacaccgacgtgctgaaggacggcttcgtgttcagaatcagagtggcctaccagagagagccccagatcctgaaggaggtgcagagccccgagggcatgatcagcctgagagacaccgccgccagcctgagactggagagagacaccagacagctgcccctgctgaccagcgccctgcacggcctgcagcagcagcaccccgccttcagcggcgtggccagactggccaagagatgggtgagagcccagctgctgggcgagggcttcgccgacgagagcctggacctggtggccgccgccctgttcctgcaccccgagcccttcaccccccccagcagcccccaggtgggcttcctgagattcctgttcctggtgagcaccttcgactggaagaacaaccccctgttcgtgaacctgaacaacgagctgaccgtggaggagcaggtggagatcagaagcggcttcctggccgccagagcccagctgcccgtgatggtgatcgtgaccccccaggacagaaagaacagcgtgtggacccaggacggccccagcgcccagatcctgcagcagctggtggtgctggccgccgaggccctgcccatgctggagaagcagctgatggaccccagaggccccggcgacatcagaaccgtgttcagaccccccctggacatctacgacgtgctgatcagactgagccccagacacatccccagacacagacaggccgtggacagccccgccgccagcttctgcagaggcctgctgagccagcccggccccagcagcctgatgcccgtgctgggctacgaccccccccagctgtacctgacccagctgagagaggccttcggcgacctggccctgttcttctacgaccagcacggcggcgaggtgatcggcgtgctgtggaagcccaccagcttccagccccagcccttcaaggccagcagcaccaagggcagaatggtgatgagcagaggcggcgagctggtgatggtgcccaacgtggaggccatcctggaggacttcgccgtgctgggcgagggcctggtgcagaccgtggaggccagaagcgagagatggaccgtgtag

SEQ ID NO: 213704 - protein, 458 aa, Artificial Sequence
  derived and/or modified sequence
MAALSKSIPHNCYEIGHTWHPSCRVSFLQITGGALEESLKIYAPLYLIAAILRKRKLDYYLHKLLPEILQSASFLTANGALYMAFFCILRKILGKFYSWTPGFGAALPASYVAILIERKSRRGLLTIYMANLATETLFRMGVARGTITTLRNGEVLLFCITAAMYMFFFRCKDGLKGFTFSALRFIVGKEEIPTHSFSPEAAYAKVEQKREQHEEKPGRMNMIGLVRKFVDSICKHGPRHRCCKHYEDNCISYCIKGFIRMFSVGYLIQCCLRIPSAFRHLFTQPSRLLSLFYNKENFQLGAFLGSFVSIYKGTSCFLRWIRNLDDELHAIIAGFLAGISMMFYKSTTISMYLASKLVETMYFKGIEAGKVPYFPHADTIIYSISTAICFQAAVMEVQTLRPSYWKFLLRLTKGKFAVMNRKVLDVFGTGASKHFQDFIPRLDPRYTTVTPELPTEFS

SEQ ID NO: 213705 - protein, 319 aa, Artificial Sequence
  derived and/or modified sequence
MGVARGTITTLRNGEVLLFCITAAMYMFFFRCKDGLKGFTFSALRFIVGKEEIPTHSFSPEAAYAKVEQKREQHEEKPGRMNMIGLVRKFVDSICKHGPRHRCCKHYEDNCISYCIKGFIRMFSVGYLIQCCLRIPSAFRHLFTQPSRLLSLFYNKENFQLGAFLGSFVSIYKGTSCFLRWIRNLDDELHAIIAGFLAGISMMFYKSTTISMYLASKLVETMYFKGIEAGKVPYFPHADTIIYSISTAICFQAAVMEVQTLRPSYWKFLLRLTKGKFAVMNRKVLDVFGTGASKHFQDFIPRLDPRYTTVTPELPTEFS

SEQ ID NO: 213706 - protein, 295 aa, Artificial Sequence
  derived and/or modified sequence
MYMFFFRCKDGLKGFTFSALRFIVGKEEIPTHSFSPEAAYAKVEQKREQHEEKPGRMNMIGLVRKFVDSICKHGPRHRCCKHYEDNCISYCIKGFIRMFSVGYLIQCCLRIPSAFRHLFTQPSRLLSLFYNKENFQLGAFLGSFVSIYKGTSCFLRWIRNLDDELHAIIAGFLAGISMMFYKSTTISMYLASKLVETMYFKGIEAGKVPYFPHADTIIYSISTAICFQAAVMEVQTLRPSYWKFLLRLTKGKFAVMNRKVLDVFGTGASKHFQDFIPRLDPRYTTVTPELPTEFS

SEQ ID NO: 213707 - DNA, 1377 bp, Artificial Sequence
  derived and/or modified sequence
atggccgccctgagcaagagcatcccccacaactgctacgagatcggccacacctggcaccccagctgcagagtgagcttcctgcagatcaccggcggcgccctggaggagagcctgaagatctacgcccccctgtacctgatcgccgccatcctgagaaagagaaagctggactactacctgcacaagctgctgcccgagatcctgcagagcgccagcttcctgaccgccaacggcgccctgtacatggccttcttctgcatcctgagaaagatcctgggcaagttctacagctggacccccggcttcggcgccgccctgcccgccagctacgtggccatcctgatcgagagaaagagcagaagaggcctgctgaccatctacatggccaacctggccaccgagaccctgttcagaatgggcgtggccagaggcaccatcaccaccctgagaaacggcgaggtgctgctgttctgcatcaccgccgccatgtacatgttcttcttcagatgcaaggacggcctgaagggcttcaccttcagcgccctgagattcatcgtgggcaaggaggagatccccacccacagcttcagccccgaggccgcctacgccaaggtggagcagaagagagagcagcacgaggagaagcccggcagaatgaacatgatcggcctggtgagaaagttcgtggacagcatctgcaagcacggccccagacacagatgctgcaagcactacgaggacaactgcatcagctactgcatcaagggcttcatcagaatgttcagcgtgggctacctgatccagtgctgcctgagaatccccagcgccttcagacacctgttcacccagcccagcagactgctgagcctgttctacaacaaggagaacttccagctgggcgccttcctgggcagcttcgtgagcatctacaagggcaccagctgcttcctgagatggatcagaaacctggacgacgagctgcacgccatcatcgccggcttcctggccggcatcagcatgatgttctacaagagcaccaccatcagcatgtacctggccagcaagctggtggagaccatgtacttcaagggcatcgaggccggcaaggtgccctacttcccccacgccgacaccatcatctacagcatcagcaccgccatctgcttccaggccgccgtgatggaggtgcagaccctgagacccagctactggaagttcctgctgagactgaccaagggcaagttcgccgtgatgaacagaaaggtgctggacgtgttcggcaccggcgccagcaagcacttccaggacttcatccccagactggaccccagatacaccaccgtgacccccgagctgcccaccgagttcagctag

SEQ ID NO: 213708 - DNA, 960 bp, Artificial Sequence
  derived and/or modified sequence
atgggcgtggccagaggcaccatcaccaccctgagaaacggcgaggtgctgctgttctgcatcaccgccgccatgtacatgttcttcttcagatgcaaggacggcctgaagggcttcaccttcagcgccctgagattcatcgtgggcaaggaggagatccccacccacagcttcagccccgaggccgcctacgccaaggtggagcagaagagagagcagcacgaggagaagcccggcagaatgaacatgatcggcctggtgagaaagttcgtggacagcatctgcaagcacggccccagacacagatgctgcaagcactacgaggacaactgcatcagctactgcatcaagggcttcatcagaatgttcagcgtgggctacctgatccagtgctgcctgagaatccccagcgccttcagacacctgttcacccagcccagcagactgctgagcctgttctacaacaaggagaacttccagctgggcgccttcctgggcagcttcgtgagcatctacaagggcaccagctgcttcctgagatggatcagaaacctggacgacgagctgcacgccatcatcgccggcttcctggccggcatcagcatgatgttctacaagagcaccaccatcagcatgtacctggccagcaagctggtggagaccatgtacttcaagggcatcgaggccggcaaggtgccctacttcccccacgccgacaccatcatctacagcatcagcaccgccatctgcttccaggccgccgtgatggaggtgcagaccctgagacccagctactggaagttcctgctgagactgaccaagggcaagttcgccgtgatgaacagaaaggtgctggacgtgttcggcaccggcgccagcaagcacttccaggacttcatccccagactggaccccagatacaccaccgtgacccccgagctgcccaccgagttcagctag

SEQ ID NO: 213709 - DNA, 1377 bp, Artificial Sequence
  derived and/or modified sequence
atggccgccctgtctaaatctatcccgcacaactgctatgagatcggccacacatggcatcctagttgtagagtgtcattcctccagattaccggcggcgctcttgaagaatcgctcaagatctatgcaccactctatctgattgccgcaatcctacgtaaacggaagctggactactacctgcacaaacttttgcccgaaatcttacagagtgcttctttcctgaccgccaacggcgctttgtacatggccttcttttgcattctgcgcaaaatcctgggcaagttctatagctggacccctggctttggggccgccctgccggcatcttatgtggccatcttaattgagaggaaatcgcgcaggggcctgttgactatctacatggcaaatctcgcaactgaaacattattccgcatgggagttgctaggggaacaataacaactctgcggaacggagaagtcctgcttttttgtataaccgcagccatgtatatgtttttctttcgctgcaaggacgggttaaaaggtttcacattctctgctctgcgttttatcgttgggaaggaagaaatccctacccacagttttagtcctgaagccgcctacgccaaggtggagcagaagagggagcaacatgaagaaaagcccggaaggatgaatatgattggtctggttagaaagtttgtggattccatctgcaaacacggccctcggcatcggtgctgcaagcactatgaggacaactgcatttcttactgtatcaaggggtttattaggatgttttctgtcggttacctgatccagtgctgcctgcgaatcccttcagcgtttaggcatctgttcactcagccttctcggctgctgagtctcttttataataaagagaactttcagctcggggccttcctggggtcttttgtatccatttacaaaggaacgagttgtttcctgcggtggattcgcaacctggatgatgaactgcacgcaatcatagctggttttctcgccggtataagtatgatgttctacaagtcaacaactattagtatgtacctcgcaagtaaactcgtcgagactatgtatttcaagggcatcgaagccggaaaggtcccctatttcccgcacgctgacaccatcatctattcaatctcaaccgccatctgtttccaggccgccgtgatggaggtacaaaccttaaggccctcctattggaaattcctactgcgcttaacaaaggggaagtttgccgtaatgaacaggaaggtgctagatgtgttcggaacaggtgctagtaaacatttccaggactttatcccccgcctggatcccagatataccaccgtgactcccgagctgccaactgagttcagttag

SEQ ID NO: 213710 - DNA, 960 bp, Artificial Sequence
  derived and/or modified sequence
atgggcgttgcacggggaacaatcaccacactgcgtaatggagaagtgctgctgttttgtatcaccgccgcaatgtatatgttcttctttaggtgcaaggacggattgaaaggttttaccttcagcgctcttaggttcatcgtggggaaggaggagatccctacccatagtttcagcccagaagcagcctatgccaaagttgaacagaaacgcgaacagcacgaggagaagccaggtaggatgaatatgattgggctagtgcgaaagtttgtggactcaatctgcaaacatggccctaggcaccggtgctgcaagcattacgaggacaactgtatcagctactgcattaaaggattcattaggatgttttcagtgggttacctcatacagtgttgtttgagaatcccaagcgcgtttaggcacctttttacccagcccagcaggctgctgtccttgttttacaataaggaaaatttccaattaggtgctttccttggctcctttgtgtcaatctataagggaacatcttgcttcctgagatggattaggaacttggacgatgaattacacgcgataattgccggctttctggcggggatcagtatgatgttctataagtctactaccatctccatgtacctggcatctaaactcgtggaaaccatgtatttcaaagggattgaggcgggcaaagtgccgtattttcctcatgctgataccattatctactctatctctacagccatctgtttccaggccgctgtgatggaggtacagacactacgacctagttactggaaatttttgctgcgactgactaagggtaaatttgccgtcatgaatcgtaaggttctcgatgtctttgggaccggggcaagtaaacacttccaggactttatcccgcgcctcgatccaagatatacgacagtgacccccgagctacctactgagttttcttag

SEQ ID NO: 213711 - DNA, 1377 bp, Artificial Sequence
  derived and/or modified sequence
atggccgccctgagcaagagcatcccccacaactgctatgaaattggccacacctggcaccccagctgccgggtgtccttcctgcagatcactggaggagccctggaggagagcctgaagatctatgcccccctgtacctgattgctgccatcctgaggaagaggaagctggactactacctgcacaagctgctgcctgagatcctgcagagcgccagcttcctgacagccaacggggccctgtacatggccttcttctgcatcctgaggaagatcctgggcaagttctacagctggaccccaggctttggagctgccctgcctgccagctatgtggccatcctgattgaaaggaagagcagaagaggcctgctgaccatctacatggccaacctggccacagagaccctcttcaggatgggcgtggcccggggcaccatcaccaccctgagaaatggagaggtgctgctcttctgcatcacagctgccatgtacatgttcttcttccgctgcaaggatggcctgaagggcttcaccttcagcgccctgcgcttcatcgtgggcaaggaggagatccccacccacagcttcagccctgaggccgcctatgccaaggtggagcagaagcgggagcagcacgaggagaagccaggccgcatgaacatgattggcctggtgaggaagtttgtggacagcatctgcaagcacggccccaggcaccgctgctgcaagcactatgaggacaactgcatctcctactgcatcaagggcttcatccgcatgttttctgtgggctacctgatccagtgctgcctgcgcatccccagcgccttccgccacctgttcacccagcccagccggctgctgagcctcttctacaacaaggagaacttccagctgggcgccttcctgggcagctttgtgtccatctacaagggcaccagctgcttcctgcgctggatccggaacctggatgatgagctgcacgccatcatcgccggcttcctggccggcatctccatgatgttctacaagagcaccaccatctccatgtacctggccagcaagctggtggagaccatgtacttcaagggcatcgaggccggcaaggtgccctacttcccccatgctgacaccatcatctacagcatcagcacagccatctgcttccaggccgctgtgatggaggtgcagaccctgcggcccagctactggaagttcctgctgcggctgaccaagggcaagtttgctgtgatgaacaggaaggtgctggatgtgtttggaactggagccagcaagcacttccaggacttcatcccccggctggacccccgctacaccaccgtgaccccagagctgcccacagagttctcctag

SEQ ID NO: 213712 - DNA, 960 bp, Artificial Sequence
  derived and/or modified sequence
atgggcgtggcccggggcaccatcaccaccctgagaaatggagaggtgctgctcttctgcatcacagctgccatgtacatgttcttcttccgctgcaaggatggcctgaagggcttcaccttcagcgccctgcgcttcatcgtgggcaaggaggagatccccacccacagcttcagccctgaggccgcctatgccaaggtggagcagaagcgggagcagcacgaggagaagccaggccgcatgaacatgattggcctggtgaggaagtttgtggacagcatctgcaagcacggccccaggcaccgctgctgcaagcactatgaggacaactgcatctcctactgcatcaagggcttcatccgcatgttttctgtgggctacctgatccagtgctgcctgcgcatccccagcgccttccgccacctgttcacccagcccagccggctgctgagcctcttctacaacaaggagaacttccagctgggcgccttcctgggcagctttgtgtccatctacaagggcaccagctgcttcctgcgctggatccggaacctggatgatgagctgcacgccatcatcgccggcttcctggccggcatctccatgatgttctacaagagcaccaccatctccatgtacctggccagcaagctggtggagaccatgtacttcaagggcattgaagctgggaaggtgccctacttcccccacgccgacaccatcatctacagcatcagcacagccatctgcttccaggccgctgtgatggaggtgcagaccctgcggcccagctactggaagttcctgctgcggctgaccaagggcaagtttgctgtgatgaacaggaaggtgctggatgtgtttggcaccggggccagcaagcacttccaggacttcatcccccggctggacccccgctacaccaccgtgaccccagagctgcccacagagttctcctag

SEQ ID NO: 213713 - DNA, 1377 bp, Artificial Sequence
  derived and/or modified sequence
atggccgccctgagcaagagcatcccccacaactgctacgagatcgggcatacctggcatccctcgtgtcgcgtttcctttctccagataaccggaggcgcactggaggagtcgctgaagatttatgcccccttgtacctcatcgccgccatcctgcgtaaaagaaagctggattactacctgcataaactgcttccagagatcttacagagcgccagcttcctcacggcaaacggagccctgtacatggccttcttctgcattctgagaaagattttgggaaaattttacagttggaccccgggattcggagctgctctgccagccagctacgtggctatccttatcgagagaaagtcccgccgcggccttcttacgatctatatggctaatctggcaaccgaaaccctgttccgcatgggggtggctcgtgggactatcaccacgttgaggaacggggaggtcttgttgttctgtatcaccgctgctatgtacatgtttttctttaggtgtaaagatggtctgaagggctttactttctctgccctccgtttcatcgtgggcaaggaggaaatccctacccactcatttagccctgaggccgcttatgccaaagtagaacagaaaagggagcagcacgaggaaaaaccaggccggatgaacatgattggactggtcagaaagttcgtggactcaatttgcaagcacggaccacgacatcgctgctgtaaacattacgaagacaattgcatctcttattgtattaagggtttcatacgcatgttctccgtggggtatctaatacagtgttgtctaaggatccctagtgccttccgccatcttttcacccaaccctcaagactgttgtccctgttttataataaagaaaacttccagctgggcgcctttctcggatcgttcgtctcaatttacaagggaacttcatgctttttaagatggatccgcaatctggacgacgaattgcacgctattatcgccggattcctcgctggaatatcaatgatgttttacaagtctaccacgatttcgatgtatctggcgagcaagctcgtggagactatgtactttaagggtatcgaggctgggaaggtgccttacttcccacatgccgataccattatctattctatcagcactgccatttgcttccaggcagccgtgatggaagtgcagacactacgcccgtcttactggaaattcctccttcgcctgaccaagggcaagtttgctgttatgaacaggaaggtactagatgtctttggaactggagccagcaaacacttccaggactttatacctagactggatcctcgctacactacagtcacaccagagctgcccaccgagttcagttag

SEQ ID NO: 213714 - DNA, 960 bp, Artificial Sequence
  derived and/or modified sequence
atgggcgtggcccggggcaccatcaccaccctgcggaacggcgaggtgctgctgttttgtataacagcggccatgtatatgtttttctttcgctgcaaagatggactgaaagggttcaccttttccgcgctgagattcatcgttggtaaggaggaaatccctacccacagtttttcgccggaggcggcatacgccaaggtagaacagaagcgcgagcagcacgaggagaagcccgggagaatgaacatgatcggcctcgtgaggaaattcgtggacagcatttgcaaacatggtccgcgccacagatgttgtaagcactacgaggacaactgtataagttactgcattaagggcttcattcggatgttctctgttggatacctaatccagtgctgcctacggattcctagcgccttccggcaccttttcacccagccaagtcgtctgctctccctgttttataacaaagagaactttcaactaggggcgttcctaggttccttcgtgagtatttataaaggaacatcatgcttccttcggtggatcagaaaccttgatgacgagttgcacgcgattatagctggttttttggccggaatcagcatgatgttctacaaatccactactatttcgatgtatctcgcatccaagttagtagaaaccatgtacttcaagggcattgaggctgggaaggtgccctatttcccacatgcagatacaatcatttactcaatctctaccgccatctgttttcaggcagcagtcatggaggttcaaactctccgaccatcctattggaagttcctgctccgcctgacgaaagggaagtttgccgttatgaaccggaaggtcctcgatgtgtttggaacaggtgcaagtaagcacttccaggattttataccccggctggaccctcggtacacaactgtgaccccggaactgcccactgagttttcctag

SEQ ID NO: 213715 - DNA, 1377 bp, Artificial Sequence
  derived and/or modified sequence
atggccgcactgagcaaatccatcccacataactgctatgagattgggcatacatggcacccttcatgtcgcgtttcttttctgcagattacagggggagccctggaggaaagcttaaagatctacgcccctctatacttgattgccgcaattttgcgaaaacggaaactcgactactacttgcataaactcctgcccgagatcctccagtccgcatcgtttctgacggctaacggggcactctacatggccttcttctgcatcttaaggaaaatcctcggtaagttttattcatggactcctgggttcggggcagcattgcccgcatcttacgtggccattctgatagagaggaaatctagaagaggcttactcaccatctatatggcgaaccttgctacagagacactattcagaatgggcgtcgccagggggaccattacaacgcttcgtaacggagaggttttgctgttctgcatcacagcagcaatgtacatgtttttcttccgctgcaaagatggcctcaagggattcaccttctctgctctccgctttatcgtaggaaaggaggagatccccacccattcgttcagtcctgaagccgcttacgcaaaagtggagcaaaagcgcgaacagcacgaggagaaacccggaaggatgaacatgatcggcttagtccggaaattcgtggacagcatctgtaaacacggccctcgacacaggtgttgtaagcattatgaagataattgtatttcttactgcatcaagggtttcatcaggatgttctctgtgggttatctgatacaatgctgcctcagaattccgagcgcctttaggcatctgttcactcaaccaagccggctcctgtcgctgttttacaataaggagaacttccagctaggcgctttcttgggcagctttgtttccatttataagggcacatcatgttttctacgatggattcggaatttggatgacgagctccatgccattatcgccggttttctggcaggaatatctatgatgttctacaagtcaacaacaatttcaatgtacctggctagcaaactagttgagaccatgtacttcaaagggatcgaggccggaaaggtcccctactttccacacgcagacaccattatctatagcatctctacagcaatctgttttcaggccgctgtgatggaggttcagaccctccggccttcctactggaaatttctcctgagactgactaagggtaagttcgccgtgatgaacaggaaggtgcttgatgtgtttggtaccggagcctctaaacacttccaagacttcatacctagattggatcccagatatacaacagtgacacctgaactgcccactgagttcagctag

SEQ ID NO: 213716 - DNA, 960 bp, Artificial Sequence
  derived and/or modified sequence
atgggggtggcacgaggtacaattaccactctgaggaacggcgaagtcctactgttttgcataacagccgcaatgtacatgtttttcttccgctgcaaggacggactgaagggttttacattcagtgctctcagattcatagtcgggaaggaagaaatccctacacattcgttttctcccgaggccgcatatgcgaaagtggagcagaaaagggagcaacacgaagaaaaacctggccgtatgaacatgattggtctggtgaggaagtttgtggatagcatctgcaagcacggccctcgacacaggtgctgtaagcattatgaggacaattgcatctcatattgcattaagggctttatacgtatgttttcagtcggttacttaatccagtgctgtctgcgcatcccaagcgcgtttcgacaccttttcactcaaccaagcaggctgctctctctgttctacaataaagagaactttcagctcggcgcatttctcgggtctttcgtgtcaatatacaaaggcacctcgtgctttctgcgctggatccgaaacctcgatgacgaactccatgcaatcattgcgggttttctggcagggataagcatgatgttctacaaaagcacaaccatctcaatgtacctggcctcgaaacttgttgaaactatgtacttcaagggaattgaagccggtaaggtcccatattttcctcatgcggacactattatttacagcatctccactgcgatctgtttccaggctgcagtgatggaggtacagaccctgcggccttcctattggaagtttcttctacgtctaacaaaggggaaattcgctgtgatgaatcgcaaagtgctggatgtctttgggacaggcgctagtaagcatttccaagatttcatacccagacttgaccctcgttataccacggttacacccgagttgcccaccgaattttcgtag

SEQ ID NO: 213717 - DNA, 2433 bp, Artificial Sequence
  derived and/or modified sequence
ggctctccccctcctgtcttctccgcgctgttcctcgtcatggcggccctcagcaagtccatccctcataactgctatgagatcggccacacttggcacccttcctgccgggtctccttcctgcagatcaccgggggcgccctggaggagtccctgaagatctatgctcctctgtacttgattgcagcaattctccggaaacggaaattagactattatttacacaaactactccctgagatcctacaatccgcttcatttctaactgctaatggggccttgtatatggctttcttttgcattttaaggaagatacttggaaaattctactcatggactcctggctttggtgccgctctgccagcatcttatgtggccattctcattgaaagaaaaagcaggagagggctgctcacaatttatatggccaacttggccacagaaacactattcagaatgggtgtagcaagaggaaccatcacaacattaagaaatggagaagtccttttgttttgcatcacagctgccatgtacatgttctttttcaggtgcaaggatggcttgaaaggatttacattttctgcacttaggttcattgtagggaaggaagaaattcccacacattctttttcaccagaggcagcatatgcaaaagtggaacaaaagagagagcaacatgaggaaaaacccggaagaatgaatatgattggtctagtcaggaaatttgtggattcaatatgcaaacatggaccaaggcatagatgttgcaaacattatgaagataattgcatctcttattgcattaaaggtttcatcagaatgtttagcgtggggtacttgatccagtgctgcctccgaatcccttctgcatttaggcatctgtttacacagccatctcggctactttctctcttctacaataaagaaaacttccagcttggagcttttcttggctcttttgttagtatatacaagggtactagttgcttcctgcgctggatcagaaacttagatgatgaactacatgctattatagctggatttttggcaggtatatcaatgatgttttataaaagcacaacaatttccatgtatttagcgtccaaattggtagagacaatgtatttcaaaggcattgaagcagggaaggttccctattttcctcatgcagatactatcatctattccatctctacagcaatttgcttccaggcagctgtcatggaagttcagactttgagaccatcttactggaagttccttttaagactcaccaagggcaaatttgctgtcatgaaccgaaaagtccttgatgtttttggtactggtgcatctaaacactttcaggatttcatccccaggttggatccaagatacacaactgtaacaccagagttgcccacagagttttcctgaagatgactgtaacttattaatgtgactaaatgtttcatcttgaagagttaattatgttgaacacaaaggagggggcccaagctcgaacttcagtgttatttcagttagagatactcttttcatttgttttgtttttcttatgaatcagaaattcagaagctttttaggaagatgttgcttaataattaagcttcctccatagccagaataagattctggatcactgtagtgactgacattatatattattgatcaaattatgtccacaagcaatattatataatctacgtagaagtgtaataacaaacaagagtacacttaaaattactttaaaagatgtctttagttcattccaatataattcttgattaaaattaggattatttctacattttaggatttacaaaggatcacgggtacatggatttggtctatatatttttttaaagttttgaattggtatctgtagtagtggaatgttatagatttgaagtaactctccacggacagtgctgctttcgtgtagagcaatttaattggagaagtggccattcttacttcagggatgcaaagatgggtctcataccatttggataaatgtcgtggtatccatgctttttttcaactaataacatcatctctcttcatgaccagttaattgggctatttggcagcccagtgaacctatgtactaatggcaagttaggggcaaatggaaatggacacatccgataaagttgaaatgtatgttttaatctttcacagaagtattacacttgaatatttaaaaacaaaacttttaaacttcctataggtttatgatgtttgttttcatttatatggacataatccttcatagctcagtttatatgccattgttgtattagaagggatcaaaatcctatggaacaaagtagtcttggcaagttggcagtttgtgtcctctcagctgtttaacttatgtaatggatgttttgcacctgaaaacactataaaaatccagtggttgtttaaaaa

SEQ ID NO: 213718 - DNA, 1502 bp, Artificial Sequence
  derived and/or modified sequence
ctcgtcatggcggccctcagcaagtccatccctcataactgctatgagatcggccacacttggcacccttcctgccgggtctccttcctgcagatcaccgggggcgccctggaggagtccctgaagatctatgctcctctgtacttgattgcagcaattctccggaaacggaaattagactattatttacacaaactactccctgagatcctacaatccgcttcatttctaactgctaatggggccttgtatatggctttcttttgcattttaaggaagatacttggaaaattctactcatggactcctggctttggtgccgctctgccagcatcttatgtggccattctcattgaaagaaaaagcaggccacagaaacactattcagaatgggtgtagcaagaggaaccatcacaacattaagaaatggagaagtccttttgttttgcatcacagctgccatgtacatgttctttttcaggtgcaaggatggcttgaaaggatttacattttctgcacttaggttcattgtagggaaggaagaaattcccacacattctttttcaccagaggcagcatatgcaaaagtggaacaaaagagagagcaacatgaggaaaaacccggaagaatgaatatgattggtctagtcaggaaatttgtggattcaatatgcaaacatggaccaaggcatagatgttgcaaacattatgaagataattgcatctcttattgcattaaaggtttcatcagaatgtttagcgtggggtacttgatccagtgctgcctccgaatcccttctgcatttaggcatctgtttacacagccatctcggctactttctctcttctacaataaagaaaacttccagcttggagcttttcttggctcttttgttagtatatacaagggtactagttgcttcctgcgctggatcagaaacttagatgatgaactacatgctattatagctggatttttggcaggtatatcaatgatgttttataaaagcacaacaatttccatgtatttagcgtccaaattggtagagacaatgtatttcaaaggcattgaagcagggaaggttccctattttcctcatgcagatactatcatctattccatctctacagcaatttgcttccaggcagctgtcatggaagttcagactttgagaccatcttactggaagttccttttaagactcaccaagggcaaatttgctgtcatgaaccgaaaagtccttgatgtttttggtactggtgcatctaaacactttcaggatttcatccccaggttggatccaagatacacaactgtaacaccagagttgcccacagagttttcctgaagatgactgtaacttattaatgtgactaaatgtttcatcttgaagagttaattatgttgaacacaaaggagggggcccaagctcgaacttcagtgttatttcagttagagatactcttttcatttgttttgtttttcttatgaatcagaaatt

SEQ ID NO: 213719 - protein, 762 aa, Artificial Sequence
  derived and/or modified sequence
MRLLLALLGVLLSVPGPPVLSLEASEEVELEPCLAPSLEQQEQELTVALGQPVRLCCGRAERGGHWYKEGSRLAPAGRVRGWRGRLEIASFLPEDAGRYLCLARGSMIVLQNLTLITGDSLTSSNDDEDPKSHRDPSNRHSYPQQAPYWTHPQRMEKKLHAVPAGNTVKFRCPAAGNPTPTIRWLKDGQAFHGENRIGGIRLRHQHWSLVMESVVPSDRGTYTCLVENAVGSIRYNYLLDVLERSPHRPILQAGLPANTTAVVGSDVELLCKVYSDAQPHIQWLKHIVINGSSFGADGFPYVQVLKTADINSSEVEVLYLRNVSAEDAGEYTCLAGNSIGLSYQSAWLTVLPGTGRIPHLTCDSLTPAGRTKSPTLQFSLESGSSGKSSSSLVRGVRLSSSGPALLAGLVSLDLPLDPLWEFPRDRLVLGKPLGEGCFGQVVRAEAFGMDPARPDQASTVAVKMLKDNASDKDLADLVSEMEVMKLIGRHKNIINLLGVCTQEGPLYVIVECAAKGNLREFLRARRPPGPDLSPDGPRSSEGPLSFPVLVSCAYQVARGMQYLESRKCIHRDLAARNVLVTEDNVMKIADFGLARGVHHIDYYKKTSNGRLPVKWMAPEALFDRVYTHQSDVWSFGILLWEIFTLGGSPYPGIPVEELFSLLREGHRMDRPPHCPPELYGLMRECWHAAPSQRPTFKQLVEALDKVLLAVSEEYLDLRLTFGPYSPSGGDASSTCSSSDSVFSHDPLPLGSSSFPFGSGVQT

SEQ ID NO: 213720 - DNA, 568 bp, Artificial Sequence
  derived and/or modified sequence
gcccctgccgctcccacccccacccatctgggccccgggttcaagagagagcggggtctgatctcgtgtagccatatagagtttgcttctgagtgtctgctttgtttagtagaggtgggcaggaggagctgaggggctggggctggggtgttgaagttggctttgcatgcccagcgatgcgcctccctgtgggatgtcatcaccctgggaaccgggagtggcccttggctcactgtgttctgcatggtttggatctgaattaattgtcctttcttctaaatcccaaccgaacttcttccaacctccaaactggctgtaaccccaaatccaagccattaactacacctgacagtagcaattgtctgattaatcactggccccttgaagacagcagaatgtccctttgcaatgaggaggagatctgggctgggcgggccagctggggaagcatttgactatctggaacttgtgtgtgcctcctcaggtatggcagtgactcacctggttttaataaaacaacctgcaacatctcatggtctttgaataaagcctgagtaggaagtctaga

SEQ ID NO: 213721 - DNA, 2289 bp, Artificial Sequence
  derived and/or modified sequence
atgagactgctgctggccctgctgggcgtgctgctgagcgtgcccggcccccccgtgctgagcctggaggccagcgaggaggtggagctggagccctgcctggcccccagcctggagcagcaggagcaggagctgaccgtggccctgggccagcccgtgagactgtgctgcggcagagccgagagaggcggccactggtacaaggagggcagcagactggcccccgccggcagagtgagaggctggagaggcagactggagatcgccagcttcctgcccgaggacgccggcagatacctgtgcctggccagaggcagcatgatcgtgctgcagaacctgaccctgatcaccggcgacagcctgaccagcagcaacgacgacgaggaccccaagagccacagagaccccagcaacagacacagctacccccagcaggccccctactggacccacccccagagaatggagaagaagctgcacgccgtgcccgccggcaacaccgtgaagttcagatgccccgccgccggcaaccccacccccaccatcagatggctgaaggacggccaggccttccacggcgagaacagaatcggcggcatcagactgagacaccagcactggagcctggtgatggagagcgtggtgcccagcgacagaggcacctacacctgcctggtggagaacgccgtgggcagcatcagatacaactacctgctggacgtgctggagagaagcccccacagacccatcctgcaggccggcctgcccgccaacaccaccgccgtggtgggcagcgacgtggagctgctgtgcaaggtgtacagcgacgcccagccccacatccagtggctgaagcacatcgtgatcaacggcagcagcttcggcgccgacggcttcccctacgtgcaggtgctgaagaccgccgacatcaacagcagcgaggtggaggtgctgtacctgagaaacgtgagcgccgaggacgccggcgagtacacctgcctggccggcaacagcatcggcctgagctaccagagcgcctggctgaccgtgctgcccggcaccggcagaatcccccacctgacctgcgacagcctgacccccgccggcagaaccaagagccccaccctgcagttcagcctggagagcggcagcagcggcaagagcagcagcagcctggtgagaggcgtgagactgagcagcagcggccccgccctgctggccggcctggtgagcctggacctgcccctggaccccctgtgggagttccccagagacagactggtgctgggcaagcccctgggcgagggctgcttcggccaggtggtgagagccgaggccttcggcatggaccccgccagacccgaccaggccagcaccgtggccgtgaagatgctgaaggacaacgccagcgacaaggacctggccgacctggtgagcgagatggaggtgatgaagctgatcggcagacacaagaacatcatcaacctgctgggcgtgtgcacccaggagggccccctgtacgtgatcgtggagtgcgccgccaagggcaacctgagagagttcctgagagccagaagaccccccggccccgacctgagccccgacggccccagaagcagcgagggccccctgagcttccccgtgctggtgagctgcgcctaccaggtggccagaggcatgcagtacctggagagcagaaagtgcatccacagagacctggccgccagaaacgtgctggtgaccgaggacaacgtgatgaagatcgccgacttcggcctggccagaggcgtgcaccacatcgactactacaagaagaccagcaacggcagactgcccgtgaagtggatggcccccgaggccctgttcgacagagtgtacacccaccagagcgacgtgtggagcttcggcatcctgctgtgggagatcttcaccctgggcggcagcccctaccccggcatccccgtggaggagctgttcagcctgctgagagagggccacagaatggacagacccccccactgcccccccgagctgtacggcctgatgagagagtgctggcacgccgcccccagccagagacccaccttcaagcagctggtggaggccctggacaaggtgctgctggccgtgagcgaggagtacctggacctgagactgaccttcggcccctacagccccagcggcggcgacgccagcagcacctgcagcagcagcgacagcgtgttcagccacgaccccctgcccctgggcagcagcagcttccccttcggcagcggcgtgcagacctag

SEQ ID NO: 213722 - DNA, 2289 bp, Artificial Sequence
  derived and/or modified sequence
atgcgactcctcttagcgcttctcggtgtcctcttgagtgtccccggcccccctgtcctgtccctcgaagcatccgaagaagttgaactggagccatgtcttgctccctctctcgagcagcaggagcaggaactgacggtagcgttgggccaaccagttcggctctgttgcggtagggcagagcgcggcggccactggtataaggagggctcacggctcgccccagctggccgtgtgagaggttggagaggaaggttggaaatagcgtccttcctccctgaggacgctgggagatacctgtgtctggccagaggcagtatgattgtgcttcagaacctgaccttaatcactggcgactctcttaccagctcaaacgatgacgaagaccctaagagtcacagagacccctccaatcggcactcttatccacagcaggccccttactggactcatccccagaggatggagaagaagctgcacgccgttcctgctggcaacaccgtcaagttccggtgccccgcggccggcaatcccacccccaccattcgttggctaaaagatggccaagcgttccacggcgagaatcgaattggagggattagactccgccaccaacactggtccctggtcatggaatcagtggtcccctcggacaggggcacctacacttgtctggtggaaaatgccgtcggctcaatccggtacaactacttgctggacgtgttagaacgatcccctcacagacccatcctccaggcaggcctcccagccaataccaccgcagtcgtggggtctgacgtcgaactgctgtgtaaggtttactctgacgcccaaccccacatacaatggctgaagcatatcgtgatcaatggttcttcatttggggccgacggctttccttatgtgcaggtgcttaagacggcagacatcaacagtagcgaggtagaggtactctacctacgtaatgtgagcgcggaagacgccggcgagtacacatgcttagctggcaattctatcggcctgtcctatcagtcagcttggttaacggttttgcctggaactggacgcataccacatttaacctgtgacagcctcacccccgccgggcgcacaaaaagtccgaccctgcaatttagcctggaaagcggtagctctggtaagagtagttctagcctcgttcgtggcgtgagactaagctcctctgggccagccctcctggctggccttgtaagtcttgatcttccactggacccactctgggagtttcctcgcgatcgtttagtgctgggaaaacctctgggagagggctgctttggccaagtagtgagagcggaggctttcggcatggatcctgccagaccggaccaggcttccaccgtggcagtcaagatgctgaaagataatgcatctgataaggacttggctgacctggttagcgagatggaggtgatgaaacttattggtcggcacaagaatattatcaatttactcggtgtgtgtacccaggagggcccattatatgtgattgtggaatgcgctgccaagggtaatcttagagagttcttgcgcgcccgaagaccccctgggccggacctgagtcccgatgggccacgcagtagcgagggacccttaagtttccccgtgctggtcagctgtgcgtaccaggttgccagagggatgcagtacctggaatctcggaaatgtatccatcgagatctcgctgcccgaaatgtgctcgtaactgaggataacgtgatgaagatcgcagactttggactggccaggggggtccatcacattgactattacaaaaaaaccagtaacggccgcctgccagtgaaatggatggctccagaggcattgttcgatagagtgtatacccaccagagcgacgtgtggagttttggcatcctgctctgggaaatcttcacgctgggaggtagtccctatcctgggatcccagtagaagagctattctctctgctccgtgagggccacaggatggaccgaccacctcactgccctccagagctctacggactaatgcgcgagtgttggcacgccgcgccaagccagcgccccaccttcaaacagctagtggaggccctggacaaagtgctactggcagtgtctgaggagtacctagatttgcgcctgaccttcggcccctatagcccttccggcggcgacgccagcagcacttgttcgtcctctgactcagtctttagtcacgacccccttcctctgggatccagttcttttcctttcggaagtggcgttcagacctag

SEQ ID NO: 213723 - DNA, 2289 bp, Artificial Sequence
  derived and/or modified sequence
atgagacttttattggctttattgggtgtgctgctctccgttcccggcccgcctgttctgagtctggaagcctccgaggaagtcgagctcgaaccctgtctggccccctcccttgaacagcaggagcaagagctcacagtcgcactaggacagcccgttcgactgtgctgtggccgtgctgagagaggtggtcattggtacaaagaaggatcacgccttgcccctgccggccgggtgcggggctggcgcggcaggcttgagattgcctccttcctccctgaggatgcaggcaggtatctgtgcctcgcccgggggagcatgatagtactgcagaatttaacgctgattacgggcgactctctcacctctagcaacgatgacgaggacccgaagtctcatagggatcccagcaatcgacattcctacccccagcaagctccctattggacacacccacagcgaatggagaagaagctccacgcggtccctgctggcaacacggtgaaattccgctgtcctgcagctggcaatccgactccaacaattcgctggcttaaggacggccaagctttccatggcgaaaacaggattggggggatccggctgaggcaccagcactggtcactcgtcatggagagtgtcgtgccgagtgacagggggacatacacttgtctcgtagaaaacgccgttggatctataaggtataattacctgctggatgtgctggagcgctctcctcatcggcctatccttcaagcaggtttacccgcaaacactacagctgtagtaggctctgacgttgagctgctctgtaaagtgtactccgatgctcagccccacattcaatggctaaaacatatcgtgattaacggttcaagctttggagccgatggatttccttacgtgcaggtgctgaaaaccgccgatatcaactcaagtgaggttgaagtcctctacctgcgaaatgtaagtgccgaagacgccggcgagtacacctgcttagctggaaacagtatcgggttaagctatcagtccgcgtggctcaccgtcttgcccggaacaggaagaataccacatcttacttgtgattctctgacacccgctggaaggacaaaatcccccaccttgcaatttagtctcgagtcgggaagctcaggaaagtcttctagctcattagtgcggggcgtgcgcctgagctccagtggacctgctctgcttgccggcttggtgtcactcgatctgcccctcgatcctctgtgggagtttcctcgcgacaggctggtgctaggcaaaccccttggagagggatgctttggccaagtggtcagggctgaagcatttggcatggatccagccaggccagaccaggcttctactgtggccgtgaaaatgctgaaggacaacgccagtgacaaagaccttgctgacctcgtaagcgagatggaagtcatgaaattgataggtcgccataaaaatattatcaacctcctgggtgtgtgcacacaggaagggccactgtatgttattgttgaatgcgcggcgaaaggcaaccttcgagagtttctgcgggctagaagaccccctgggccagacctgagtcccgacggacccaggtcatctgaaggccccctgagctttcccgtgctcgtgagctgcgcttatcaggtcgcacgtggcatgcagtatctggagtcacggaagtgtatacaccgagacctagccgcccgcaatgttctggtcactgaagacaatgtaatgaagattgccgactttggattggcacgtggcgtgcaccatattgactattacaagaaaacctctaacgggaggcttccggtgaaatggatggcaccagaagctctattcgacagggtgtacactcaccagtctgatgtgtggtctttcggcatcctgctgtgggagatattcacacttggcggatcaccttacccagggatccccgtcgaggagctttttagtctgctccgtgaggggcaccgcatggacaggccacctcattgtcctcccgaactgtacggcctgatgagggagtgttggcacgctgcaccctctcagaggccaacattcaaacagctcgtcgaagctctggataaagtcctgttggctgtatccgaagagtatctcgatctgcggctcacgtttggcccctacagtccctcaggaggcgatgcctcttcaacctgcagcagctctgactcagtgtttagccacgaccctttaccgctggggtctagcagctttccatttggtagcggcgtgcaaacctag

SEQ ID NO: 213724 - DNA, 2928 bp, Artificial Sequence
  derived and/or modified sequence
acattcctcgctcccggccgaggagcgctcgggctgtctgcggaccctgccgcgtgcaggggtcgcggccggctggagctgggagtgaggcggcggaggagccaggtgaggaggagccaggaaggcagttggtgggaagtccagcttgggtccctgagagctgtgagaaggagatgcggctgctgctggccctgttgggggtcctgctgagtgtgcctgggcctccagtcttgtccctggaggcctctgaggaagtggagcttgagccctgcctggctcccagcctggagcagcaagagcaggagctgacagtagcccttgggcagcctgtgcgtctgtgctgtgggcgggctgagcgtggtggccactggtacaaggagggcagtcgcctggcacctgctggccgtgtacggggctggaggggccgcctagagattgccagcttcctacctgaggatgctggccgctacctctgcctggcacgaggctccatgatcgtcctgcagaatctcaccttgattacaggtgactccttgacctccagcaacgatgatgaggaccccaagtcccatagggacccctcgaataggcacagttacccccagcaagcaccctactggacacacccccagcgcatggagaagaaactgcatgcagtacctgcggggaacaccgtcaagttccgctgtccagctgcaggcaaccccacgcccaccatccgctggcttaaggatggacaggcctttcatggggagaaccgcattggaggcattcggctgcgccatcagcactggagtctcgtgatggagagcgtggtgccctcggaccgcggcacatacacctgcctggtagagaacgctgtgggcagcatccgctataactacctgctagatgtgctggagcggtccccgcaccggcccatcctgcaggccgggctcccggccaacaccacagccgtggtgggcagcgacgtggagctgctgtgcaaggtgtacagcgatgcccagccccacatccagtggctgaagcacatcgtcatcaacggcagcagcttcggagccgacggtttcccctatgtgcaagtcctaaagactgcagacatcaatagctcagaggtggaggtcctgtacctgcggaacgtgtcagccgaggacgcaggcgagtacacctgcctcgcaggcaattccatcggcctctcctaccagtctgcctggctcacggtgctgccaggtactgggcgcatcccccacctcacatgtgacagcctgactccagcaggcagaaccaagtctcccactttgcagttctccctggagtcaggctcttccggcaagtcaagctcatccctggtacgaggcgtgcgtctctcctccagcggccccgccttgctcgccggcctcgtgagtctagatctacctctcgacccactatgggagttcccccgggacaggctggtgcttgggaagcccctaggcgagggctgctttggccaggtagtacgtgcagaggcctttggcatggaccctgcccggcctgaccaagccagcactgtggccgtcaagatgctcaaagacaacgcctctgacaaggacctggccgacctggtctcggagatggaggtgatgaagctgatcggccgacacaagaacatcatcaacctgcttggtgtctgcacccaggaagggcccctgtacgtgatcgtggagtgcgccgccaagggaaacctgcgggagttcctgcgggcccggcgccccccaggccccgacctcagccccgacggtcctcggagcagtgaggggccgctctccttcccagtcctggtctcctgcgcctaccaggtggcccgaggcatgcagtatctggagtcccggaagtgtatccaccgggacctggctgcccgcaatgtgctggtgactgaggacaatgtgatgaagattgctgactttgggctggcccgcggcgtccaccacattgactactataagaaaaccagcaacggccgcctgcctgtgaagtggatggcgcccgaggccttgtttgaccgggtgtacacacaccagagtgacgtgtggtcttttgggatcctgctatgggagatcttcaccctcgggggctccccgtatcctggcatcccggtggaggagctgttctcgctgctgcgggagggacatcggatggaccgacccccacactgccccccagagctgtacgggctgatgcgtgagtgctggcacgcagcgccctcccagaggcctaccttcaagcagctggtggaggcgctggacaaggtcctgctggccgtctctgaggagtacctcgacctccgcctgaccttcggaccctattccccctctggtggggacgccagcagcacctgctcctccagcgattctgtcttcagccacgaccccctgccattgggatccagctccttccccttcgggtctggggtgcagacatgagcaaggctcaaggctgtgcaggcacataggctggtggccttgggccttggggctcagccacagcctgacacagtgctcgaccttgatagcatggggcccctggcccagagttgctgtgccgtgtccaagggccgtgcccttgcccttggagctgccgtgcctgtgtcctgatggcccaaatgtcagggttctgctcggcttcttggaccttggcgcttagtccccatcccgggtttggctgagcctggctggagagctgctatgctaaacctcctgcctcccaataccagcaggaggttctgggcctctgaaccccctttccccacacctccccctgctgctgctgccccagcgtcttgacgggagcattggcccctgagcccagagaagctggaagcctgccgaaaacaggagcaaatggcgttttataaattatttttttgaaataaagctctgtgtgcctggg

SEQ ID NO: 213725 - DNA, 2418 bp, Artificial Sequence
  derived and/or modified sequence
agtccagcttgggtccctgagagctgtgagaaggagatgcggctgctgctggccctgttgggggtcctgctgagtgtgcctgggcctccagtcttgtccctggaggcctctgaggaagtggagcttgagccctgcctggctcccagcctggagcagcaagagcaggagctgacagtagcccttgggcagcctgtgcgtctgtgctgtgggcgggctgagcgtggtggccactggtacaaggagggcagtcgcctggcacctgctggccgtgtacggggctggaggggccgcctagagattgccagcttcctacctgaggatgctggccgctacctctgcctggcacgaggctccatgatcgtcctgcagaatctcaccttgattacaggtgactccttgacctccagcaacgatgatgaggaccccaagtcccatagggacccctcgaataggcacagttacccccagcaagcaccctactggacacacccccagcgcatggagaagaaactgcatgcagtacctgcggggaacaccgtcaagttccgctgtccagctgcaggcaaccccacgcccaccatccgctggcttaaggatggacaggcctttcatggggagaaccgcattggaggcattcggctgcgccatcagcactggagtctcgtgatggagagcgtggtgccctcggaccgcggcacatacacctgcctggtagagaacgctgtgggcagcatccgctataactacctgctagatgtgctggagcggtccccgcaccggcccatcctgcaggccgggctcccggccaacaccacagccgtggtgggcagcgacgtggagctgctgtgcaaggtgtacagcgatgcccagccccacatccagtggctgaagcacatcgtcatcaacggcagcagcttcggagccgacggtttcccctatgtgcaagtcctaaagactgcagacatcaatagctcagaggtggaggtcctgtacctgcggaacgtgtcagccgaggacgcaggcgagtacacctgcctcgcaggcaattccatcggcctctcctaccagtctgcctggctcacggtgctgccaggtactgggcgcatcccccacctcacatgtgacagcctgactccagcaggcagaaccaagtctcccactttgcagttctccctggagtcaggctcttccggcaagtcaagctcatccctggtacgaggcgtgcgtctctcctccagcggccccgccttgctcgccggcctcgtgagtctagatctacctctcgacccactatgggagttcccccgggacaggctggtgcttgggaagcccctaggcgagggctgctttggccaggtagtacgtgcagaggcctttggcatggaccctgcccggcctgaccaagccagcactgtggccgtcaagatgctcaaagacaacgcctctgacaaggacctggccgacctggtctcggagatggaggtgatgaagctgatcggccgacacaagaacatcatcaacctgcttggtgtctgcacccaggaagggcccctgtacgtgatcgtggagtgcgccgccaagggaaacctgcgggagttcctgcgggcccggcgccccccaggccccgacctcagccccgacggtcctcggagcagtgaggggccgctctccttcccagtcctggtctcctgcgcctaccaggtggcccgaggcatgcagtatctggagtcccggaagtgtatccaccgggacctggctgcccgcaatgtgctggtgactgaggacaatgtgatgaagattgctgactttgggctggcccgcggcgtccaccacattgactactataagaaaaccagcaacggccgcctgcctgtgaagtggatggcgcccgaggccttgtttgaccgggtgtacacacaccagagtgacgtgtggtcttttgggatcctgctatgggagatcttcaccctcgggggctccccgtatcctggcatcccggtggaggagctgttctcgctgctgcgggagggacatcggatggaccgacccccacactgccccccagagctgtacgggctgatgcgtgagtgctggcacgcagcgccctcccagaggcctaccttcaagcagctggtggaggcgctggacaaggtcctgctggccgtctctgaggagtacctcgacctccgcctgaccttcggaccctattccccctctggtggggacgccagcagcacctgctcctccagcgattctgtcttcagccacgaccccctgccattgggatccagctccttccccttcgggtctggggtgcagacatgagcaaggctcaaggctgtgcaggcacataggctggtggccttgggccttggggctcagccacagcctgacacagtgctcgaccttgatagcatg

SEQ ID NO: 213726 - DNA, 2289 bp, Artificial Sequence
  derived and/or modified sequence
atgaggctgctgctggccctgctgggcgtgctgctgtctgtgcccggcccccctgtgctgagcctggaggccagcgaggaggtggagctggagccctgcctggcccccagcctggagcagcaggagcaggagctgactgtggccctgggccagcctgtgcggctgtgctgcggccgggcagagcggggcggccactggtacaaggagggcagccggctggccccagctggccgggtgcggggctggaggggccgcctggagatcgccagcttcctgcctgaagatgctggccgctacctgtgcctggcccggggctccatgattgtgctgcagaacctgaccctcatcactggagacagcctgaccagcagcaatgatgatgaggaccccaagagccaccgggaccccagcaacagacacagctacccccagcaggccccctactggacccacccccagaggatggagaagaagctgcatgctgtgcctgctggcaacacagtgaagttccgctgcccagctgctggcaaccccacccccaccatccgctggctgaaggatggccaggccttccacggggagaacagaattggaggcatccggctgcggcaccagcactggagcctggtgatggagagcgtggtgcccagcgaccggggcacctacacctgcctggtggagaatgctgtgggcagcatccgctacaactacctgctggatgtgctggagaggagcccccaccggcccatcctgcaggccggcctgcctgccaacaccacagctgtggtgggcagtgatgtggagctgctgtgcaaggtgtacagtgatgcccagccccacatccagtggctgaagcacatcgtcatcaatggcagcagctttggagcagatggcttcccctacgtgcaggtgctgaagacagctgacatcaacagcagcgaggtggaggtgctgtacctgagaaatgtgtctgcagaagatgctggggagtacacctgcctggccggcaacagcatcggcctgagctaccagagcgcctggctgactgtgctgcccggcaccggccgcatcccccacctgacctgtgacagcctgaccccagctggccgcaccaagagccccaccctgcagttcagcctggagagcggcagcagcggcaagagcagcagcagcctggtgcggggcgtgcggctgagcagcagcggccctgccctgctggccggcctggtgtccctggacctgcccctggaccccctgtgggagttcccccgggaccggctggtgctgggcaagcccctgggggagggctgcttcggccaggtggtgcgggcagaggccttcggcatggaccctgcccggccagaccaggccagcacagtggccgtgaagatgctgaaggacaatgccagtgacaaggacctggccgacctggtgtctgagatggaggtgatgaagctgattggccgccacaagaacatcatcaacctgctgggcgtgtgcacccaggagggccccctgtatgtgattgtggagtgtgccgccaagggcaacctgcgggagttcctgcgggcccggcggcccccaggccctgacctgagcccagatggccccaggagcagcgagggccccctgtccttccctgtgctggtgtcctgtgcctaccaggtggcccggggcatgcagtacctggagagcaggaagtgcatccaccgggacctggccgccagaaatgtgctggtgacagaggacaacgtgatgaagattgctgactttggcctggcccggggcgtgcaccacatcgactactacaagaagaccagcaatggccgcctgcctgtgaagtggatggcccctgaggccctgtttgacagagtgtacacccaccagagtgatgtgtggagctttggcatcctgctgtgggagatcttcaccctgggcggcagcccctacccaggcatccctgtggaggagctgttcagcctgctgcgggagggccacaggatggacaggcctccccactgccccccagagctgtatggcctgatgagggagtgctggcacgccgcccccagccagaggcccaccttcaagcagctggtggaggccctggacaaggtgctgctggccgtgtctgaggagtacctggacctgcggctgaccttcggcccctacagccccagcggaggagatgccagcagcacctgcagcagcagtgacagcgtcttcagccatgaccccctgcccctgggcagcagcagcttccccttcggcagcggcgtgcagacctag

SEQ ID NO: 213727 - DNA, 2289 bp, Artificial Sequence
  derived and/or modified sequence
atgcggctgctgctggccctgctgggcgtgctgctgagcgtgcccggcccccctgtgctgtcattggaagcaagcgaagaggtggagctcgagccatgcctggccccgagccttgaacagcaggaacaagagctaacggtcgcccttggtcaacctgtgagattgtgttgtggcagggcagagcgaggaggccactggtacaaagagggctccagactcgcccctgcaggcagagtccggggctggaggggccggcttgaaatcgctagtttcctccccgaagacgccggacggtatctgtgtctggcccggggctctatgattgtcctccaaaatttgacactgattacgggggattcactgactagttcaaacgacgatgaggaccctaagagccatcgtgatccaagtaataggcacagctacccgcagcaggctccctattggacccacccacagaggatggagaaaaagctgcatgcggttccagccggcaatacggtgaaattccggtgtccagcagcaggcaatcctaccccaactatccggtggcttaaggatggtcaggcgttccatggggaaaaccggataggaggaatcaggttacggcaccagcactggagtttggtcatggaatctgtcgtgccatcggaccgaggcacatacacatgtttggtggagaacgccgtcggcagcataagatacaattacctgctggatgttttggaacgctcacctcaccgcccgatcttgcaggcaggactcccagcgaacacgactgccgttgttggatccgatgtagagctgttgtgtaaagtgtactccgacgcacagcctcacatccagtggctcaaacacattgtaattaacggttctagttttggcgcagatggattcccctacgtgcaagtgctgaaaaccgcagacatcaattcaagcgaagtcgaggttctttacctaaggaacgtctcagccgaggatgctggtgaatacacgtgcctagcagggaattcaataggcctcagctaccagtcagcctggcttaccgttttgcctgggaccggtcgcattcctcacctcacctgcgattctctcaccccagcaggacgaaccaaatctccaaccttgcagtttagccttgaatccgggtccagcggcaaaagcagctccagcctcgtgagaggagtaaggctctcaagcagcggccccgcgctcctggccggccttgtttcactggacctgccgctcgaccccctgtgggaattcccaagggatcggctcgtgttggggaagcctttgggcgaagggtgttttggtcaggtcgttcgcgccgaagcatttgggatggatccggcacgccccgaccaggcctcgacggtggctgttaagatgctgaaggataatgcctccgataaggatctcgccgatcttgtgagtgaaatggaggtgatgaaactaattggccggcataagaacattatcaatctcctgggggtgtgtacccaggaggggcccttgtatgtcatcgtagagtgcgctgccaagggcaatctcagggaatttctgagagcaaggcgtcccccagggccggacttgagccccgacggtccacggagcagtgagggaccattatccttcccggtgcttgtgtcctgcgcatatcaggtcgcacgaggcatgcagtatctggagagccgcaagtgcatccatagggacctggccgctcgtaacgtgctcgtgactgaggacaacgttatgaagattgctgatttcggcttggcaagaggagtgcatcatattgactactataaaaagacaagtaacggcagattgcctgtaaagtggatggccccagaagcactctttgacagggtgtatacccaccagtctgatgtgtggtccttcgggattcttctgtgggagatattcaccctgggcggaagcccctatcccggaattccagttgaggaactgttttccctgctgcgggagggtcatcggatggacaggcctcctcactgtcctcctgaactctacggactcatgagagagtgctggcacgctgccccatcccagagacctactttcaagcagctggtggaagccttggataaagtgctccttgcagtgagcgaagagtaccttgaccttcgcttgacttttggcccttactcaccctccgggggcgacgctagctccacatgctctagttctgactctgtcttttctcatgatcctctgcccttaggcagctcctcatttccgttcgggtctggtgttcagacgtag

SEQ ID NO: 213728 - DNA, 2289 bp, Artificial Sequence
  derived and/or modified sequence
atgcggctgctgctggccctgctgggcgtgctgctgagcgtgcccggacctcccgtccttagccttgaggcttccgaggaggtcgagttggagccttgcctggcaccatctctcgaacagcaagagcaggagcttaccgtagcactggggcagcccgtcaggttgtgctgtggaagagcggagcgaggaggacattggtataaagaaggatcccgcctggcgccagccggaagggttaggggttggcgtggacgacttgagattgccagttttctccccgaagatgccggaaggtacctctgcctcgctagggggtccatgatcgtgctccaaaatctgactctgattaccggagactccctgacgagttccaatgatgacgaggatcccaaaagtcatagggacccctcaaataggcactcgtatccgcagcaggctccatactggacccacccgcagcggatggagaaaaaactgcacgcggtacctgccggcaataccgtgaagttcagatgccccgccgctgggaacccaacacctaccataagatggcttaaggatgggcaagctttccatggggaaaatcgaattggagggatccggctgcgacaccagcactggtcccttgtgatggaaagtgtcgtaccctccgaccggggcacatatacctgcctggtggaaaacgcagtggggtccatcaggtataattacttattggacgtgctggaaaggtccccacataggcctattctccaggccgggctgcccgcgaacacaaccgcagtggtcggcagcgatgtggaactactgtgtaaggtttattccgatgcgcagccacacatccaatggctgaagcatatcgtgattaatggatcatcctttggagccgacgggtttccatacgtgcaggttcttaagacagccgatatcaactccagtgaagtcgaggtgctttatctccggaatgtttctgcagaggatgctggggaatatacctgtctggctggcaacagcattgggctttcctaccagtcggcatggctcaccgtgctgccaggaactggccgcatcccgcacctaacatgcgattctttaacgcccgcaggtcggactaaaagcccgactcttcagttttctctggagagtgggagttcaggtaaatccagctcttctctggttagaggggttcgcctgtcatcatccgggcccgcgctgcttgccggacttgtgtccctggatctgcccctggatcccttatgggagtttccgcgggaccggctggtgttaggaaagcccctgggcgaagggtgcttcggtcaggtggtgagagccgaagcctttggtatggatccggccaggccagaccaagcttctactgtcgcagtgaagatgctaaaggataatgcctcagataaggacctggccgacctggtttctgagatggaggtgatgaagttaataggccgacacaagaacataattaacctcctgggcgtatgcacccaggagggccccctgtacgttattgttgagtgtgcggccaaaggaaatttacgtgagtttttacgagctcgtcggcctccgggcccggatctgagccccgacggcccaaggtcctccgaaggcccactgagttttcctgtgctagtgagctgcgcttaccaggtagcccgcgggatgcagtaccttgagagcaggaagtgtatccacagagatctggctgcccggaatgtcctggtgacagaagataatgtaatgaagattgctgactttggcctcgctcggggggtgcaccatattgactactacaagaagacctcaaacggccggctgcccgttaagtggatggccccggaggccctttttgaccgggtgtatacccaccaaagcgatgtgtggtccttcgggattttgctctgggaaatcttcactctgggtggttccccgtaccctgggattcccgtcgaggaactcttcagtcttttgagggaggggcacagaatggatagaccgcctcactgtccacccgaactctacgggctgatgagagaatgctggcatgctgctcctagccagcgacctacctttaaacagcttgtggaggccctggacaaggtactgctcgctgtttccgaagagtatctggatttgaggttgacatttgggccatactccccaagtggcggagacgcctcctccacatgctcatcctctgacagtgtctttagccacgatcccctaccgttgggttccagttcatttcctttcggctctggcgtacagacttag

SEQ ID NO: 213729 - DNA, 2289 bp, Artificial Sequence
  derived and/or modified sequence
atgagactcctgctcgcccttctgggcgtactactttctgtacccggacccccagtgctgtcactggaggcaagcgaagaagtcgaactggagccctgcctggccccttcacttgaacagcaggaacaggagctcactgtggcactgggtcaaccggtaagactgtgttgtggacgggcagaaagaggaggccactggtacaaggagggatccagactggcacccgctgggagagtgcggggatggcgtgggcgtttggaaatcgcaagctttcttcctgaggatgctgggaggtacctgtgcttggccagaggcagcatgatcgtcttgcagaacctaaccctcataacgggagactctttaacctcaagcaatgatgacgaagatcctaagtcccatcgggaccctagcaaccggcacagctatccccagcaggctccctactggacccacccccaaaggatggaaaagaaactgcacgctgttccagcgggaaacacagtgaagttccggtgccccgctgcaggaaatcctacacctactataaggtggttaaaagacggacaggcgtttcacggagagaatcgcatcggtggtatccgcttgcggcaccaacactggtctctggtcatggaaagcgttgtcccctcggacaggggcacgtatacatgtctggttgagaatgccgttggttctatcagatataattatctgctggacgtactggagcggtcgccacaccgtcccatcctgcaggccggactgccggcaaacaccacggctgtggtgggaagtgacgtggagctgctttgcaaggtttactctgatgcccagccacacattcagtggcttaaacatatagtgataaacggaagctcctttggcgcagacggcttcccatatgtgcaggttctgaagaccgccgatatcaactcgagcgaagtagaagtgctgtacctcagaaacgtgagcgcagaagacgcaggagagtatacatgcctggccggaaatagtattggattgtcctatcagtctgcctggttaaccgttctgcccggtaccggacgtatcccgcatcttacatgtgactcactcacaccagccggaagaacaaaatctcccacactccagttctctctcgaaagtggcagcagcggaaagtcttcaagtagcctggtgcggggagtgcggcttagcagcagtgggcctgcgttactcgcagggcttgtcagcctggacttgcccctggatcccctttgggaatttccgagagatcggcttgtgctcggcaagccattgggcgaagggtgcttcggacaggtcgtacgtgctgaagcattcggtatggacccagccaggcctgatcaggccagcacagtggcagtcaaaatgcttaaagacaacgcctctgacaaagatctggccgatctcgtgagtgagatggaagtgatgaaactgattggtcgccacaagaacatcatcaacctgctcggagtgtgtacccaggagggacccctgtatgtgatcgtcgaatgcgctgcaaagggcaacctacgggaatttctgcgtgcgaggagaccccctggtcctgatctctctccggatggacccaggtccagtgaggggcctctatcctttccagtcctggtttcctgcgcttatcaggtggctcgtggcatgcagtatttggagtctcggaagtgcatacatcgggatcttgctgccaggaatgtcctcgtgaccgaggacaacgtaatgaagattgccgacttcggccttgccagaggtgtgcatcacattgattattataaaaaaacaagcaatgggagattacccgtgaagtggatggcgccagaagcgctgtttgacagagtctatactcaccagtccgacgtgtggtccttcggcatcctgctatgggaaatcttcacattgggcggatccccctaccctggaattcccgtcgaagagctatttagcttgttgagggaaggccaccggatggacagacctccccattgccccccagagctctacgggttaatgagggagtgttggcacgcagcccctagtcagcgccctacctttaaacagctggtggaggctctggacaaagtgctcctggccgttagtgaggagtatctggacttgcggctaactttcggtccctactccccgtccggtggagacgccagcagcacatgttcatcctcagattcagtgtttagtcacgaccccctgccccttggatctagctctttcccgttcgggagtggcgtgcagacctag

SEQ ID NO: 213730 - DNA, 2289 bp, Artificial Sequence
  derived and/or modified sequence
atgcgccttcttctggccctgttaggcgtcttgctgtcagtacctggaccaccagtgttgtctctcgaggcctccgaggaagtcgaactggaaccttgtctggctcccagtctcgagcagcaagagcaggaactgacagtcgctcttggacagcccgtgagactctgttgcggcagggctgaacgtggaggacattggtataaggagggtagcagactggcaccggctggaagagtccgcggttggaggggaagactggaaatcgctagtttcctacccgaagacgccggtaggtatctgtgcctggctcgcggatcgatgatcgttcttcagaacctgaccctcatcactggcgacagtttgacctctagtaatgatgacgaggatcctaaatcccatagggacccctcaaacagacactcctacccccagcaggcaccctattggacccatcctcagaggatggaaaagaaactccacgctgtgcccgctggcaatactgttaagttccgatgtccagccgcagggaatccgacaccaactatcagatggcttaaagacgggcaggcttttcacggagagaatcgcataggcggtattcgtctgagacaccaacattggagcctagtaatggagtccgtggtgccttcagacaggggcacctacacttgtctagtagagaatgctgtaggcagtatccggtataactatttgctcgacgtcttggaacgctcaccacataggcctatactgcaggccggactgccagcgaataccaccgccgtggtcggcagcgacgtggaactgttatgcaaggtgtattccgacgcacagcctcatatacagtggctgaagcacattgttatcaatggtagctccttcggcgcagacgggtttccgtatgtgcaggtgttaaagaccgctgatataaactcctctgaagttgaggtgctctatctgagaaatgtgagtgcagaagacgcgggtgaatacacctgccttgccggaaattccatagggttgtcataccagagtgcctggcttacagttttgcctggaactgggaggattccacacctgacctgcgattctctaacacccgctggccgtacgaagagccccacactgcaattcagcctggagtcaggatcatctggtaaaagttcatcctccctggtgaggggcgtgcggctgtcctctagtggacccgctctgctggctggtctggtgagcctggatctccctttggatccgctgtgggagtttccccgtgaccgcctggtgctcggcaagcctctgggtgaggggtgctttggacaggtggtcagggcagaagcgttcgggatggatcccgcaaggcctgatcaggcaagcacggtggccgtgaagatgctgaaggataacgctagtgacaaggacctggcagacttagtgagcgagatggaagttatgaaactgatcggtcgccataaaaacatcataaacctgctgggcgtatgcacccaggagggcccactatatgtgattgtggaatgcgcggcaaagggtaatctgcgagaatttctgcgggcacgacgtccacccggacccgatctaagccccgacggtcctcggtctagcgagggacccctgtcgttccccgtactggttagctgcgcctaccaagtagccaggggtatgcagtatctggaaagccggaagtgtatacaccgcgacctagcagcacggaacgttttggttaccgaggacaatgttatgaaaatcgccgatttcggtctggcgaggggggtgcatcatattgactactacaaaaagactagcaatggcagactgcccgttaagtggatggcgccagaggcactcttcgatcgagtgtacacccaccagtccgatgtttggtctttcgggatattgttatgggagatatttaccctggggggttccccttatcctggaatccctgttgaggagcttttcagtctcctgagagaaggccatcgaatggatcggccaccccattgccctcctgagttatacggattaatgcgggaatgttggcatgccgcaccatctcagcgacccacattcaagcagctcgtggaagccttagacaaagtcttactggctgttagtgaggagtatctcgaccttagactcaccttcggcccatattcaccctccggaggcgatgcaagttccacatgttcttcaagcgactccgtgttcagccacgatccgttgcccttgggctcatcctcatttccgtttgggtctggcgtgcaaacatag

SEQ ID NO: 213731 - protein, 694 aa, Artificial Sequence
  derived and/or modified sequence
MGAPACALALCVAVAIVAGASSESLGTEQRVVGRAAEVPGPEPGQQEQLVFGSGDAVELSCPPPGGGPMGPTVWVKDGTGLVPSERVLVGPQRLQVLNASHEDSGAYSCRQRLTQRVLCHFSVRVTDAPSSGDDEDGEDEAEDTGVDTGAPYWTRPERMDKKLLAVPAANTVRFRCPAAGNPTPSISWLKNGREFRGEHRIGGIKLRHQQWSLVMESVVPSDRGNYTCVVENKFGSIRQTYTLDVLERSPHRPILQAGLPANQTAVLGSDVEFHCKVYSDAQPHIQWLKHVEVNGSKVGPDGTPYVTVLKVSLESNASMSSNTPLVRIARLSSGEGPTLANVSELELPADPKWELSRARLTLGKPLGEGCFGQVVMAEAIGIDKDRAAKPVTVAVKMLKDDATDKDLSDLVSEMEMMKMIGKHKNIINLLGACTQGGPLYVLVEYAAKGNLREFLRARRPPGLDYSFDTCKPPEEQLTFKDLVSCAYQVARGMEYLASQKCIHRDLAARNVLVTEDNVMKIADFGLARDVHNLDYYKKTTNGRLPVKWMAPEALFDRVYTHQSDVWSFGVLLWEIFTLGGSPYPGIPVEELFKLLKEGHRMDKPANCTHDLYMIMRECWHAAPSQRPTFKQLVEDLDRVLTVTSTDEYLDLSAPFEQYSPGGQDTPSSSSSGDDSVFAHDLLPPAPPSSGGSRT

SEQ ID NO: 213732 - DNA, 513 bp, Artificial Sequence
  derived and/or modified sequence
gagtacctggacctgagcgcccccttcgagcagtacagccccggcggccaggacacccccagcagcagcagcagcggcgacgacagcgtgttcgcccacgacctgctggccaccggcccccagcagtgcgagggcagcctggccgcccaccccgccgccggcgcccagcccctgcccggcatgagactgagcgccgacggcgagaccgccacccagagcttcggcctgtgcgtgtgcgtgtgcgtgtgcgtgtgctgcaccagcgcctgcgcctgcgtgagagcccacctggccagcagatgcagaggcaccctgggcgtgcccgccgccgtgcagagaagccccgactggtgctgcagcaccgagggccccctgttctggggcgaccccgtgcagaacgtgagcggccccaccagatgggaccccggccagggcgccggccccgacatgagacccctgcccctgcaccacggcaccagccagggcctgggccccagccacacccagagctag

SEQ ID NO: 213733 - DNA, 2085 bp, Artificial Sequence
  derived and/or modified sequence
atgggcgcccccgcctgcgccctggccctgtgcgtggccgtggccatcgtggccggcgccagcagcgagagcctgggcaccgagcagagagtggtgggcagagccgccgaggtgcccggccccgagcccggccagcaggagcagctggtgttcggcagcggcgacgccgtggagctgagctgccccccccccggcggcggccccatgggccccaccgtgtgggtgaaggacggcaccggcctggtgcccagcgagagagtgctggtgggcccccagagactgcaggtgctgaacgccagccacgaggacagcggcgcctacagctgcagacagagactgacccagagagtgctgtgccacttcagcgtgagagtgaccgacgcccccagcagcggcgacgacgaggacggcgaggacgaggccgaggacaccggcgtggacaccggcgccccctactggaccagacccgagagaatggacaagaagctgctggccgtgcccgccgccaacaccgtgagattcagatgccccgccgccggcaaccccacccccagcatcagctggctgaagaacggcagagagttcagaggcgagcacagaatcggcggcatcaagctgagacaccagcagtggagcctggtgatggagagcgtggtgcccagcgacagaggcaactacacctgcgtggtggagaacaagttcggcagcatcagacagacctacaccctggacgtgctggagagaagcccccacagacccatcctgcaggccggcctgcccgccaaccagaccgccgtgctgggcagcgacgtggagttccactgcaaggtgtacagcgacgcccagccccacatccagtggctgaagcacgtggaggtgaacggcagcaaggtgggccccgacggcaccccctacgtgaccgtgctgaaggtgagcctggagagcaacgccagcatgagcagcaacacccccctggtgagaatcgccagactgagcagcggcgagggccccaccctggccaacgtgagcgagctggagctgcccgccgaccccaagtgggagctgagcagagccagactgaccctgggcaagcccctgggcgagggctgcttcggccaggtggtgatggccgaggccatcggcatcgacaaggacagagccgccaagcccgtgaccgtggccgtgaagatgctgaaggacgacgccaccgacaaggacctgagcgacctggtgagcgagatggagatgatgaagatgatcggcaagcacaagaacatcatcaacctgctgggcgcctgcacccagggcggccccctgtacgtgctggtggagtacgccgccaagggcaacctgagagagttcctgagagccagaagaccccccggcctggactacagcttcgacacctgcaagccccccgaggagcagctgaccttcaaggacctggtgagctgcgcctaccaggtggccagaggcatggagtacctggccagccagaagtgcatccacagagacctggccgccagaaacgtgctggtgaccgaggacaacgtgatgaagatcgccgacttcggcctggccagagacgtgcacaacctggactactacaagaagaccaccaacggcagactgcccgtgaagtggatggcccccgaggccctgttcgacagagtgtacacccaccagagcgacgtgtggagcttcggcgtgctgctgtgggagatcttcaccctgggcggcagcccctaccccggcatccccgtggaggagctgttcaagctgctgaaggagggccacagaatggacaagcccgccaactgcacccacgacctgtacatgatcatgagagagtgctggcacgccgcccccagccagagacccaccttcaagcagctggtggaggacctggacagagtgctgaccgtgaccagcaccgacgagtacctggacctgagcgcccccttcgagcagtacagccccggcggccaggacacccccagcagcagcagcagcggcgacgacagcgtgttcgcccacgacctgctgccccccgccccccccagcagcggcggcagcagaacctag

SEQ ID NO: 213734 - DNA, 513 bp, Artificial Sequence
  derived and/or modified sequence
gaataccttgatctgagtgccccgttcgagcagtattccccaggtggccaggacaccccaagctcttcatcctccggcgacgattccgtattcgcccacgatttactcgccacaggcccacagcagtgcgagggcagcctggctgcccaccccgctgctggtgcccagcccctgcccgggatgaggctgtccgccgacggtgagaccgccacccagtcattcgggctatgtgtctgcgtctgtgtctgtgtctgctgcacaagtgcctgcgcatgcgtgcgggctcatcttgcaagcaggtgtcgagggaccctcggagtgcctgcagcggtacagaggagccccgactggtgttgctctactgaggggccgctcttttggggagaccctgttcagaatgtctcaggtccaactcgatgggatcctgggcagggcgcaggaccggacatgagaccactgccactgcatcacggcacctcccagggccttggaccatctcatacccagtcctag

SEQ ID NO: 213735 - DNA, 2085 bp, Artificial Sequence
  derived and/or modified sequence
atgggcgctcccgcatgcgcactggctctgtgcgtggctgtcgccatcgtggctggggcctcctccgagagtctcgggaccgagcagcgggtggtaggccgtgcagccgaagtgcccggcccagagcccgggcagcaggagcagctggtgttcgggtctggggatgcagtggagctttcctgtcctcccccaggcggcggacctatgggccctacagtgtgggtcaaagacgggaccggactcgttccttccgagcgggtgctggtcgggccccaaagactgcaggtgttaaatgcaagccacgaagattctggggcctactcctgtagacagcgccttactcagcgggtgctgtgtcatttctctgtgcgggtgaccgatgcaccttcctcaggggacgatgaggatggggaggatgaggctgaggacactggggtggacactggcgccccctactggacaagacctgaaaggatggacaagaaattactcgccgtgccagcagccaacactgtgagattccgctgtccggctgctggaaacccaactccaagtatctcctggctaaagaatgggcgagagtttcgcggggagcaccgtattgggggaattaaattgcggcaccaacagtggagcctggtgatggagagcgtcgtgccctctgacaggggtaactacacctgcgtggtcgagaataagtttggatctatacgccagacgtatacactcgatgtactagagcgatcccctcatcggccaatcctgcaggctggcctgcccgctaatcagacggctgtgctgggcagtgatgtggaattccactgcaaggtgtattccgatgcccagccccacattcagtggctgaaacatgtcgaggttaacggttctaaggtggggcctgacgggacaccgtatgtcacagtgctcaaggtgagcctcgaatctaatgcttcgatgtcgagtaacacccccctcgtaaggatagcccgactcagcagcggagaagggcctaccttggctaacgtaagcgaactggaactacccgccgaccctaagtgggagctctcacgcgctcgactcacattgggtaagcctctgggcgagggctgttttggacaggttgtgatggcggaagctatcgggattgacaaagacagggcagccaaaccagtgactgtggcagttaaaatgctgaaagacgacgcaaccgataaggacctgtccgacttggtctctgaaatggagatgatgaagatgattggaaagcataaaaacattattaacctacttggcgcttgtacccagggcgggcctctgtacgtgcttgttgagtacgctgctaagggcaaccttcgcgaatttcttagggccaggcggccccctggcctggactattcatttgacacgtgtaagccacctgaagagcagcttacgttcaaagatctggtgagctgtgcctaccaggttgctcgtggcatggaatacttggcgtctcaaaaatgcatccaccgcgacctagccgcccgtaacgtgttggtcacggaggacaacgtgatgaagatagccgattttggactggcacgcgatgttcataacttggattattataagaagaccaccaatgggcgcctgcccgtgaagtggatggcgcccgaggcactttttgatcgcgtgtacactcatcagagcgacgtgtggtcctttggagtcctgctgtgggagatttttacactcgggggaagtccgtatcccggaattccagtagaggaactttttaagctcttgaaagagggacacagaatggataagcctgcaaattgtactcatgatttgtatatgataatgcgggaatgctggcacgccgccccctcacagaggccaaccttcaagcaactcgtagaagacctggaccgcgtgctcacagttacctcaacggacgaatacctggatttatccgccccctttgaacagtattctcccggcggccaggacactccctcttcaagttcatctggcgatgactccgtcttcgcccacgatctgctcccccccgcccctccctcgagcgggggatcgaggacgtag

SEQ ID NO: 213736 - DNA, 513 bp, Artificial Sequence
  derived and/or modified sequence
gagtacctggacctgtcggcgcctttcgagcagtactccccgggtggccaggacacccccagctccagctcctcaggggacgactccgtgtttgcccacgacctgctggccactggtccccaacaatgtgaggggtccctagcagcccaccctgctgctggtgcacagccactccccggcatgagactcagtgcagatggagagacagctacacagagctttggtctgtgtgtgtgtgtgtgcgtgtgtgtgtgttgcacatccgcgtgtgcctgtgtgcgtgcgcatcttgcctccaggtgcagaggtaccctgggtgtccccgctgctgtgcaacggtctcctgactggtgctgcagcaccgaggggcctttgttctggggggacccagtgcagaatgtaagtgggcccacccggtgggaccccgggcagggagctgggcccgacatgcggcctctgcctttgcaccacgggacatcacagggtctcggcccctcccacacccaaagctga

SEQ ID NO: 213737 - DNA, 3951 bp, Artificial Sequence
  derived and/or modified sequence
gtcgcgggcagctggcgccgcgcggtcctgctctgccggtcgcacggacgcaccggcgggccgccggccggagggacggggcgggagctgggcccgcggacagcgagccggagcgggagccgcgcgtagcgagccgggctccggcgctcgccagtctcccgagcggcgcccgcctcccgccggtgcccgcgccgggccgtggggggcagcatgcccgcgcgcgctgcctgaggacgccgcggcccccgcccccgccatgggcgcccctgcctgcgccctcgcgctctgcgtggccgtggccatcgtggccggcgcctcctcggagtccttggggacggagcagcgcgtcgtggggcgagcggcagaagtcccgggcccagagcccggccagcaggagcagttggtcttcggcagcggggatgctgtggagctgagctgtcccccgcccgggggtggtcccatggggcccactgtctgggtcaaggatggcacagggctggtgccctcggagcgtgtcctggtggggccccagcggctgcaggtgctgaatgcctcccacgaggactccggggcctacagctgccggcagcggctcacgcagcgcgtactgtgccacttcagtgtgcgggtgacagacgctccatcctcgggagatgacgaagacggggaggacgaggctgaggacacaggtgtggacacaggggccccttactggacacggcccgagcggatggacaagaagctgctggccgtgccggccgccaacaccgtccgcttccgctgcccagccgctggcaaccccactccctccatctcctggctgaagaacggcagggagttccgcggcgagcaccgcattggaggcatcaagctgcggcatcagcagtggagcctggtcatggaaagcgtggtgccctcggaccgcggcaactacacctgcgtcgtggagaacaagtttggcagcatccggcagacgtacacgctggacgtgctggagcgctccccgcaccggcccatcctgcaggcggggctgccggccaaccagacggcggtgctgggcagcgacgtggagttccactgcaaggtgtacagtgacgcacagccccacatccagtggctcaagcacgtggaggtgaatggcagcaaggtgggcccggacggcacaccctacgttaccgtgctcaaggtgtccctggagtccaacgcgtccatgagctccaacacaccactggtgcgcatcgcaaggctgtcctcaggggagggccccacgctggccaatgtctccgagctcgagctgcctgccgaccccaaatgggagctgtctcgggcccggctgaccctgggcaagccccttggggagggctgcttcggccaggtggtcatggcggaggccatcggcattgacaaggaccgggccgccaagcctgtcaccgtagccgtgaagatgctgaaagacgatgccactgacaaggacctgtcggacctggtgtctgagatggagatgatgaagatgatcgggaaacacaaaaacatcatcaacctgctgggcgcctgcacgcagggcgggcccctgtacgtgctggtggagtacgcggccaagggtaacctgcgggagtttctgcgggcgcggcggcccccgggcctggactactccttcgacacctgcaagccgcccgaggagcagctcaccttcaaggacctggtgtcctgtgcctaccaggtggcccggggcatggagtacttggcctcccagaagtgcatccacagggacctggctgcccgcaatgtgctggtgaccgaggacaacgtgatgaagatcgcagacttcgggctggcccgggacgtgcacaacctcgactactacaagaagacgaccaacggccggctgcccgtgaagtggatggcgcctgaggccttgtttgaccgagtctacactcaccagagtgacgtctggtcctttggggtcctgctctgggagatcttcacgctggggggctccccgtaccccggcatccctgtggaggagctcttcaagctgctgaaggagggccaccgcatggacaagcccgccaactgcacacacgacctgtacatgatcatgcgggagtgctggcatgccgcgccctcccagaggcccaccttcaagcagctggtggaggacctggaccgtgtccttaccgtgacgtccaccgacgagtacctggacctgtcggcgcctttcgagcagtactccccgggtggccaggacacccccagctccagctcctcaggggacgactccgtgtttgcccacgacctgctgcccccggccccacccagcagtgggggctcgcggacgtgaagggccactggtccccaacaatgtgaggggtccctagcagcccaccctgctgctggtgcacagccactccccggcatgagactcagtgcagatggagagacagctacacagagctttggtctgtgtgtgtgtgtgtgcgtgtgtgtgtgtgtgtgtgcacatccgcgtgtgcctgtgtgcgtgcgcatcttgcctccaggtgcagaggtaccctgggtgtccccgctgctgtgcaacggtctcctgactggtgctgcagcaccgaggggcctttgttctggggggacccagtgcagaatgtaagtgggcccacccggtgggacccccgtggggcagggagctgggcccgacatggctccggcctctgcctttgcaccacgggacatcacagggtgggcctcggcccctcccacacccaaagctgagcctgcagggaagccccacatgtccagcaccttgtgcctggggtgttagtggcaccgcctccccacctccaggctttcccacttcccaccctgcccctcagagactgaaattacgggtacctgaagatgggagcctttaccttttatgcaaaaggtttattccggaaactagtgtacatttctataaatagatgctgtgtatatggtatatatacatatatatatataacatatatggaagaggaaaaggctggtacaacggaggcctgcgaccctgggggcacaggaggcaggcatggccctgggcggggcgtgggggggcgtggagggaggccccagggggtctcacccatgcaagcagaggaccagggccttttctggcaccgcagttttgttttaaaactggacctgtatatttgtaaagctatttatgggcccctggcactcttgttcccacaccccaacacttccagcatttagctggccacatggcggagagttttaatttttaacttattgacaaccgagaaggtttatcccgccgatagagggacggccaagaatgtacgtccagcctgccccggagctggaggatcccctccaagcctaaaaggttgttaatagttggaggtgattccagtgaagatattttatttcctttgtcctttttcaggagaattagatttctataggatttttctttaggagatttattttttggacttcaaagcaagctggtattttcatacaaattcttctaattgctgtgtgtcccaggcagggagacggtttccagggaggggccggccctgtgtgcaggttccgatgttattagatgttacaagtttatatatatctatatatataatttattgagtttttacaagatgtatttgttgtagacttaacacttcttacgcaatgcttctagagttttatagcctggactgctacctttcaaagcttggagggaagccgtgaattcagttggttcgttctgtactgttactgggccctgagtctgggcagctgtcccttgcttgcctgcagggccatggctcagggtggtctcttcttggggcccagtgcatggtggccagaggtgtcacccaaaccggcaggtgcgattttgttaacccagcgacgaactttccgaaaaataaagacacctggttgctaacctgg

SEQ ID NO: 213738 - DNA, 513 bp, Artificial Sequence
  derived and/or modified sequence
gagtacctggacctgagcgccccctttgagcagtacagccctgggggccaggacacccccagcagcagcagcagtggagatgattctgtgtttgcccatgacctgctggccaccggcccccagcagtgtgagggcagcctggccgcccaccctgctgctggggcccagcccctgcccggcatgaggctgtctgcagatggagaaacagccacccagagctttggcctgtgtgtgtgtgtgtgtgtgtgtgtgtgctgcaccagcgcctgtgcctgtgtgcgggcccacctggccagccgctgccggggcaccctgggcgtgcctgctgctgtgcagaggagcccagactggtgctgcagcacagagggccccctcttctggggagaccctgtgcagaatgtgtctggccccacccgctgggaccccggccagggcgccggccctgacatgaggcccctgcccctgcaccacggcaccagccagggcctgggccccagccacacccagagctag

SEQ ID NO: 213739 - DNA, 2085 bp, Artificial Sequence
  derived and/or modified sequence
atgggcgccccagcctgtgccctggccctgtgtgtggccgtggccatcgtggccggggccagcagcgagagcctgggcacagagcagagggtggtgggccgggctgctgaggtgcccggccctgagcccggccagcaggagcagctggtgtttggaagtggagatgctgtggagctgagctgccccccacctgggggcggccccatgggccccaccgtgtgggtgaaggatggcaccggcctggtgcccagcgagcgggtgctggtgggcccccagaggctgcaggtgctgaatgccagccatgaggacagcggggcctacagctgccggcagaggctgacccagagggtgctgtgccacttctctgtgcgggtgacagatgcccccagcagtggagatgatgaagatggagaagatgaagctgaggacaccggggtggacaccggggccccctactggaccaggcctgagaggatggacaagaagctgctggccgtgcctgctgccaacacagtgcgcttccgctgcccagctgctggcaaccccacccccagcatctcctggctgaagaatggccgggagttccggggggagcacagaattggaggcatcaagctgcggcaccagcagtggagcctggtgatggagagcgtggtgcccagcgaccggggcaactacacctgtgtggtggagaacaagtttggcagcatccggcagacctacaccctggatgtgctggagaggagcccccaccggcccatcctgcaggccggcctgcctgccaaccagacagctgtgctgggcagtgatgtggagttccactgcaaggtgtacagtgatgcccagccccacatccagtggctgaagcacgtggaggtgaatggcagcaaggtgggcccagatggcaccccctacgtgacagtgctgaaggtgtccctggagagcaatgcctccatgagcagcaacacccccctggtgcgcatcgcccggctgagcagtggagagggccccaccctggccaacgtgtctgagctggagctgcctgctgaccccaagtgggagctgagccgggcccggctgaccctgggcaagcccctgggggagggctgcttcggccaggtggtgatggccgaggccatcggcatcgacaaggacagagctgccaagcctgtgacagtggccgtgaagatgctgaaggatgatgccacagacaaggacctgagtgacctggtgtctgagatggagatgatgaagatgattggcaagcacaagaacatcatcaacctgctgggcgcctgcacccagggcggccccctgtatgtgctggtggagtatgctgccaagggcaacctgcgggagttcctgcgggcccggcggcccccaggcctggactacagctttgacacctgcaagcccccagaggagcagctgaccttcaaggacctggtgtcctgtgcctaccaggtggcccggggcatggagtacctggccagccagaagtgcatccaccgggacctggccgccagaaatgtgctggtgacagaagataatgtgatgaagattgctgactttggcctggccagagatgtgcacaacctggactactacaagaagaccaccaacggccgcctgcctgtgaagtggatggcccctgaggccctgtttgacagagtgtacacccaccagagtgatgtgtggagctttggagtgctgctgtgggagatcttcaccctgggcggcagcccctacccaggcatccctgtggaggagctgttcaagctgctgaaggagggccacaggatggacaagccagccaactgcacccatgacctgtacatgatcatgagggagtgctggcatgctgcccccagccagaggcccaccttcaagcagctggtggaggacctggacagagtgctgactgtgaccagcacagatgagtacctggacctgagcgccccctttgagcagtacagccctgggggccaggacacccccagcagcagcagcagtggagatgattctgtgtttgcccatgacctgctgcccccagccccacccagcagcggcggcagcaggacatag

SEQ ID NO: 213740 - DNA, 513 bp, Artificial Sequence
  derived and/or modified sequence
gagtacctggacctgagcgcccccttcgagcagtacagccccggcgggcaggacacaccttcctcctcttcctctggtgatgactcagttttcgcccacgatctactcgccacagggcctcagcagtgtgaaggttccttagccgcccatccagcagccggagctcagccattgccgggaatgagactgtcagccgatggggaaactgctacacaatcgttcggcctgtgcgtgtgtgtgtgcgtgtgtgtgtgttgtacatccgcttgtgcctgtgttcgcgcccacttagcctcccgatgtcggggcacactgggggttccggccgcagtgcaacgctcaccagattggtgctgttctaccgaagggcccctgttctggggggaccctgttcagaatgtgagtgggccgactagatgggaccccggacagggagccggccccgacatgaggcccctgccactgcaccatggaacctcacagggtctggggccatcgcacacccagtcgtag

SEQ ID NO: 213741 - DNA, 2085 bp, Artificial Sequence
  derived and/or modified sequence
atgggcgcccccgcctgcgccctggccctgtgcgtggccgtggccattgtagccggggcctcttcagagagcctgggcacagagcagagggttgtgggacgggccgcagaagtgcccggacctgagcccggtcaacaagagcagctagtttttgggagcggcgatgccgtggagctgtcctgcccccctcccggaggtggacctatgggcccgactgtttgggttaaggacggaactggcctggtgccgtcagagcgggtgctggttggcccccagagactacaagtcctgaacgcatcccatgaggattcgggggcttattcatgcagacagcggctaacacaacgcgtgctttgtcatttttcagtgagggtgaccgacgcccctagctccggagacgacgaagacggcgaggatgaggcggaggatacaggcgtggacaccggcgcaccctattggacccgacctgagagaatggacaaaaagctcctagctgttccagcagctaacactgtgcggtttcgctgccctgcagcaggcaatccaaccccctcaatttcctggttaaagaacggacgagagttccgcggcgaacataggattggcgggataaaactgcgtcatcagcagtggtcactggtgatggagagcgtagtgcccagtgaccggggaaactatacatgtgttgttgagaacaagtttggatccatacggcagacgtatacccttgacgttcttgagcggtcccctcatagacccatccttcaggccgggttacctgctaaccaaactgccgtgcttggaagcgacgtggagttccattgcaaagtctactccgacgcacagccccatatccagtggttaaaacacgtcgaggtcaatggatctaaggtcggccctgacggtaccccatatgttacggtgttgaaggtgagtcttgaatccaacgctagtatgtccagcaacaccccactcgtacgcatcgccaggctatcctctggcgagggccctactcttgccaatgtcagcgaattagagctgcctgctgatcccaagtgggaactctcacgggcaaggctgaccctgggtaagcctttgggggaagggtgcttcggtcaggtggtgatggccgaggccataggcatcgataaagaccgggcagctaagcccgtgacggtggcagttaagatgcttaaggacgatgccacagataaggatctttcagatctggtgagtgaaatggaaatgatgaagatgataggtaagcataagaacatcattaacctcctgggggcctgcacccagggtggtcctttgtacgttctggtggagtacgcagcgaaaggtaacctgagagagttccttcgggctagacggcctcccggactggactacagttttgatacttgtaaaccaccagaggaacagctgacattcaaggacctggtgtcctgcgcctatcaggtcgcaaggggcatggagtacctcgctagccaaaaatgcattcaccgcgatttagcggccaggaacgtgttggtgaccgaggacaatgtaatgaaaattgccgacttcgggctggcccgtgatgtgcacaatctagactactacaagaagaccactaacgggcgactgcctgtgaaatggatggcccccgaagcgctgttcgacagagtctatactcaccaatccgacgtttggagtttcggcgtcttgctttgggaaatatttacactgggtggaagcccttacccaggcatccctgtcgaagagctattcaaacttttgaaggaaggacaccggatggataagcctgctaactgcacacacgacctatatatgattatgagagagtgttggcatgccgcaccgtcacagcgacccacctttaaacagctggtggaggatttggacagggtactgacagttacttcaactgacgagtacttagacctcagcgctccattcgaacagtattctcccggcggtcaggacaccccttcctcttcttcaagtggagacgattctgtatttgcgcatgacctcctaccccctgctccccctagcagcgggggttccagaacttag

SEQ ID NO: 213742 - DNA, 513 bp, Artificial Sequence
  derived and/or modified sequence
gagtacctggatctgagtgcgccattcgaacagtactcaccaggagggcaggataccccatcttcgtcctcatccggggacgatagtgtgttcgcacatgacctgctcgccactggaccgcagcagtgcgagggatcactggccgcacatcctgccgcaggggcacagccacttccaggcatgcgcttgtccgccgatggggagacagctacacagtcatttggactttgtgtgtgcgtatgtgtttgtgtctgttgtactagtgcatgtgcctgtgtgagagcacatctggcatctaggtgtagaggtactctcggggttccagccgcagtccagaggtctcctgattggtgctgtagtacagaagggcctctcttctggggagacccggtgcagaacgtctctgggccaacacggtgggaccctggtcagggggcaggaccagatatgcgccctctgccactgcatcacgggacaagccaaggactgggcccttcacacactcaatcctag

SEQ ID NO: 213743 - DNA, 2085 bp, Artificial Sequence
  derived and/or modified sequence
atgggtgcaccagcttgcgctctggccctgtgtgtcgccgtagccatcgtggccggagccagctccgaatcattgggaactgagcagcgagtggtggggcgagctgccgaagttcccggaccagaacctgggcagcaggagcaactggtattcgggagcggggacgcggtggaattaagctgccctccccctggtggaggccctatgggcccaacagtgtgggttaaagacgggactggactggtgccatcagagcgagtgttggtcgggccacaaagactgcaggtgttgaatgcgtcgcacgaagatagtggagcgtatagttgccggcaaagactgacgcagagggtgctgtgccacttctcagtaagagtgacagacgctcccagttcgggcgacgacgaagatggggaagacgaagccgaggatactggagtagataccggagctccgtattggactagacccgaacgaatggacaaaaaacttctagctgtgcccgcagccaacacggtccgcttccggtgccctgccgcaggaaatcccacaccgagcatcagctggctgaagaacggtcgcgagtttcggggagagcacagaatcggcggtatcaaactgcggcaccagcagtggagcctggtgatggaatctgttgtgccgagtgacagaggtaactacacctgcgtggtagagaataaattcggctcaatccgccaaacctacactctggatgttttggagagaagccctcatcggccaatcctgcaggctggactgccagcaaaccagaccgccgtgttaggcagcgatgtcgagtttcactgcaaagtgtattctgacgcccagccacatatccaatggctgaagcacgttgaggttaatggctctaaggtcggcccagacggcaccccatatgtcaccgtgttgaaggtctccctggagtccaatgcctcaatgtcgtccaataccccactcgtgaggatcgctagactgtcaagcggtgagggcccaacattggctaacgtgtcggaactggaactccccgctgaccctaaatgggaactgtccagggcgcgattaactcttggaaaacctctcggcgaagggtgcttcggccaggtcgttatggcagaagctattgggatcgacaaagaccgggctgctaagccagtcacggtcgcagtcaaaatgttgaaggacgacgctaccgacaaggatctttcagacctggtaagcgaaatggagatgatgaagatgatcggcaagcacaagaatatcatcaacctgctcggcgcatgtactcagggtggccctttgtacgtcctcgtcgaatatgccgctaaaggaaatctgagagaattcttgcgcgctagacggccacccggactggattactcgtttgatacatgcaaacctccggaagagcagctgacattcaaagatctcgtgagttgcgcttatcaggtggctcggggaatggaatacttggcctcccagaaatgcatccacagagatttggccgctcgcaacgttctcgtgaccgaggataacgtcatgaaaatcgccgattttgggctggcgagggatgtgcacaatctggactattataaaaaaactaccaacggcaggctgcctgtaaagtggatggcgcctgaagctctttttgatcgggtttatacacatcagtcagacgtgtggtcattcggcgtgttattgtgggagatcttcactttggggggaagcccgtatcccggaatcccagtcgaggaactatttaagctgctgaaggaggggcaccggatggataagccggcaaactgcacccacgacctgtatatgattatgcgagagtgctggcacgccgctcctagccagcgacctaccttcaaacaactcgtggaagacctcgacagagtgctgacggttacaagcacagatgaatatttagacctgtcagcgccttttgagcaatactccccagggggtcaggacactccatcttcatcttcatcaggtgatgatagcgtgttcgctcatgacctgttgccaccagcgcctcccagctccggagggagcagaacttag

SEQ ID NO: 213744 - protein, 62 aa, Artificial Sequence
  derived and/or modified sequence
MARGNQRELARQKNMKKTQEISKGKRKEDSLTASQRKQRDSEIMQEKQKAANEKKSMQTREK

SEQ ID NO: 213745 - protein, 48 aa, Artificial Sequence
  derived and/or modified sequence
MKKTQEISKGKRKEDSLTASQRKQRDSEIMQEKQKAANEKKSMQTREK

SEQ ID NO: 213746 - protein, 20 aa, Artificial Sequence
  derived and/or modified sequence
MKKTQEISKGKRKEDSLTAS

SEQ ID NO: 213747 - DNA, 189 bp, Artificial Sequence
  derived and/or modified sequence
atggccagaggcaaccagagagagctggccagacagaagaacatgaagaagacccaggagatcagcaagggcaagagaaaggaggacagcctgaccgccagccagagaaagcagagagacagcgagatcatgcaggagaagcagaaggccgccaacgagaagaagagcatgcagaccagagagaagtag

SEQ ID NO: 213748 - DNA, 189 bp, Artificial Sequence
  derived and/or modified sequence
atggctcgtgggaatcagcgcgagctagccaggcagaagaacatgaaaaagacccaggagatatccaaagggaagaggaaagaagacagcttaacagcgtctcaacggaagcagcgtgattctgagattatgcaggaaaagcagaaggcggcaaacgagaagaagtctatgcagacacgcgagaaatag

SEQ ID NO: 213749 - DNA, 189 bp, Artificial Sequence
  derived and/or modified sequence
atggcccggggcaaccagcgggagctggcccggcagaagaacatgaagaagacccaggagatcagcaagggcaagaggaaggaggacagcctgacagccagccagaggaagcagagggacagcgagatcatgcaggagaagcagaaggccgccaatgagaagaagtccatgcagacccgggagaagtag

SEQ ID NO: 213750 - DNA, 189 bp, Artificial Sequence
  derived and/or modified sequence
atggcccggggcaaccagcgggagctggcccggcagaagaacatgaagaagactcaggaaatttcaaagggcaaacggaaagaggattcgctgacagcgagtcagcgtaaacagagagacagtgaaataatgcaggagaaacagaaggcggcgaacgaaaagaagtccatgcagacaagggagaagtag

SEQ ID NO: 213751 - DNA, 189 bp, Artificial Sequence
  derived and/or modified sequence
atggctcgcggtaaccagcgggaactggccagacagaaaaacatgaagaaaactcaggagatctctaagggcaaaagaaaggaggattccctgacagcgtcccagaggaaacagagagattctgagatcatgcaggagaagcagaaagctgctaatgaaaagaaatcaatgcaaactcgcgagaagtag

SEQ ID NO: 213752 - DNA, 703 bp, Artificial Sequence
  derived and/or modified sequence
gcgcagtgacgcgccggccatgccggcggctgttgtcgggcctccagcgggcggggccgttggcggagcagaggggaggcgcagccgggcggagggcccacgagggctcagccttcccggtcagcggtggtgacggtatcccagagtgccagagaaccgttgcttttccgagttgctcttcttccaggctccgttggtggtcggcatggcccgtggaaatcaacgagaacttgcccgccagaaaaacatgaagaaaacccaggaaattagcaagggaaagaggaaagaggatagcttgactgcctctcagagaaagcagagggactctgagatcatgcaagaaaagcagaaggcagctaatgagaagaagtctatgcagacaagagaaaagtgatgactggctatttggaaaacctgggtgctactgccaactgggtgtatcataagctctaagatcaagattttgtagagtggacagtcattacatatgttataacttatcctttaaaaactattttaaactttatcctttcagctttacttagtgcgatgttttagaagcagtcttcaaagaataaaacactaaccatgcatgtgacatattggtgaacattatttttattattgaacattcatatataatttattaggtaatatgatcagataataggatctcttatataataaagaatctttgtcatca

SEQ ID NO: 213753 - DNA, 189 bp, Artificial Sequence
  derived and/or modified sequence
atggccagaggaaatcagagggaacttgcgaggcaaaagaatatgaagaaaacgcaggaaataagtaaagggaagcggaaagaagactccctgacagcctcccagcgcaaacagcgggacagcgaaattatgcaggagaaacagaaagctgccaacgaaaagaagagcatgcagactcgcgagaagtag

SEQ ID NO: 213754 - DNA, 147 bp, Artificial Sequence
  derived and/or modified sequence
atgaaaaaaacgcaggaaatctcaaagggaaagagaaaagaagattccctgaccgccagccaacggaagcaacgtgacagtgagatcatgcaggagaagcagaaagccgccaatgaaaagaaatctatgcagacccgcgagaaatag

SEQ ID NO: 213755 - DNA, 63 bp, Artificial Sequence
  derived and/or modified sequence
atgaagaagacacaggagatttcaaagggtaagcggaaagaagacagcctgactgccagctag

SEQ ID NO: 213756 - DNA, 147 bp, Artificial Sequence
  derived and/or modified sequence
atgaagaagacccaggagatcagcaagggcaagaggaaggaggacagcctgacagccagccagaggaagcagagggacagcgagatcatgcaggagaagcagaaggccgccaatgagaagaagtccatgcagacccgggagaagtag

SEQ ID NO: 213757 - DNA, 63 bp, Artificial Sequence
  derived and/or modified sequence
atgaagaagacccaggagatcagcaagggcaagaggaaggaggacagcctgacagccagctag

SEQ ID NO: 213758 - DNA, 189 bp, Artificial Sequence
  derived and/or modified sequence
atggcccggggcaaccagcgggagctggcccggcagaagaacatgaagaagacacaagagatcagcaagggaaaaagaaaagaggattcactcactgcttcgcagagaaaacagagagacagtgagatcatgcaagagaaacagaaggcagctaatgagaaaaagtcgatgcagacacgcgagaagtag

SEQ ID NO: 213759 - DNA, 147 bp, Artificial Sequence
  derived and/or modified sequence
atgaagaagacccaggagatcagcaagggcaagcggaaggaggactctctgactgcaagtcagcggaagcagcgggacagtgagatcatgcaggaaaaacaaaaagccgctaatgagaagaagtctatgcaaactcgagagaagtag

SEQ ID NO: 213760 - DNA, 63 bp, Artificial Sequence
  derived and/or modified sequence
atgaagaagacccaggagatcagcaagggcaagcggaaggaggacagcctcaccgcttcctag

SEQ ID NO: 213761 - DNA, 189 bp, Artificial Sequence
  derived and/or modified sequence
atggcacgaggaaaccagagggaactcgctagacagaagaatatgaaaaaaactcaggagatatcaaaagggaaaagaaaagaggattcattaacagcgagtcaacggaagcagcgggattctgaaatcatgcaggagaagcaaaaggccgctaacgagaaaaaatccatgcaaacaagggaaaaatag

SEQ ID NO: 213762 - DNA, 147 bp, Artificial Sequence
  derived and/or modified sequence
atgaaaaaaacacaggaaatctccaaggggaagaggaaagaggactctcttaccgctagccaaagaaagcaacgggacagcgagatcatgcaggagaaacaaaaagccgctaacgagaagaaaagcatgcagaccagggagaagtag

SEQ ID NO: 213763 - DNA, 63 bp, Artificial Sequence
  derived and/or modified sequence
atgaagaaaacccaggaaatatcaaagggaaagaggaaggaggattctctcacagccagctag

SEQ ID NO: 213764 - DNA, 663 bp, Artificial Sequence
  derived and/or modified sequence
gtcgcgcagtgcggggatccccgcttcagtcggcagagagagagctcgcgggtggttccggtccggcttttcaggccggacgggtgcctgcccctcaggtgcgagtttgtgcggtaaagaacacaccccggagatgtggacacggccgccccaggagggtccttgtttggaggtggaaatcaacgagaacttgcccgccagaaaaacatgaagaaaacccaggaaattagcaagggaaagaggaaagaggatagcttgactgcctctcagagaaagcagagggactctgagatcatgcaagaaaagcagaaggcagctaatgagaagaagtctatgcagacaagagaaaagtgatgactggctatttggaaaacctgggtgctactgccaactgggtgtatcataagctctaagatcaagattttgtagagtggacagtcattacatatgttataacttatcctttaaaaactattttaaactttatcctttcagctttacttagtgcgatgttttagaagcagtcttcaaagaataaaacactaaccatgcatgtgacatattggtgaacattatttttattattgaacattcatatataatttattaggtaatatgatcagataataggatctcttatataataaagaatctttgtcatca

SEQ ID NO: 213765 - DNA, 328 bp, Artificial Sequence
  derived and/or modified sequence
agtgacgcgccggccatgccggcggctgttgtcgggcctccagcgggcggggccgttggcggagcagaggggaggcgcagccgggcggagggcccacgagggctcagccttcccggtcagcggtggtgacggtatcccagagtgccagagaaccgttgcttttccgagttgctcttcttccaggctccgttggtggtcggcatggcccagcatgactgtttgactttgtaggtggaaatcaacgagaacttgcccgccagaaaaacatgaagaaaacccaggaaattagcaagggaaagaggaaagaggatagcttgactgcctctca

SEQ ID NO: 213766 - DNA, 147 bp, Artificial Sequence
  derived and/or modified sequence
atgaagaagacccaggagatcagcaagggcaagagaaaggaggacagcctgaccgccagccagagaaagcagagagacagcgagatcatgcaggagaagcagaaggccgccaacgagaagaagagcatgcagaccagagagaagtag

SEQ ID NO: 213767 - DNA, 63 bp, Artificial Sequence
  derived and/or modified sequence
atgaagaagacccaggagatcagcaagggcaagagaaaggaggacagcctgaccgccagctag

SEQ ID NO: 213768 - protein, 822 aa, Artificial Sequence
  derived and/or modified sequence
MVSWGRFICLVVVTMATLSLARPSFSLVEDTTLEPEEPPTKYQISQPEVYVAAPGESLEVRCLLKDAAVISWTKDGVHLGPNNRTVLIGEYLQIKGATPRDSGLYACTASRTVDSETWYFMVNVTDAISSGDDEDDTDGAEDFVSENSNNKRAPYWTNTEKMEKRLHAVPAANTVKFRCPAGGNPMPTMRWLKNGKEFKQEHRIGGYKVRNQHWSLIMESVVPSDKGNYTCVVENEYGSINHTYHLDVVERSPHRPILQAGLPANASTVVGGDVEFVCKVYSDAQPHIQWIKHVEKNGSKYGPDGLPYLKVLKHSGINSSNAEVLALFNVTEADAGEYICKVSNYIGQANQSAWLTVLPKQQAPGREKEITASPDYLEIAIYCIGVFLIACMVVTVILCRMKNTTKKPDFSSQPAVHKLTKRIPLRRQVTVSAESSSSMNSNTPLVRITTRLSSTADTPMLAGVSEYELPEDPKWEFPRDKLTLGKPLGEGCFGQVVMAEAVGIDKDKPKEAVTVAVKMLKDDATEKDLSDLVSEMEMMKMIGKHKNIINLLGACTQDGPLYVIVEYASKGNLREYLRARRPPGMEYSYDINRVPEEQMTFKDLVSCTYQLARGMEYLASQKCIHRDLAARNVLVTENNVMKIADFGLARDINNIDYYKKTTNGRLPVKWMAPEALFDRVYTHQSDVWSFGVLMWEIFTLGGSPYPGIPVEELFKLLKEGHRMDKPANCTNELYMMMRDCWHAVPSQRPTFKQLVEDLDRILTLTTNEEYLDLSQPLEQYSPSYPDTRSSCSSGDDSVFSPDPMPYEPCLPQYPHINGSVKT

SEQ ID NO: 213769 - DNA, 2469 bp, Artificial Sequence
  derived and/or modified sequence
atggtctcctggggtcgattcatctgcttggtggtcgttactatggcaactctaagtttggctcgaccaagtttctctttggtcgaagataccacactggagcccgaggaaccgcccactaagtaccagatttctcagcctgaagtatacgtcgccgctcctggggagtctttggaagtacgctgtctcttaaaggacgcggccgtaatcagctggacaaaggacggagttcaccttgggcctaacaataggaccgtcctaattggtgagtaccttcaaataaagggtgctacaccaagggacagcggtttgtatgcctgcacagctagccgaaccgtggacagtgaaacttggtactttatggtgaatgttactgacgctatatcctctggcgacgacgaggatgacactgacggcgctgaggatttcgtcagcgaaaactcaaacaataagagggccccttattggactaatacagaaaagatggagaaacgcctacatgctgtgccagctgccaataccgtcaaattccggtgccccgccggcgggaatcctatgcctactatgaggtggttgaagaatggcaaggagtttaagcaggagcatcggattggcggatacaaggtgcggaaccagcactggtcactcatcatggagtccgttgttccgagcgacaagggcaattatacatgtgtcgttgagaatgaatatgggtccatcaaccatacatatcacctggacgtggtggagcgatcacctcatcggcccattctgcaggcaggcctgcctgcgaatgccagcaccgttgtcggcggggacgtcgagttcgtttgcaaagtgtattccgacgcccagccacatatccaatggattaagcacgtggagaaaaacgggtctaagtacggtccagacggtctaccatacctgaaagttttaaagcattctggcatcaattccagcaacgctgaggtgttagctttgttcaatgtgaccgaggctgacgcaggtgaatatatatgtaaggtgtcaaattatatcggtcaggccaatcagtcagcatggctcaccgtgttgccaaaacagcaagccccagggagggagaaggagatcacggcatctcctgactacctcgagatagctatctattgcattggggtctttctgatcgcctgcatggtcgtaacagtaattctttgtcgtatgaagaataccactaaaaaaccagacttctcctcacaaccagccgtgcataagctgactaaacgcatccctctgcggcgccaggttacagtttcagccgaaagtagttcctccatgaatagcaacacacctttggtgagaatcactacacgcctaagctcgaccgccgacacaccaatgttagccggcgtaagcgagtacgaactgcctgaagaccctaagtgggagttcccacgggacaaactgacactgggaaagcctcttggcgaaggctgctttggacaggtggtgatggctgaggctgttggcattgataaagacaagccaaaagaagcagtgactgtggcagtgaaaatgctgaaggatgacgcgaccgaaaaggatctttccgatttggtcagtgagatggagatgatgaaaatgatagggaaacacaaaaatataatcaatcttttaggcgcttgcacccaggacggccctttatatgtgatcgtcgaatatgcatctaagggtaatctcagggaatacttaagagcccggcgccctccaggtatggagtattcatatgacattaatagagtgcctgaggagcagatgacgttcaaggacctcgtgagctgcacctatcagctcgcacgcggcatggagtatctggcgtcccagaagtgtatccaccgtgacctggcagctcgcaatgtgttagtcaccgagaataatgtaatgaagatcgccgatttcggcctggctcgtgacatcaataatatcgactactataagaagactaccaatggccgcttacccgtgaaatggatggccccagaggccctattcgatcgcgtatatacacatcagtctgatgtgtggagcttcggagtgctgatgtgggaaatctttacgctagggggcagtccgtatcctgggatccccgttgaggagctctttaagttgcttaaggagggccatagaatggataaaccggctaactgtactaacgagttgtacatgatgatgagggattgttggcatgctgtaccttcacagcgccccacattcaagcagctagttgaagatctggacaggatcctaactttgacaactaacgaggaatatctagatctgtctcagcctctcgaacagtattccccaagctatcctgatacaagatcttcctgctccagcggggacgattcggtattctcgcccgatcccatgccctacgagccttgtctgccccagtacccacatataaatgggagcgtgaagacatag

SEQ ID NO: 213770 - DNA, 2469 bp, Artificial Sequence
  derived and/or modified sequence
atggtgtcctggggccgcttcatctgcctggtggtggtgaccatggccaccctgagcctggcccggcccagcttcagcctggtggaggacaccaccctggagcctgaggagccccccaccaagtaccagatcagccagcctgaggtgtatgtggccgcccctggagagagcctggaggtgcgctgcctgctgaaggatgctgctgtgatctcctggaccaaggatggagtgcacctgggccccaacaacagaacagtgctgattggagagtacctgcagatcaagggggccaccccccgggacagcggcctgtatgcctgcacagccagcaggacagtggacagcgagacctggtacttcatggtgaatgtgacagatgccatcagcagtggagatgatgaagatgacacagatggagcagaagattttgtgtctgagaacagcaacaacaagagggccccctactggaccaacacagagaagatggagaagaggctgcatgctgtgcctgctgccaacacagtgaagttccgctgcccagctgggggcaaccccatgcccaccatgcgctggctgaagaatggcaaggagttcaagcaggagcaccgcatcggcggctacaaggtgaggaaccagcactggagcctcatcatggagagcgtggtgcccagcgacaagggcaactacacctgtgtggtggagaatgaatatggcagcatcaaccacacctaccacctggatgtggtggagaggagcccccaccggcccatcctgcaggccggcctgcctgccaatgccagcacagtggtgggcggagatgtggagtttgtgtgcaaggtgtacagtgatgcccagccccacatccagtggatcaagcacgtggagaagaatggcagcaaatatggcccagatggcctgccctacctgaaggtgctgaagcacagcggcatcaacagcagcaatgctgaggtgctggccctcttcaacgtgacagaagcagatgctggggagtacatctgcaaggtgagcaactacatcggccaggccaaccagagcgcctggctgactgtgctgcccaagcagcaggcccctggccgggagaaggagatcacagccagcccagactacctggagatcgccatctactgcatcggggtcttcctgattgcctgcatggtggtgaccgtcatcctgtgcaggatgaagaacaccaccaagaagccagacttcagcagccagcctgctgtgcacaagctgaccaagaggatccccctgcggcggcaggtgacagtgtctgctgagagcagcagctccatgaacagcaacacccccctggtgcgcatcaccacccggctgagcagcacagctgacacccccatgctggccggcgtgtctgaatatgagctgcctgaggaccccaagtgggagttcccccgggacaagctgaccctgggcaagcccctgggggagggctgcttcggccaggtggtgatggccgaggccgtgggcatcgacaaggacaagcccaaggaggccgtgacagtggccgtgaagatgctgaaggatgatgccacagagaaggacctgagtgacctggtgtctgagatggagatgatgaagatgattggcaagcacaagaacatcatcaacctgctgggcgcctgcacccaggacggccccctgtatgtgattgtggagtatgccagcaagggcaacctgcgggagtacctgcgggcccggcggcccccaggcatggagtacagctatgacatcaacagagtgcctgaggagcagatgaccttcaaggacctggtgtcctgcacctaccagctggcccggggcatggagtacctggccagccagaagtgcatccaccgggacctggccgccagaaatgtgctggtgacagaaaataatgtgatgaagattgctgactttggcctggcccgggacatcaacaacatcgactactacaagaagaccaccaacggccgcctgcctgtgaagtggatggcccctgaggccctgtttgacagagtgtacacccaccagagtgatgtgtggagctttggagtgctgatgtgggagatcttcaccctgggcggcagcccctacccaggcatccctgtggaggagctgttcaagctgctgaaggagggccacaggatggacaagccagccaactgcaccaatgagctgtacatgatgatgagggactgctggcatgctgtgcccagccagaggcccaccttcaagcagctggtggaggacctggaccgcatcctgaccctgaccaccaatgaggagtacctggacctgagccagcccctggagcagtacagccccagctacccagacaccaggagcagctgcagcagtggagatgattctgtgttctccccagaccccatgccctatgagccctgcctgccccagtacccccacatcaatggatctgtgaagacctag

SEQ ID NO: 213771 - DNA, 2469 bp, Artificial Sequence
  derived and/or modified sequence
atggtgagctggggccggttcatctgcctggtggtggtgaccatggcaactttgagcctggcccggcctagcttctccctcgttgaggacaccactctggagcctgaagagcctcccacaaaataccaaatttctcaacccgaagtttacgtagccgcacccggggaatcactggaggtgcggtgtctgttgaaagacgcagccgtcatttcctggacgaaggacggggtgcacctaggacccaacaaccgaacagtactgattggagagtatttgcaaattaaaggagccacacctcgcgactccggactatacgcctgcacggcatcccgcactgtagactccgaaacctggtattttatggtgaatgtaacagatgcgatctctagcggtgacgatgaagatgacaccgacggcgccgaagacttcgtgtcagagaactccaataataaaagagctccttattggactaacactgaaaagatggagaagcgtctacatgccgtgcccgccgccaacactgtcaagttccggtgtcctgccgggggtaacccaatgcccacgatgagatggctcaagaatggaaaagagttcaagcaggaacatcggattgggggttacaaagtgagaaatcagcactggtccctaattatggagagcgtggtcccatctgacaagggcaattatacctgcgttgtagaaaacgaatatggctcaataaaccacacctatcacctagatgtcgtcgagcgctctccacaccgccccatattacaagcaggactccctgcgaacgcttcaacagtggtagggggggacgtggaatttgtgtgcaaggtgtatagcgacgcacagccacatatccagtggatcaagcacgtggagaagaatggctcgaagtacggacccgatggcttaccttacctcaaggtgctgaagcacagtggtatcaatagtagtaacgcggaggtccttgcgctgttcaacgtgacggaggccgacgctggagagtacatttgtaaggtatcgaactatatcgggcaggcaaaccagagtgcttggttgacagtgttgcctaagcagcaggctcctggacgagagaaagaaatcactgcctctcctgactatctggaaattgcaatctattgcattggcgtattcctgattgcgtgtatggtggtaaccgtgattctgtgtcgaatgaaaaataccaccaagaaacctgacttttcctcgcagccagcagtccataaactaactaaacgtatacctctccggcgccaagtgacagtctccgccgagtcctcatcctctatgaactccaacactcccctcgtgcgcattacaacacggctgtccagtactgctgacacacccatgctcgccggcgtctccgaatatgaacttcccgaagaccccaaatgggagtttcccagagataagctaactttaggcaagccactgggcgaagggtgttttgggcaggtagtgatggcggaggccgttggtatcgataaagacaaaccgaaggaggccgtcacagtggccgtgaagatgctgaaagacgacgctacagagaaggatttatctgacttggtgtctgaaatggaaatgatgaagatgattggtaaacacaaaaacattattaaccttctaggggcttgcactcaagatgggcccctgtatgttatcgtcgagtacgcttctaagggcaacttgagagagtatctgcgcgcccgcagaccgcccggaatggaatattcctatgacatcaatagagtacccgaggagcagatgaccttcaaagatctcgtctcttgtacttatcagttggctaggggcatggagtacctagccagtcagaaatgtatccatcgcgatctcgcagccagaaatgtgcttgtgaccgagaacaatgtgatgaagattgccgatttcgggctcgctcgagatattaacaatatagactactataagaagactaccaatgggcgcctgcccgtcaaatggatggcccccgaggcgctgttcgatagagtgtacacccatcagtccgatgtatggtcttttggtgtgctcatgtgggagatattcacactgggaggcagtccgtacccaggaatacccgtggaagagctgtttaaactcctgaaggagggtcaccgcatggacaagcccgctaattgcactaatgaactgtacatgatgatgcgagactgttggcatgccgtcccctcacagaggccaacctttaagcagctggtcgaagatcttgatagaattctgacactgaccacgaacgaagaatatctggatctttctcaacccctggagcagtactcccctagctacccggacacccggtcatcttgttcatctggggacgattccgtgttttcgcccgatcctatgccgtatgagccttgtctgcctcaatatcctcacataaatgggtccgtgaaaacatag

SEQ ID NO: 213772 - DNA, 2469 bp, Artificial Sequence
  derived and/or modified sequence
atggtctcatggggtcggtttatctgtcttgttgtggtcactatggcaaccctctctctggccaggccctctttttcactcgtggaagacacaacccttgaacctgaggaaccacccactaaataccaaatctcacagcctgaggtctatgtggccgctcccggagagagcctggaggtgagatgtctgctgaaagacgcggcagtgatctcatggacgaaagacggggttcacttgggaccaaataatagaacagtgctgatcggggaatacctgcagatcaaaggcgcaactcctcgcgatagcggcctttatgcctgcaccgcgagtcgtacagtggattcagaaacctggtactttatggtcaacgtaacagacgcgatctctagtggagacgacgaggacgacacagacggcgctgaggacttcgtgagcgaaaacagcaataacaaaagagcgccatactggaccaataccgagaagatggaaaagcggctccatgcagtgccagcagctaacacagtgaaatttaggtgccccgctgggggaaatcctatgcctactatgaggtggctaaagaatggaaaggagtttaaacaggagcaccggatcggcggatacaaagtgcgtaaccagcattggtctcttatcatggaaagcgttgtgccctcggacaaaggtaactatacttgtgtcgttgagaacgagtatgggagcataaaccacacctatcacttagatgtcgttgagaggtcgccccaccgacccattctccaagccggtctgcccgcaaacgcgtctaccgtagttggcggagatgttgaattcgtttgtaaggtgtactcggatgctcagccacacattcagtggattaagcatgtggagaaaaacggaagcaagtacgggccagacggtctcccttatctcaaggttctcaaacattctggaatcaacagttcaaacgctgaggtactcgcactgttcaacgttactgaagctgacgcaggtgagtatatctgtaaagtgtctaattacattggtcaggccaatcagagtgcatggctgaccgtcctgcccaaacagcaggccccaggcagagagaaggaaatcaccgcatcccctgactacttggagatcgctatctactgcatcggagtgtttttgattgcctgcatggtagtgactgtgatcctgtgcagaatgaagaatacaacaaagaagcccgacttttcatctcagcccgcagtgcataaactaaccaagcgaatacccctccgcaggcaggtcaccgtgtccgctgaatcttctagttctatgaactcaaacactcctctggtcaggattacaactcggctctcctccaccgccgacacacccatgctcgccggagtttcggagtacgaacttcccgaggatccaaagtgggaatttcccagggataagttaacgctcgggaagcctctgggagagggctgcttcgggcaagtggtaatggcggaagcggtgggaattgacaaagataagccaaaagaagctgtgacagtggcagtgaaaatgctgaaagacgacgctactgaaaaagatttatctgatctcgtcagcgagatggagatgatgaaaatgatcggcaaacataagaatattatcaatctccttggggcttgtactcaagatgggccactctacgtgattgtggagtacgcaagcaaggggaatctgagggagtaccttcgcgcacggagaccaccgggtatggaatatagctatgacataaatcgcgtaccagaggagcaaatgactttcaaagatctggtatcctgtacttatcagctcgcgcgaggaatggaatacttggcatcccagaagtgcatacacagggacctcgccgcacgcaacgtcctcgtgacggaaaacaacgtaatgaaaattgccgacttcggcctagccagggatatcaacaatattgattattacaagaagaccaccaatgggaggctacccgtgaagtggatggcgcctgaggcgctgttcgatcgcgtgtatacccaccaatcggacgtttggtctttcggcgtgttaatgtgggagattttcacattaggtggctcaccttatccaggtatccctgtggaggagctgtttaagctgctgaaggaagggcatcggatggacaagcccgctaattgtacaaacgagctgtatatgatgatgcgcgattgctggcatgcagtgccatcccagcgccctactttcaaacagttggtcgaggacctcgatcgaattttaacccttacaacaaatgaagaatatcttgatttatctcagcccctggagcagtacagtccatcatatcccgacacccgatcttcctgttcttctggagacgattcagttttttcacctgatcccatgccctacgagccttgcctgccccagtacccccacatcaacggctctgtgaaaacctag

SEQ ID NO: 213773 - DNA, 2469 bp, Artificial Sequence
  derived and/or modified sequence
atggtgagctggggcagattcatctgcctggtggtggtgaccatggccaccctgagcctggccagacccagcttcagcctggtggaggacaccaccctggagcccgaggagccccccaccaagtaccagatcagccagcccgaggtgtacgtggccgcccccggcgagagcctggaggtgagatgcctgctgaaggacgccgccgtgatcagctggaccaaggacggcgtgcacctgggccccaacaacagaaccgtgctgatcggcgagtacctgcagatcaagggcgccacccccagagacagcggcctgtacgcctgcaccgccagcagaaccgtggacagcgagacctggtacttcatggtgaacgtgaccgacgccatcagcagcggcgacgacgaggacgacaccgacggcgccgaggacttcgtgagcgagaacagcaacaacaagagagccccctactggaccaacaccgagaagatggagaagagactgcacgccgtgcccgccgccaacaccgtgaagttcagatgccccgccggcggcaaccccatgcccaccatgagatggctgaagaacggcaaggagttcaagcaggagcacagaatcggcggctacaaggtgagaaaccagcactggagcctgatcatggagagcgtggtgcccagcgacaagggcaactacacctgcgtggtggagaacgagtacggcagcatcaaccacacctaccacctggacgtggtggagagaagcccccacagacccatcctgcaggccggcctgcccgccaacgccagcaccgtggtgggcggcgacgtggagttcgtgtgcaaggtgtacagcgacgcccagccccacatccagtggatcaagcacgtggagaagaacggcagcaagtacggccccgacggcctgccctacctgaaggtgctgaagcacagcggcatcaacagcagcaacgccgaggtgctggccctgttcaacgtgaccgaggccgacgccggcgagtacatctgcaaggtgagcaactacatcggccaggccaaccagagcgcctggctgaccgtgctgcccaagcagcaggcccccggcagagagaaggagatcaccgccagccccgactacctggagatcgccatctactgcatcggcgtgttcctgatcgcctgcatggtggtgaccgtgatcctgtgcagaatgaagaacaccaccaagaagcccgacttcagcagccagcccgccgtgcacaagctgaccaagagaatccccctgagaagacaggtgaccgtgagcgccgagagcagcagcagcatgaacagcaacacccccctggtgagaatcaccaccagactgagcagcaccgccgacacccccatgctggccggcgtgagcgagtacgagctgcccgaggaccccaagtgggagttccccagagacaagctgaccctgggcaagcccctgggcgagggctgcttcggccaggtggtgatggccgaggccgtgggcatcgacaaggacaagcccaaggaggccgtgaccgtggccgtgaagatgctgaaggacgacgccaccgagaaggacctgagcgacctggtgagcgagatggagatgatgaagatgatcggcaagcacaagaacatcatcaacctgctgggcgcctgcacccaggacggccccctgtacgtgatcgtggagtacgccagcaagggcaacctgagagagtacctgagagccagaagaccccccggcatggagtacagctacgacatcaacagagtgcccgaggagcagatgaccttcaaggacctggtgagctgcacctaccagctggccagaggcatggagtacctggccagccagaagtgcatccacagagacctggccgccagaaacgtgctggtgaccgagaacaacgtgatgaagatcgccgacttcggcctggccagagacatcaacaacatcgactactacaagaagaccaccaacggcagactgcccgtgaagtggatggcccccgaggccctgttcgacagagtgtacacccaccagagcgacgtgtggagcttcggcgtgctgatgtgggagatcttcaccctgggcggcagcccctaccccggcatccccgtggaggagctgttcaagctgctgaaggagggccacagaatggacaagcccgccaactgcaccaacgagctgtacatgatgatgagagactgctggcacgccgtgcccagccagagacccaccttcaagcagctggtggaggacctggacagaatcctgaccctgaccaccaacgaggagtacctggacctgagccagcccctggagcagtacagccccagctaccccgacaccagaagcagctgcagcagcggcgacgacagcgtgttcagccccgaccccatgccctacgagccctgcctgccccagtacccccacatcaacggcagcgtgaagacctag

SEQ ID NO: 213774 - protein, 1203 aa, Artificial Sequence
  derived and/or modified sequence
MKAADEPAYLTVGTDVSAKYRGAFCEAKIKTVKRLVKVKVLLKQDNTTQLVQDDQVKGPLRVGAIVETRTSDGSFQEAIISKLTDASWYTVVFDDGDERTLRRTSLCLKGERHFAESETLDQLPLTNPEHFGTPVIAKKTNRGRRSSLPVTEDEKEEESSEEEDEDKRRLNDELLGKVVSVVSATERTEWYPALVISPSCNDDITVKKDQCLVRSFIDSKFYSIARKDIKEVDILNLPESELSTKPGLQKASIFLKTRVVPDNWKMDISEILESSSSDDEDGPAEENDEEKEKEAKKTEEEVPEEELDPEERDNFLQQLYKFMEDRGTPINKPPVLGYKDLNLFKLFRLVYHQGGCDNIDSGAVWKQIYMDLGIPILNSAASYNVKTAYRKYLYGFEEYCRSANIQFRTVHHHEPKVKEEKKDLEESMEEALKLDQEMPLTEVKSEPEENIDSNSESEREEIELKSPRGRRRIARDVNSIKKEIEEEKTEDKLKDNDTENKDVDDDYETAEKKENELLLGRKNTPKQKEKKIKKQEDSDKDSDEEEEKSQEREETESKCDSEGEEDEEDMEPCLTGTKVKVKYGRGKTQKIYEASIKSTEIDDGEVLYLVHYYGWNVRYDEWVKADRIIWPLDKGGPKKKQKKKAKNKEDSEKDEKRDEERQKSKRGRPPLKSTLSSNMPYGLSKTANSEGKSDSCSSDSETEDALEKNLINEELSLKDELEKNENLNDDKLDEENPKISAHILKENDRTQMQPLETLKLEVGENEQIVQIFGNKMEKTEEVKKEAEKSPKGKGRRSKTKDLSLEIIKISSFGQNEAGSEPHIEAHSLELSSLDNKNFSSATEDEIDQCVKEKKLKRKILGQSSPEKKIRIENGMEMTNTVSQERTSDCIGSEGMKNLNFEQHFERENEGMPSLIAESNQCIQQLTSERFDSPAEETVNIPLKEDEDAMPLIGPETLVCHEVDLDDLDEKDKTSIEDVAVESSESNSLVSIPPALPPVVQHNFSVASPLTLSQDESRSVKSESDITIEVDSIAEESQEGLCERESANGFETNVASGTCSIIVQERESREKGQKRPSDGNSGLMAKKQKRTPKRTSAAAKNEKNGTGQSSDSEDLPVLDNSNELDNMNSTERISFLQEKLQEIRKYYMSLKSEVATIDRRRKRLKKKDREVSHAGASMSSASSDTGMSPSSSSPPQNVLAVECR

SEQ ID NO: 213775 - DNA, 3612 bp, Artificial Sequence
  derived and/or modified sequence
atgaaggccgccgacgagcctgcatatctgactgtgggtaccgacgtgtccgccaaataccgcggggccttctgtgaggccaaaataaaaacggttaaacggctggtgaaggttaaggtgctactgaaacaagacaacacaacacagctcgtccaggacgaccaggttaagggacccctccgcgtgggggcaatcgtcgagaccaggacctccgatggttccttccaggaagctattatatctaaactaacagatgcctcctggtacaccgtggtgttcgacgatggtgatgaacgtacattgcgccgtaccagcttgtgccttaagggcgaaaggcacttcgctgaatctgagactcttgatcaactcccactgacaaaccctgagcacttcggcacacccgtcatcgctaagaagacaaaccgcggcaggaggagttccctacctgttacagaagacgagaaggaagaggagtcttcggaggaagaggatgaagataagcgccgactgaatgacgagttgctgggcaaagttgtctccgtggtgtccgcaacagaacgtacggaatggtatcctgccttggtgatttccccctcatgcaacgatgatatcacagttaagaaggaccagtgtctggtacggtccttcatcgattccaaattttatagcattgcccggaaagacattaaggaggtggatatcctgaacttgccggaatctgagctcagcacaaaaccagggttacagaaggcatcaatatttttaaagacccgagtggtccctgacaactggaaaatggatatcagcgagattctcgaaagctcatccagcgacgatgaggatggccccgcggaagaaaacgatgaagaaaaagagaaagaagcaaaaaaaaccgaggaggaggtccctgaggaagagctcgaccctgaggagcgcgacaatttcctgcagcagttgtataaattcatggaggaccgtggtacccctatcaacaaacccccagttctgggatacaaagacctgaacctatttaagctgttcaggctagtgtatcaccaaggtgggtgcgataacattgactctggcgccgtttggaagcagatatatatggacctgggtattcccatcctcaatagcgccgcgagttataacgtgaagactgcgtatcgcaagtacctctacggctttgaggagtattgcagatctgcaaatatacaattccgcaccgtccaccatcacgagcccaaagtcaaagaggagaagaaagacctcgaggaatctatggaagaggccttgaagctagaccaggaaatgccactaacagaggtgaagagcgaacctgaggagaatatagattccaatagtgagagtgagagggaggagattgagctgaaaagtccacgggggcggcgtagaattgcccgggacgtcaactctattaagaaggagattgaagaggagaaaactgaagacaaactgaaggacaacgacaccgaaaacaaggacgttgacgatgactatgagactgctgagaaaaaggagaacgaactcctgctcgggaggaagaacacgcctaagcagaaggagaagaagatcaaaaagcaggaggactctgataaggacagcgacgaggaggaggagaaatcccaggagcgagaggagactgaatctaagtgcgactctgagggcgaagaagatgaggaggatatggagccttgtttgactggaacaaaggtcaaggtgaaatatgggcggggaaaaacacagaaaatatacgaagcttctattaagtccacagaaattgacgacggtgaagttctgtaccttgtgcattactatggctggaatgtccgctacgatgagtgggtgaaggccgaccgcattatctggcccctcgacaaggggggtcccaaaaagaagcagaagaaaaaggccaaaaataaggaggactctgaaaaggacgagaagagggatgaggagcggcagaagagtaaacgtggacgaccacccctgaagagcactctttcctctaatatgccatacgggctaagtaagactgcaaacagcgagggcaaatcagactcctgcagtagtgacagcgagactgaagatgcattagagaagaacctcattaacgaagaactgtctctgaaagatgagctggagaaaaacgagaatctgaacgacgacaagctggatgaagagaaccccaagatatctgctcacattctcaaagaaaacgaccggacgcaaatgcagccactcgaaactctgaaactggaagtcggagagaacgagcagatagttcagatatttggaaacaagatggaaaaaaccgaggaggttaagaaggaggctgagaagagccccaagggcaaaggtaggaggtcaaagactaaagacctgtcactagaaataatcaaaatctccagtttcgggcagaacgaagcagggtccgagccccacattgaggcacatagcttggagctgagttcactcgataataagaatttttcatcggccaccgaggatgagattgatcagtgcgtgaaagaaaagaaacttaagcgcaagatactgggacaaagctccccagagaagaagatccggatagaaaatggcatggagatgaccaatacggtgagccaggagcgaacaagcgactgtatcggctccgagggcatgaagaatctgaattttgagcagcattttgaacgcgaaaacgaaggtatgccatcactgattgccgagtcaaatcagtgcatccagcaactgacgtctgaacggtttgacagccccgccgaggaaacagtgaacatccctctcaaggaggacgaggacgccatgccactcataggacctgaaacacttgtatgccatgaggtggaccttgacgatctagatgagaaggacaaaacgtccatcgaggacgtggctgtggagtcgagtgagtccaatagccttgtgagcattcctcctgccctaccacctgtcgtacagcataattttagcgttgcttcacctctgaccctgtctcaggacgaatcacgatccgtcaagagcgaatctgacattactattgaggtcgatagcattgctgaggagtcccaggagggtctctgtgaacgagaaagcgctaatgggtttgagactaacgttgcttcgggaacctgctcaattatcgtccaagaaagagagtctcgcgagaaggggcagaagcgtccgagcgatggaaattccgggctgatggccaaaaaacagaagcgtaccccaaagcgtaccagtgctgctgctaaaaatgagaaaaatggaactggacagagctccgactctgaggacttgcctgtgctggacaatagcaatgaactggataacatgaactccaccgagcgcatctctttcctccaggagaaactgcaagaaattcgaaagtactacatgagtctcaagtccgaagtggcaacaattgatcgaagacggaagaggctaaaaaaaaaggaccgggaggtttctcatgcaggagcttccatgagtagcgcctcttcggatacaggcatgagcccttcaagcagctctccaccacaaaacgtgctggcagtagaatgtcgctag

SEQ ID NO: 213776 - DNA, 3612 bp, Artificial Sequence
  derived and/or modified sequence
atgaaggccgcagatgagcccgcctacctgactgtgggcacagatgtgtctgccaagtacagaggagccttctgtgaggccaagatcaagacagtgaagaggctggtgaaggtgaaggtgctgctgaagcaggacaacaccacccagctggtgcaggatgaccaggtgaagggccccctgcgggtgggcgccatcgtggagaccaggaccagtgatggcagcttccaggaggccatcatcagcaagctgacagatgcctcctggtacacagtggtgtttgatgatggagatgagaggaccctgcggaggaccagcctgtgcctgaagggggagcggcactttgctgagagcgagaccctggaccagctgcccctgaccaaccctgagcacttcggcacccctgtgattgccaagaagaccaacagaggccgccgcagcagcctgcctgtgacagaagatgagaaggaggaggagagcagcgaggaggaggatgaggacaagaggcggctgaatgatgagctgctgggcaaggtggtgtctgtggtgtctgccacagagaggacagagtggtacccagccctggtgatcagccccagctgcaatgatgacatcaccgtgaagaaggaccagtgcctggtgcgctccttcatcgacagcaagttctacagcatcgccaggaaggacatcaaggaggtggacatcctgaacctgcctgagagcgagctgagcaccaagccaggcctgcagaaggccagcatcttcctgaagaccagggtggtgcctgacaactggaagatggacatcagcgagatcctggagagcagcagcagtgatgatgaagatggccctgctgaggagaatgatgaggagaaggagaaggaggccaagaagacagaggaggaggtgcctgaggaggagctggaccctgaggagcgggacaacttcctgcagcagctgtacaagttcatggaggaccggggcacccccatcaacaagccccctgtgctgggctacaaggacctgaacctcttcaagctgttccggctggtgtaccaccagggcggctgtgacaacattgattctggagctgtgtggaagcagatctacatggacctgggcatccccatcctgaacagcgctgccagctacaacgtgaagacagcctacaggaagtacctgtatggctttgaggagtactgccgcagcgccaacatccagttcagaacagtgcaccaccacgagcccaaggtgaaggaggagaagaaggacctggaggagagcatggaggaggccctgaagctggaccaggagatgcccctgacagaggtgaagtctgagccagaagaaaatattgacagcaacagcgagagcgagcgggaggagattgagctgaagagcccccggggcagaagaagaattgccagagatgtgaacagcatcaagaaggagattgaggaggagaagacagaggacaagctgaaggacaatgacacagagaacaaggatgtggatgatgattatgaaacagctgagaagaaggaaaatgagctgctgctgggcaggaagaacacccccaagcagaaggagaagaagatcaagaagcaggaggacagcgacaaggacagtgatgaggaggaggagaagagccaggagcgggaggagacagagagcaaatgtgacagcgagggggaggaggatgaggaggacatggagccctgcctgaccggcaccaaggtgaaggtgaagtatggccggggcaagacccagaagatctatgaggccagcatcaagagcacagaaattgatgatggagaggtgctgtacctggtgcactactacggctggaatgtgcgctatgatgagtgggtgaaggctgaccgcatcatctggcccctggacaagggcggccccaagaagaagcagaagaagaaggccaagaacaaggaggacagcgagaaggatgagaagagagatgaggagcggcagaagagcaagaggggccggccccccctgaagagcaccctgagcagcaacatgccctacggcctgagcaagacagccaacagcgagggcaagagtgacagctgcagcagtgacagcgagacagaagatgccctggagaagaacctgatcaatgaggagctgagcctgaaggatgagctggagaagaatgaaaacctgaatgatgacaagctggatgaggagaaccccaagatcagcgcccacatcctgaaggaaaatgacaggacccagatgcagcccctggagaccctgaagctggaggtgggggagaatgagcagatcgtgcagatcttcggcaacaagatggagaagacagaggaggtgaagaaggaggccgagaagagccccaagggcaaaggaagaagaagcaagaccaaggacctgagcctggagatcatcaagatcagcagctttggccagaatgaagctggcagcgagccccacatcgaggcccacagcctggagctgagcagcctggacaacaagaacttcagcagcgccacagaagatgaaattgaccagtgtgtgaaggagaagaagctgaagaggaagatcctgggccagagcagccctgagaagaagatcagaattgaaaatggcatggagatgaccaacacagtgtcccaggagaggaccagtgactgcatcggcagcgagggcatgaagaacctgaactttgagcagcactttgaaagagaaaatgaaggcatgcccagcctgattgctgagagcaaccagtgcatccagcagctgaccagcgagagatttgacagccctgctgaggagaccgtgaacatccccctgaaggaggatgaagatgccatgcccctcatcggccctgagaccctggtgtgccacgaggtggacctggatgacctggatgagaaggacaagaccagcattgaagatgtggccgtggagagcagcgagagcaacagcctggtgtccatccccccagccctgccccctgtggtgcagcacaacttctctgtggccagccccctgaccctgagccaggatgagagccgctctgtgaagtctgagagtgacatcaccatcgaggtggacagcattgctgaggagagccaggagggcctgtgtgagcgggagagcgccaatggatttgagaccaacgtggccagcggcacctgcagcatcatcgtgcaggagcgggagagccgggagaagggccagaagaggcccagtgatggcaacagcggcctgatggccaagaagcagaagaggacccccaagaggaccagcgctgctgccaagaatgagaagaatggaacaggccagagcagtgacagcgaggacctgcctgtgctggacaacagcaatgagctggacaacatgaacagcacagagcgcatctccttcctgcaggagaagctgcaggagatcaggaagtactacatgagcctgaagtctgaggtggccaccatcgacagaagaaggaagaggctgaagaagaaggaccgggaggtgtcccatgctggggcctccatgagcagcgccagcagtgacaccggcatgagccccagcagcagcagccccccccagaatgtgctggccgtggagtgcaggtag

SEQ ID NO: 213777 - DNA, 3612 bp, Artificial Sequence
  derived and/or modified sequence
atgaaggccgccgacgagcccgcctacctgaccgtgggcaccgacgtcagtgctaaataccggggcgcattctgtgaggcgaaaatcaagacagtgaagcggctggtgaaggtcaaggttctgttgaagcaggacaatacaacacaactggtgcaggatgaccaagttaagggaccgttgagagtaggagctatcgtggagacgcgaacgtccgacgggtcatttcaggaagcaataatctccaaactcaccgatgctagctggtataccgtcgtttttgacgacggggatgaacgcaccctcaggaggacatctctgtgtctcaaaggagaaagacacttcgcagaaagcgagactctggatcagttgcctctaacgaatcccgagcatttcggcaccccagtcatcgccaagaagacaaatcgcgggagaagatcttctcttccagtgacggaggacgagaaagaagaagagtcctcagaggaagaggacgaggataagcgccggctgaacgacgagttgttggggaaggttgtctctgtggtctcagccacagagcgtactgaatggtaccctgcactggtcatcagcccgagttgcaacgatgatattaccgtgaagaaggaccagtgtttggtcaggtcttttattgacagcaaattctattctatcgccagaaaagacataaaagaggtcgacatcctcaatctgcctgaatccgagttgtcgaccaaaccggggctgcaaaaggcaagcatcttcctgaagacaagggtcgtgcccgacaattggaagatggacatctctgaaatactggaaagcagcagctccgacgacgaagatggaccagctgaggagaatgatgaggaaaaagaaaaagaggcgaaaaaaactgaggaggaggtccctgaagaagaactggatccagaagagcgggacaacttcctccagcaactttataagtttatggaggacagagggacgccgatcaataaacctcccgtcttgggctacaaggatcttaacctgtttaagttgtttcggttggtgtaccaccagggcgggtgcgacaacatcgactccggagctgtgtggaaacagatttatatggacctggggatccctatcctgaacagtgcagccagctacaatgtgaaaaccgcatatcgtaaatacctatacggatttgaggagtactgcagatcagctaatatccaatttcggacggtgcaccaccatgagccaaaagttaaagaggagaagaaagaccttgaggaatccatggaagaggccctgaaactggaccaggaaatgccgctgaccgaggtgaagtccgaacccgaggaaaatatagacagcaatagcgagtctgagagggaggagatcgagcttaaatcccctagagggagaagacggattgcacgggatgtcaacagcatcaagaaagaaatcgaagaggaaaagaccgaggataagctgaaggacaacgataccgaaaataaagatgtggacgacgactacgagaccgccgagaaaaaagagaatgagctgctgctcggacgcaagaacactcccaaacagaaagaaaaaaagattaaaaaacaggaagactctgataaagactccgatgaggaggaagagaaatcacaggaacgagaggagaccgagagcaagtgcgactccgagggtgaggaagacgaggaggatatggagccctgtcttactggaacaaaagtgaaggtaaaatacggaaggggtaagacccagaaaatctacgaggccagcatcaagagcacagagattgacgacggtgaagtcttgtacctggtgcattactatggctggaacgtgcgatacgacgagtgggtgaaggctgacagaattatttggcctcttgataaaggtggacctaagaagaaacagaaaaagaaagcgaagaacaaggaagacagtgaaaaggacgaaaagcgcgacgaagagaggcagaaaagcaagcgtggcagaccgccactcaaatccaccctgagttccaatatgccatatggcttatcaaagacagccaatagtgaggggaagtctgatagctgctcctctgattcagaaaccgaggatgccctcgaaaaaaatttgatcaacgaggaactgagtctcaaggatgaactcgaaaagaacgaaaacttaaatgatgataagctggatgaagagaacccaaagatctccgcccatatactgaaggagaatgacagaactcagatgcagcctctcgaaacacttaaacttgaggtgggcgagaacgaacaaattgtgcagatcttcggaaacaaaatggagaaaactgaagaggtcaaaaaagaggccgagaagtcccccaaggggaaggggcgccgtagtaaaactaaggatctctccttagagatcataaaaatctcttccttcggacagaacgaggccggctcagagccccacatcgaggcgcacagtttagagctgtccagcctagataataagaacttttctagtgccactgaggacgaaattgatcaatgcgtcaaggagaagaaactgaagcgcaaaatactggggcaaagtagcccggaaaagaaaatccggatcgagaacggaatggagatgaccaacacagtctcacaagagagaacaagcgactgcataggctccgagggaatgaaaaacctgaatttcgagcagcattttgaaagagagaacgaaggtatgccatctttgatagcagaaagtaaccagtgcatccagcagttgacttctgaacgctttgactcaccagctgaagaaactgtgaatattcccctcaaagaggatgaggatgccatgcccctgattgggcctgagactctcgtgtgccatgaggtggatctagacgaccttgacgaaaaggataagacttcaattgaagatgtcgctgttgaatcatccgagagcaatagccttgtttcaataccacctgccctgcctcctgtggtccagcacaacttttccgtggccagtcccctcacacttagccaggacgagtccagaagcgtcaagagcgaaagcgatatcaccatagaagtggattcaatcgccgaagagagccaggagggtctttgtgagagggaaagcgccaacggattcgagactaatgtcgcctcgggaacctgtagcatcatcgtacaggaaagagagagcagagaaaaaggccagaagagaccttccgacgggaacagtgggctcatggcaaagaaacagaaacgcacccccaaacgcacaagcgctgccgctaaaaatgagaagaacggtacgggacaatcttccgacagcgaagaccttccggttctcgacaacagtaatgaattagacaacatgaacagtaccgagaggatcagcttcctgcaggagaagctccaagaaatacgaaagtactacatgtccctgaaatcagaggttgctacaatcgaccgccggcgaaagagactgaagaagaaagaccgggaagtgtctcacgccggcgcgagtatgtcgtccgcaagttctgacaccggaatgtcccccagctcatccagtcccccccagaatgtgcttgcagtcgagtgtagatag

SEQ ID NO: 213778 - DNA, 3612 bp, Artificial Sequence
  derived and/or modified sequence
atgaaggccgctgatgaacctgcttacctaactgtcggcacagatgtgtccgctaaatacagaggcgcattctgtgaagccaagatcaaaaccgtgaaaaggctggtgaaagtgaaagtcctgctgaaacaggataatacaacgcagctggtgcaagacgaccaggtgaagggccctctccgagtgggcgctatcgttgaaacccgcacatctgatggctcctttcaggaggctatcattagtaagctgacagacgcatcctggtacactgtggttttcgatgatggggatgaacggacattgcggcgtacatccctgtgcctaaagggcgaacggcacttcgccgagtcggagaccctggatcagcttcctctgaccaaccccgagcacttcggaacccccgtgatcgctaagaagactaatcgcggacggagaagctcgctccccgttaccgaagacgagaaagaggaagagagcagcgaagaagaagatgaggacaagcgtagactcaatgacgaattactcggcaaggtggtctccgtggtgagcgctactgagcggaccgagtggtaccccgcactcgtgatatctccctcctgtaacgacgatataactgtcaaaaaagatcaatgcctggtccggtcctttatcgatagcaagttctatagtatagccaggaaggatatcaaagaagtagatattttaaacctgccagagtcggagttatccaccaagcccggactacagaaagcatcgatttttcttaaaacccgtgtagttccagacaactggaagatggacatttctgaaatactggagagtagctccagcgacgacgaggacggacccgctgaggagaacgatgaagagaaggaaaaagaggctaaaaagaccgaagaggaggtgccggaggaggagttggacccagaggagagggacaatttcctgcaacaactctataaattcatggaggaccgtggcacaccaattaacaagccgccagtgctcggctataaggacctcaacctcttcaaactattccgcctggtttatcaccagggaggctgcgataatatcgatagtggagctgtctggaagcagatttacatggatttgggcatccctattctcaattcggccgcatcatacaacgtgaagaccgcgtaccggaaatacctgtacggttttgaagagtactgcagaagcgccaatatccagtttaggactgttcaccaccacgagccaaaggtcaaggaggaaaaaaaagaccttgaagaatcaatggaagaagcactcaaattagaccaggagatgccattaaccgaggtgaagtctgagcctgaagagaatattgactcaaactccgaaagcgagcgggaggagattgagttgaagtcaccaaggggaaggagacggatcgcaagggacgtgaatagcattaagaaagagattgaggaagagaagacagaagataaactgaaggataacgataccgagaataaagacgtggatgacgattatgagaccgcagagaaaaaggagaatgaactgctgttagggagaaaaaatacacctaaacagaaggagaagaaaattaaaaagcaggaggacagcgacaaagattccgatgaggaggaagaaaagtctcaggagcgggaggaaaccgagagcaagtgtgatagtgaaggggaggaagatgaagaggacatggagccttgcctgacaggcacgaaggtcaaagtgaagtacggaagagggaagactcagaagatttacgaagcctccatcaaatccaccgaaatcgatgatggggaggtgctttacttggtgcactattacggatggaatgtacgttacgatgaatgggtaaaagcagatcgcatcatctggcctctggataaggggggtcctaagaagaagcaaaagaagaaagcaaaaaataaagaagattctgagaaggatgaaaagagagacgaggaacgccaaaagagtaaaagaggtcgccctcctctcaagtccacgttatcttcgaacatgccgtatggcctcagtaagaccgcaaactctgagggtaagagcgattcatgtagttccgattccgaaacggaggacgccctggagaagaaccttataaatgaggagctctccctcaaagatgaattggagaaaaacgagaacctcaacgacgacaaactcgacgaggaaaaccccaaaatctccgcccatattcttaaggaaaatgaccgcacccagatgcagccccttgagaccctgaaattagaagtgggcgagaatgaacagatcgtgcaaatcttcgggaataagatggaaaagactgaggaagtcaaaaaggaggcagaaaaatctccgaagggcaagggaagacggagcaagactaaggatctgtccctcgaaattatcaaaatttcatcttttgggcaaaacgaggcgggatccgagccccatatcgaggcacattctctggaattgagcagtctcgacaacaaaaatttcagcagtgcgactgaggacgagattgaccagtgtgttaaggaaaaaaaactcaagcgaaaaatcttgggacaatcctcccccgagaaaaaaatccgcatcgagaatgggatggagatgacaaacacggtgtcacaggagagaacaagcgactgcatcggtagtgagggcatgaaaaatctgaatttcgagcagcacttcgagagagaaaatgaaggaatgccctcattgattgccgaatcgaaccagtgcattcagcagctgacctccgaacgttttgacagccccgcagaggagacagtcaatatcccgctaaaggaagatgaggacgcaatgccattaattggccctgagactctcgtgtgccacgaggtggacctcgatgacctggatgaaaaagataagacatccattgaggatgtggccgtggagagttctgaatccaactccctcgtgagcattcctcccgctttgcccccagttgttcagcacaatttttccgtagcctcaccattgacactttcacaggatgaatctcgctccgtcaagtcggaatcagatattacaattgaggtggatagtattgccgaggaaagccaggaaggcctctgtgagagggaaagtgccaatggctttgagacgaacgtggcctctggcacttgttccattattgttcaggagcgagagtcaagggagaagggccagaaacgcccatctgacggaaactctggactgatggccaagaaacaaaagaggacccccaaacgcacctcagccgctgcgaaaaacgaaaaaaatggcaccggccagagttcagactcagaggacctgccagtgttggacaattctaacgaacttgataatatgaattccaccgagcgcatttccttcctacaggaaaaactccaggagattcgcaaatactatatgagtctgaaaagtgaggtcgcaacaattgaccgccgtcggaagcgcttaaaaaaaaaagatcgcgaagtgtcccatgcgggagcgagtatgagctcagctagctccgatactggaatgtccccctctagttctagccccccacagaacgtgctcgccgtggagtgtcggtag

SEQ ID NO: 213779 - DNA, 4051 bp, Artificial Sequence
  derived and/or modified sequence
attgtggcagtaaatcggggcgagtggggaacccggcgcaggaactgcagccgcggctgggagtggtgctgcccggacgggggcccacggaggtcagaggggaggaggactctggagctgacagcgcgcacttcacccgcagttgttctagcgactgcgaagatagctcgctgagctggaaccccacagatcaccaacaaaaatgaaggcggcagatgagcctgcctacctgacagtgggaaccgatgtcagtgccaagtaccgaggtgccttctgtgaggcaaagattaagactgtgaaaaggctggtgaaagttaaggtactcctgaaacaggataataccacacaattggtacaagatgaccaagtaaagggtcctttaagagttggagctattgttgaaacaaggacatctgatggatcttttcaggaagctattatcagcaagttgacagatgctagttggtataccgtggtgtttgatgatggtgatgagcgaacattgagacgtacctcactttgtctgaaaggagagagacattttgcagagagtgagacacttgaccagcttccattaacaaatccagagcattttggaactccagtaattgcaaagaagacgaacagaggaaggagatcttctcttcctgttactgaagatgaaaaggaagaagaaagcagtgaagaggaagatgaagacaagcgccgtctcaatgatgaattactaggaaaagttgtaagtgtggtgtctgcaacggagaggactgaatggtatcctgctttggtaatatctcccagctgtaatgatgacatcacagtgaaaaaggatcagtgtttagttcgatcatttattgattctaaattttactctatagcaagaaaggacattaaggaagtagacattctcaatctaccggaatctgagctctccactaaaccagggcttcagaaagcaagcatcttcttaaaaactagagttgttcctgataattggaaaatggatataagtgaaatccttgagtcatccagtagtgatgatgaagatggcccagctgaagaaaatgatgaagagaaggaaaaggaggccaaaaagacagaagaagaggtgcctgaggaagaacttgatcctgaagagagggacaacttcctccagcagctttataagtttatggaagacagaggtactccaatcaacaaaccacctgttttgggctataaagatctcaatctcttcaaactcttcagactggtttatcatcagggtggatgtgacaatattgatagtggtgctgtatggaagcaaatttatatggaccttggcattcctattttgaattcagctgcttcctacaatgtaaaaactgcttatagaaagtatctctatggttttgaggagtactgccgttcggcaaatattcagttcagaactgttcatcaccatgaaccaaaagtaaaagaggaaaaaaaagacttagaagaatcaatggaagaggctctcaaattagatcaagaaatgcctttaacagaagtgaagagtgaacctgaggaaaatatcgattcaaacagtgaaagtgaaagagaagagatagaattaaaatctccgaggggacgaaggagaattgctcgagatgtaaattctattaaaaaggaaattgaagaagagaaaacagaagacaaattaaaagataatgatacagaaaataaggatgtagatgatgactatgaaactgcagagaaaaaagaaaatgagctactactggggagaaaaaatacaccaaagcaaaaagagaagaaaattaaaaaacaggaggattctgacaaagactcagatgaagaggaagagaaaagccaagagagggaagaaactgaaagcaaatgtgactctgaaggagaggaagatgaggaagacatggaaccctgcctaacaggaaccaaagtgaaagtaaaatatggacgagggaagactcagaaaatttatgaagccagtattaaaagcactgaaattgatgacggagaagttttatatttggtacattactatggatggaatgtcaggtatgatgagtgggtgaaggctgacaggataatctggcctttggacaaaggtggaccaaagaaaaaacagaagaaaaaagctaaaaataaagaagatagtgaaaaggacgaaaagagagatgaggagaggcagaagtcaaaacggggacgacctcctttaaaatcaaccctctcatcaaacatgccgtatggcttatctaagacagcaaacagtgaaggaaaatcagactcttgttcatctgatagtgaaacagaagatgctttagaaaagaatttaataaatgaagaactttctcttaaagatgaactagaaaaaaatgaaaatttgaatgatgataagctagatgaagaaaatccaaagatttctgcacatatattaaaagaaaatgataggactcaaatgcagcctttagaaaccctgaagttagaagttggagagaatgaacaaatagtacagatttttgggaacaaaatggaaaaaacagaagaagttaagaaagaagccgaaaaatctccaaaaggaaagggaagacgaagcaagacaaaagatctttctttagaaattataaagatttcatcatttggccagaatgaagcaggaagtgaacctcatatagaagctcatagtcttgaattgtcttcattagacaataaaaacttttcttctgctacagaagatgaaattgaccaatgtgtgaaagaaaagaagttgaaacggaaaatactaggacaatcatcgccagagaaaaaaataagaattgagaatggaatggaaatgacaaatactgtatctcaagaaaggaccagtgattgtattggatctgagggaatgaaaaacttaaattttgaacagcactttgaaagagaaaatgaaggaatgccatcattgatagcagagtcaaaccaatgcatccaacaactgactagtgaaagatttgatagtccagctgaagaaactgtaaatattccactaaaagaagatgaggatgcaatgcctctgatcgggcctgaaaccttggtttgccatgaagtagatttggatgatttggatgaaaaggataagaccagcattgaggatgtagcagttgaaagctctgagtctaactctcttgtttctattccacctgccctacctcctgtagtccaacataacttttcagtagcttcaccacttactcttagtcaagatgagtctcgaagcgtaaaaagtgagagtgatataacgattgaagttgatagtattgctgaagaatctcaagaaggtctctgtgagagggaatcggcaaatggatttgaaactaatgttgcctctggtacctgtagtataattgtacaagagagagagagcagagagaagggtcagaagaggccaagtgatggaaatagtggattaatggcaaaaaagcaaaagcgtaccccaaagcgaacaagtgctgcagccaaaaatgaaaagaatggaacaggacaaagcagtgatagtgaagatcttcctgtcctagacaattcaaatgaattagataatatgaacagtacagagagaatctcatttctccaagaaaaactacaggaaatcagaaaatattatatgtctttgaagtctgaagttgcaaccatagacaggaggagaaaaagattaaaaaagaaagacagggaagtgtctcatgcgggagcctccatgtcatctgcttcatcagacactggaatgagtccctcatcatcatctcccccacaaaatgtacttgctgtagaatgcaggtgataaacattttctctaccttcccagcagtttgctgccatggacataaatccccaaaccctgaattacaaccacagaaagcactcaactggtttgacattgctaagtatatcctgtatacttttccaggctggattgtatctattcccctctctcttcttttttcttgttgcaaaaaataagctgattaataagtgaaggttaagcagcctgccatatttgtcataatttttcctcttt

SEQ ID NO: 213780 - DNA, 3612 bp, Artificial Sequence
  derived and/or modified sequence
atgaaggccgccgacgagcccgcctacctgaccgtgggcaccgacgtgagcgccaagtacagaggcgccttctgcgaggccaagatcaagaccgtgaagagactggtgaaggtgaaggtgctgctgaagcaggacaacaccacccagctggtgcaggacgaccaggtgaagggccccctgagagtgggcgccatcgtggagaccagaaccagcgacggcagcttccaggaggccatcatcagcaagctgaccgacgccagctggtacaccgtggtgttcgacgacggcgacgagagaaccctgagaagaaccagcctgtgcctgaagggcgagagacacttcgccgagagcgagaccctggaccagctgcccctgaccaaccccgagcacttcggcacccccgtgatcgccaagaagaccaacagaggcagaagaagcagcctgcccgtgaccgaggacgagaaggaggaggagagcagcgaggaggaggacgaggacaagagaagactgaacgacgagctgctgggcaaggtggtgagcgtggtgagcgccaccgagagaaccgagtggtaccccgccctggtgatcagccccagctgcaacgacgacatcaccgtgaagaaggaccagtgcctggtgagaagcttcatcgacagcaagttctacagcatcgccagaaaggacatcaaggaggtggacatcctgaacctgcccgagagcgagctgagcaccaagcccggcctgcagaaggccagcatcttcctgaagaccagagtggtgcccgacaactggaagatggacatcagcgagatcctggagagcagcagcagcgacgacgaggacggccccgccgaggagaacgacgaggagaaggagaaggaggccaagaagaccgaggaggaggtgcccgaggaggagctggaccccgaggagagagacaacttcctgcagcagctgtacaagttcatggaggacagaggcacccccatcaacaagccccccgtgctgggctacaaggacctgaacctgttcaagctgttcagactggtgtaccaccagggcggctgcgacaacatcgacagcggcgccgtgtggaagcagatctacatggacctgggcatccccatcctgaacagcgccgccagctacaacgtgaagaccgcctacagaaagtacctgtacggcttcgaggagtactgcagaagcgccaacatccagttcagaaccgtgcaccaccacgagcccaaggtgaaggaggagaagaaggacctggaggagagcatggaggaggccctgaagctggaccaggagatgcccctgaccgaggtgaagagcgagcccgaggagaacatcgacagcaacagcgagagcgagagagaggagatcgagctgaagagccccagaggcagaagaagaatcgccagagacgtgaacagcatcaagaaggagatcgaggaggagaagaccgaggacaagctgaaggacaacgacaccgagaacaaggacgtggacgacgactacgagaccgccgagaagaaggagaacgagctgctgctgggcagaaagaacacccccaagcagaaggagaagaagatcaagaagcaggaggacagcgacaaggacagcgacgaggaggaggagaagagccaggagagagaggagaccgagagcaagtgcgacagcgagggcgaggaggacgaggaggacatggagccctgcctgaccggcaccaaggtgaaggtgaagtacggcagaggcaagacccagaagatctacgaggccagcatcaagagcaccgagatcgacgacggcgaggtgctgtacctggtgcactactacggctggaacgtgagatacgacgagtgggtgaaggccgacagaatcatctggcccctggacaagggcggccccaagaagaagcagaagaagaaggccaagaacaaggaggacagcgagaaggacgagaagagagacgaggagagacagaagagcaagagaggcagaccccccctgaagagcaccctgagcagcaacatgccctacggcctgagcaagaccgccaacagcgagggcaagagcgacagctgcagcagcgacagcgagaccgaggacgccctggagaagaacctgatcaacgaggagctgagcctgaaggacgagctggagaagaacgagaacctgaacgacgacaagctggacgaggagaaccccaagatcagcgcccacatcctgaaggagaacgacagaacccagatgcagcccctggagaccctgaagctggaggtgggcgagaacgagcagatcgtgcagatcttcggcaacaagatggagaagaccgaggaggtgaagaaggaggccgagaagagccccaagggcaagggcagaagaagcaagaccaaggacctgagcctggagatcatcaagatcagcagcttcggccagaacgaggccggcagcgagccccacatcgaggcccacagcctggagctgagcagcctggacaacaagaacttcagcagcgccaccgaggacgagatcgaccagtgcgtgaaggagaagaagctgaagagaaagatcctgggccagagcagccccgagaagaagatcagaatcgagaacggcatggagatgaccaacaccgtgagccaggagagaaccagcgactgcatcggcagcgagggcatgaagaacctgaacttcgagcagcacttcgagagagagaacgagggcatgcccagcctgatcgccgagagcaaccagtgcatccagcagctgaccagcgagagattcgacagccccgccgaggagaccgtgaacatccccctgaaggaggacgaggacgccatgcccctgatcggccccgagaccctggtgtgccacgaggtggacctggacgacctggacgagaaggacaagaccagcatcgaggacgtggccgtggagagcagcgagagcaacagcctggtgagcatcccccccgccctgccccccgtggtgcagcacaacttcagcgtggccagccccctgaccctgagccaggacgagagcagaagcgtgaagagcgagagcgacatcaccatcgaggtggacagcatcgccgaggagagccaggagggcctgtgcgagagagagagcgccaacggcttcgagaccaacgtggccagcggcacctgcagcatcatcgtgcaggagagagagagcagagagaagggccagaagagacccagcgacggcaacagcggcctgatggccaagaagcagaagagaacccccaagagaaccagcgccgccgccaagaacgagaagaacggcaccggccagagcagcgacagcgaggacctgcccgtgctggacaacagcaacgagctggacaacatgaacagcaccgagagaatcagcttcctgcaggagaagctgcaggagatcagaaagtactacatgagcctgaagagcgaggtggccaccatcgacagaagaagaaagagactgaagaagaaggacagagaggtgagccacgccggcgccagcatgagcagcgccagcagcgacaccggcatgagccccagcagcagcagccccccccagaacgtgctggccgtggagtgcagatag

SEQ ID NO: 213781 - protein, 1188 aa, Artificial Sequence
  derived and/or modified sequence
MKAADEPAYLTVGTDVSAKYRGAFCEAKIKTVKRLVKVKVLLKQDNTTQLVQDDQVKGPLRVGAIVETRTSDGSFQEAIISKLTDASWYTVVFDDGDERTLRRTSLCLKGERHFAESETLDQLPLTNPEHFGTPVIAKKTNRGRRSSLPVTEDEKEEESSEEEDEDKRRLNDELLGKVVSVVSATERTEWYPALVISPSCNDDITVKKDQCLVRSFIDSKFYSIARKDIKEVDILNLPESELSTKPGLQKASIFLKTRVVPDNWKMDISEILESSSSDDEDGPAEENDEEKEKEAKKTEEEVPEEELDPEERDNFLQQLYKFMEDRGTPINKPPVLGYKDLNLFKLFRLVYHQGGCDNIDSGAVWKQIYMDLGIPILNSAASYNVKTAYRKYLYGFEEYCRSANIQFRTVHHHEPKVKEEKKDLEESMEEALKLDQEMPLTEVKSEPEENIDSNSESEREEIELKSPRGRRRIARDVNSIKKEIEEEKTEDKLKDNDTENKDVDDDYETAEKKENELLLGRKNTPKQKEKKIKKQEDSDKDSDEEEEKSQEREETESKCDSEGEEDEEDMEPCLTGTKVKVKYGRGKTQKIYEASIKSTEIDDGEVLYLVHYYGWNVRYDEWVKADRIIWPLDKGGPKKKQKKKAKNKEDSEKDEKRDEERQKSKRGRPPLKSTLSSNMPYGLSKTANSEGKSDSCSSDSETEDALEKNLINEELSLKDELEKNENLNDDKLDEENPKISAHILKENDRTQMQPLETLKLEVGENEQIVQIFGNKMEKTEEVKKEAEKSPKGKGRRSKTKDLSLEIIKISSFGQNEAGSEPHIEAHSLELSSLDNKNFSSATEDEIDQCVKEKKLKRKILGQSSPEKKIRIENGMEMTNTVSQERTSDCIGSEGMKNLNFEQHFERENEGMPSLIAESNQCIQQLTSERFDSPAEETVNIPLKEDEDAMPLIGPETLVCHEVDLDDLDEKDKTSIEDVAVESSESNSLVSIPPALPPVVQHNFSVASPLTLSQDESRSVKSESDITIEVDSIAEESQEGLCERESANGFETNVASGTCSIIVQERESREKGQKRPSDGNSGLMAKKQKRTPKRTSAAAKNEKNGTDELDNMNSTERISFLQEKLQEIRKYYMSLKSEVATIDRRRKRLKKKDREVSHAGASMSSASSDTGMSPSSSSPPQNVLAVECR

SEQ ID NO: 213782 - DNA, 3567 bp, Artificial Sequence
  derived and/or modified sequence
atgaaggccgccgatgagccagcctacctcaccgtgggcaccgatgtgagcgccaaataccgcggagctttctgcgaggccaagataaagaccgtgaagcggttggtgaaggtcaaggtgctgcttaagcaggataacacaacccagctagtacaggatgatcaggtgaagggccctctccgtgtcggtgcaatcgtggaaacccgaacgagcgacggtagcttccaagaggctattatctcgaaactcacggatgccagctggtatactgtggtcttcgatgacggagacgagcgtaccctccggcgaacctctctgtgccttaagggggagcggcatttcgccgagtcagaaacactggaccaattgccactgacaaaccctgagcactttggtactccagtgattgcaaagaagactaatagaggacggagatcaagcttgccagttacagaggacgaaaaagaagaagagtcaagcgaggaagaggacgaagacaagaggagactcaacgacgaactgctgggtaaggtagtgtctgtagtgtccgcaacggagcgaacagagtggtaccccgcgctagtcatcagcccttcctgcaatgatgatatcaccgtgaagaaggatcaatgtctggtgcgaagcttcatcgatagcaaattctactccatcgcgcgcaaagatataaaagaggtagacatcctcaatctgccggaaagcgaattgtcaactaagcccggtctgcaaaaggcctcaatttttctgaaaactagagtagtgcctgataactggaagatggacatcagcgagatattagagtcctcgagctctgacgatgaggatggacccgctgaggaaaacgacgaggaaaaggaaaaggaggccaagaagaccgaggaagaggtgccagaggaggaattagacccagaggaacgcgataacttcttacaacaactctataaatttatggaggaccggggtacgcccatcaataaacctccggtgttaggatacaaggatctcaatctatttaaactcttccgcctcgtctaccaccagggggggtgcgataatattgactcaggagccgtgtggaagcagatctatatggacctcggtatccctattttgaatagcgccgcatcttacaacgtgaagaccgcttaccggaagtacctctatgggtttgaggaatactgccggtcggccaacattcaattccgaacggtccatcatcacgaacccaaagtcaaggaggagaaaaaagacctagaggaaagcatggaggaagctcttaagctggaccaggagatgcccctaacagaggttaagtccgaaccggaggagaatattgattccaactctgagagcgagcgtgaagagatagagctcaagtcccctcgcggcagaagacggatcgcccgggacgttaattccatcaaaaaagagatagaggaagaaaagaccgaagataaactaaaggataatgacacagaaaataaggatgtggacgacgactacgagactgccgaaaaaaaagagaacgagcttcttctcggccgcaagaatactcctaaacagaaggaaaagaaaattaagaaacaggaggactcagataaggattctgatgaagaggaagaaaaaagtcaggagcgagaggaaacagagtccaagtgcgattcagagggggaagaagacgaggaggatatggagccttgtctgaccggcactaaggtaaaggtgaagtatggcagggggaagacacaaaagatttacgaagctagcattaagtccaccgagatcgacgacggggaggttctgtacctggtgcattattacggatggaacgtgaggtatgacgagtgggtgaaggcagaccgaattatctggcctctcgacaaaggcgggcccaaaaagaaacagaagaaaaaggcgaagaacaaagaagattcagagaaggatgaaaaaagggatgaggaaagacagaaatcaaaacgcggaagaccccctctcaagtccaccctctccagcaatatgccttatggcttaagcaagaccgccaatagcgagggcaagtctgactcctgttccagtgattccgagacggaagacgccctagagaagaatctgataaatgaagaactcagccttaaggatgagctagaaaagaacgaaaatcttaatgacgacaagcttgacgaagaaaatcccaagatctcagcgcatatcctgaaagagaacgaccgtacacagatgcagcccttagaaactctcaagttggaggtgggcgagaacgagcagatagttcagatctttggaaacaagatggagaagacggaggaggtgaagaaggaggctgaaaaatcccctaaagggaaggggagacgtagtaaaactaaagacttaagcttggagattatcaagatctcctccttcggtcagaacgaagccggatcagagccgcacatcgaagcgcatagcttggaactcagcagcctggataacaagaatttttcaagtgcaacggaagatgagattgaccagtgtgtgaaagaaaaaaagcttaaacggaaaatccttggtcagagcagccctgaaaaaaaaattcgcatagagaacgggatggagatgacgaatacagtttcacaggaacggacaagcgattgtatcgggagcgaaggaatgaaaaacctgaacttcgaacagcactttgaacgagaaaatgaggggatgccttcccttattgccgagtctaatcaatgcattcagcaactgaccagcgagaggtttgacagccctgccgaggagaccgtcaatatccctctgaaagaagacgaggacgccatgccactgattggcccagaaacccttgtctgccatgaagtggacctggacgaccttgacgaaaaggataagacctccattgaggatgtggctgtcgagtcgtcggaaagcaactctctagtgagcatcccccctgcccttccacccgtagtgcagcacaacttctccgtcgcctcgccactgactctttcacaggacgagtcccgttccgtgaaaagtgagtctgacatcactatcgaggttgactcgattgcggaggaatcccaggaaggtctctgtgagcgcgagtccgccaatggcttcgagacaaatgtagcaagcggaacttgcagcatcattgtccaggaaagagagtcacgcgagaaaggtcagaagcgccccagcgatggtaatagtggactcatggctaaaaaacagaaacgcacaccaaagagaacctccgctgcagccaagaacgagaaaaatggaacagatgagctggacaacatgaattctactgagaggatcagcttcctccaggaaaagcttcaggagatacggaagtattatatgtctttaaaaagcgaagtggctaccatcgaccggcgccggaagaggctgaagaagaaggaccgagaagtgagccatgccggggcatccatgtcttctgcctcctccgatacaggcatgagtcctagtagttcctctcctccccaaaatgtgctcgcagtagagtgtaggtag

SEQ ID NO: 213783 - DNA, 165 bp, Artificial Sequence
  derived and/or modified sequence
atgaaagctgcagatgagcctgcttatctgacagtgggcactgacgtgtcagccaaatatcggggtgcgttctgcgaagctaaaatcaagactgttaagcgtcttgtgaaggtcaaggtactgttaaaacaggacaatacaacccagttggtgcaagacgactag

SEQ ID NO: 213784 - DNA, 3567 bp, Artificial Sequence
  derived and/or modified sequence
atgaaggctgctgatgaacccgcctacctaaccgtcgggactgacgtctccgccaaataccggggagcattctgtgaggcgaagataaagacagtcaaacggttggtgaaggtgaaggtcctgttgaaacaagataacacaacacagctggtgcaggacgaccaggttaagggcccgttaagagtaggggccatcgtcgaaacgcggacgagtgacggcagctttcaggaggctatcatcagcaaactcactgatgcatcttggtacacagttgtattcgacgacggcgacgaacgtactttaagaagaacgagcctgtgtctcaaaggcgaacggcatttcgcagagagcgaaaccttggaccagctgcccctgaccaatccagagcattttggcaccccggtaatcgctaaaaaaaccaacaggggacgccggtcatctctgcctgtaacggaagacgagaaggaggaagagtcgagtgaagaggaagatgaggataagaggaggcttaacgacgaattgttgggaaaggtcgtgagcgtcgtttctgcaacagagcgaacagagtggtatcctgccctcgtcatcagcccttcttgcaatgacgacatcacggtcaagaaagaccagtgcctcgtccgttctttcatcgacagcaaattttattccattgcccggaaggatattaaggaggtagatatcctgaacctcccagaatctgagctgtctactaaaccaggcttgcagaaggcctccattttcctgaagacccgagtcgtgccagacaactggaaaatggacatttctgaaatactggagagttcaagctctgacgacgaggatgggccggccgaagagaacgacgaggaaaaagaaaaggaagcgaagaagactgaggaggaagtgccagaggaagaacttgaccctgaagaacgcgacaatttcctccaacagctctacaagttcatggaagacagggggacacctatcaataaacctcccgtgttgggttataaggacctgaatctatttaagctctttcgcctggtctatcatcagggaggctgtgacaacatcgacagtggggctgtctggaagcagatctacatggaccttggtatcccaatactcaactctgccgccagttataatgttaaaacggcatatcgaaagtacctgtatggcttcgaggaatactgccggagcgccaatattcaatttcgcacagttcaccatcacgagcctaaagtgaaggaggaaaaaaaagatctcgaagaatccatggaggaggcattgaagcttgaccaggagatgccactgacagaagtgaagtccgaacccgaggagaacatcgattcaaactcagaatcggagcgggaggagatagagctgaaatctccccgcggaagacgcaggatcgcccgggacgttaatagcattaagaaggaaattgaggaggagaagaccgaggacaagttgaaagataacgatacagagaataaggacgtggacgatgactacgaaactgctgagaaaaaagagaacgaattgctgctgggcagaaaaaacactcctaagcaaaaggagaaaaaaataaaaaagcaggaggacagcgacaaagactccgatgaagaagaggagaaatcccaggagcgtgaagagactgagtctaaatgtgacagcgagggtgaagaagacgaggaggacatggagccttgtctgaccgggactaaggttaaggtgaagtatggacgtggtaagacacagaaaatttatgaggccagtatcaagtctacagagatcgacgacggcgaagtattatacttggtccattattacgggtggaacgtgagatacgatgaatgggtaaaggccgataggataatctggcccctcgacaaaggcggccctaaaaagaagcagaaaaaaaaggcaaaaaataaggaagacagcgaaaaggatgaaaagagggacgaggagcggcaaaagagcaagcgtggacgcccccctttgaaaagcacactgagctccaatatgccttatgggttaagtaaaacagccaactctgaaggtaagtccgactcttgtagttccgactccgagacagaagacgccctggaaaagaatctgattaatgaagaattgtctcttaaggatgagctggagaagaatgaaaacctgaatgacgacaaactggacgaagagaatccaaagatttccgcccatattttaaaagagaatgatagaacccagatgcagcccctagaaactctaaaacttgaggtgggcgagaatgagcaaatagtgcagattttcggcaacaagatggaaaaaacagaggaagttaagaaagaagccgaaaagtctcctaaaggcaaagggcgtagaagcaagacaaaggatctatccctggagatcatcaagatcagtagcttcggccagaacgaggctggctctgaaccccacatcgaggcacactcacttgaactgagctcactcgacaacaaaaactttagtagcgccaccgaggatgagatcgaccagtgtgtgaaggaaaaaaaactgaagcgaaaaattctgggccaatcctctcctgaaaaaaaaataagaattgagaatgggatggagatgaccaacaccgtgagtcaggagaggacatcagactgcattggttccgaaggcatgaaaaatctcaattttgagcagcacttcgagagggagaatgagggcatgccgagtcttatcgcggagtctaaccagtgtatacagcagctgacctcagagaggttcgactccccggcagaagagaccgtgaacataccacttaaggaggatgaggatgctatgcctcttatcgggccagaaactctggtttgtcacgaagttgacttggacgatttagatgagaaggataaaactagtatcgaagacgtggctgttgagagctccgaatcaaattcactcgtctcgatcccaccggccttgccgcccgttgtgcagcataatttctctgtggcatcaccattgaccctctcccaagatgagagcaggagcgtcaagagcgaatcagatatcactatcgaggtcgactctattgctgaggagagtcaagaggggctctgcgaaagagagagcgccaacggattcgagactaacgtcgccagcggaacctgctcgatcattgtccaggaacgggagagccgcgagaaggggcagaaacgaccatctgatggcaactcaggtctgatggcaaagaaacaaaaacggacacctaaacgaactagcgcagccgcgaagaatgaaaaaaacggtaccgatgagttggacaacatgaacagtactgagcgcattagttttctgcaggagaaactgcaggaaatcagaaagtattatatgtctctgaagtcagaagttgccaccattgaccgtagacgaaagaggttgaagaagaaggaccgcgaagttagtcatgccggcgcaagcatgagctcagcatcctcagacactgggatgtccccttcaagctcgagtccaccccaaaacgtgttagccgtggaatgtcggtag

SEQ ID NO: 213785 - DNA, 3567 bp, Artificial Sequence
  derived and/or modified sequence
atgaaggccgcagatgagcccgcctacctgactgtgggcacagatgtgtctgccaagtacagaggagccttctgtgaggccaagatcaagacagtgaagaggctggtgaaggtgaaggtgctgctgaagcaggacaacaccacccagctggtgcaggatgaccaggtgaagggccccctgcgggtgggcgccatcgtggagaccaggaccagtgatggcagcttccaggaggccatcatcagcaagctgacagatgcctcctggtacacagtggtgtttgatgatggagatgagaggaccctgcggaggaccagcctgtgcctgaagggggagcggcactttgctgagagcgagaccctggaccagctgcccctgaccaaccctgagcacttcggcacccctgtgattgccaagaagaccaacagaggccgccgcagcagcctgcctgtgacagaagatgagaaggaggaggagagcagcgaggaggaggatgaggacaagaggcggctgaatgatgagctgctgggcaaggtggtgtctgtggtgtctgccacagagaggacagagtggtacccagccctggtgatcagccccagctgcaatgatgacatcaccgtgaagaaggaccagtgcctggtgcgctccttcatcgacagcaagttctacagcatcgccaggaaggacatcaaggaggtggacatcctgaacctgcctgagagcgagctgagcaccaagccaggcctgcagaaggccagcatcttcctgaagaccagggtggtgcctgacaactggaagatggacatcagcgagatcctggagagcagcagcagtgatgatgaagatggccctgctgaggagaatgatgaggagaaggagaaggaggccaagaagacagaggaggaggtgcctgaggaggagctggaccctgaggagcgggacaacttcctgcagcagctgtacaagttcatggaggaccggggcacccccatcaacaagccccctgtgctgggctacaaggacctgaacctcttcaagctgttccggctggtgtaccaccagggcggctgtgacaacattgattctggagctgtgtggaagcagatctacatggacctgggcatccccatcctgaacagcgctgccagctacaacgtgaagacagcctacaggaagtacctgtatggctttgaggagtactgccgcagcgccaacatccagttcagaacagtgcaccaccacgagcccaaggtgaaggaggagaagaaggacctggaggagagcatggaggaggccctgaagctggaccaggagatgcccctgacagaggtgaagtctgagccagaagaaaatattgacagcaacagcgagagcgagcgggaggagattgagctgaagagcccccggggcagaagaagaattgccagagatgtgaacagcatcaagaaggagattgaggaggagaagacagaggacaagctgaaggacaatgacacagagaacaaggatgtggatgatgattatgaaacagctgagaagaaggaaaatgagctgctgctgggcaggaagaacacccccaagcagaaggagaagaagatcaagaagcaggaggacagcgacaaggacagtgatgaggaggaggagaagagccaggagcgggaggagacagagagcaaatgtgacagcgagggggaggaggatgaggaggacatggagccctgcctgaccggcaccaaggtgaaggtgaagtatggccggggcaagacccagaagatctatgaggccagcatcaagagcacagaaattgatgatggagaggtgctgtacctggtgcactactacggctggaatgtgcgctatgatgagtgggtgaaggctgaccgcatcatctggcccctggacaagggcggccccaagaagaagcagaagaagaaggccaagaacaaggaggacagcgagaaggatgagaagagagatgaggagcggcagaagagcaagaggggccggccccccctgaagagcaccctgagcagcaacatgccctacggcctgagcaagacagccaacagcgagggcaagagtgacagctgcagcagtgacagcgagacagaagatgccctggagaagaacctgatcaatgaggagctgagcctgaaggatgagctggagaagaatgaaaacctgaatgatgacaagctggatgaggagaaccccaagatcagcgcccacatcctgaaggaaaatgacaggacccagatgcagcccctggagaccctgaagctggaggtgggggagaatgagcagatcgtgcagatcttcggcaacaagatggagaagacagaggaggtgaagaaggaggccgagaagagccccaagggcaaaggaagaagaagcaagaccaaggacctgagcctggagatcatcaagatcagcagctttggccagaatgaagctggcagcgagccccacatcgaggcccacagcctggagctgagcagcctggacaacaagaacttcagcagcgccacagaagatgaaattgaccagtgtgtgaaggagaagaagctgaagaggaagatcctgggccagagcagccctgagaagaagatcagaattgaaaatggcatggagatgaccaacacagtgtcccaggagaggaccagtgactgcatcggcagcgagggcatgaagaacctgaactttgagcagcactttgaaagagaaaatgaaggcatgcccagcctgattgctgagagcaaccagtgcatccagcagctgaccagcgagagatttgacagccctgctgaggagaccgtgaacatccccctgaaggaggatgaagatgccatgcccctcatcggccctgagaccctggtgtgccacgaggtggacctggatgacctggatgagaaggacaagaccagcattgaagatgtggccgtggagagcagcgagagcaacagcctggtgtccatccccccagccctgccccctgtggtgcagcacaacttctctgtggccagccccctgaccctgagccaggatgagagccgctctgtgaagtctgagagtgacatcaccatcgaggtggacagcattgctgaggagagccaggagggcctgtgtgagcgggagagcgccaatggatttgagaccaacgtggccagcggcacctgcagcatcatcgtgcaggagcgggagagccgggagaagggccagaagaggcccagtgatggcaacagcggcctgatggccaagaagcagaagaggacccccaagaggaccagcgctgctgccaagaatgagaagaatggaacagatgagctggacaacatgaacagcacagagcgcatctccttcctgcaggagaagctgcaggagatcaggaagtactacatgagcctgaagtctgaggtggccaccatcgacagaagaaggaagaggctgaagaagaaggaccgggaggtgtcccatgctggggcctccatgagcagcgccagcagtgacaccggcatgagccccagcagcagcagccccccccagaatgtgctggccgtggagtgcaggtag

SEQ ID NO: 213786 - DNA, 165 bp, Artificial Sequence
  derived and/or modified sequence
atgaaggccgcagatgagcccgcctacctgactgtgggcacagatgtgtctgccaagtacagaggagccttctgtgaggccaagatcaagacagtgaagaggctggtgaaggtgaaggtgctgctgaagcaggacaacaccacccagctggtgcaggatgactag

SEQ ID NO: 213787 - DNA, 3567 bp, Artificial Sequence
  derived and/or modified sequence
atgaaggccgccgacgagcccgcctacctgaccgtgggcaccgacgtgagcgcgaagtacaggggggctttctgcgaagcgaaaattaagactgtgaagcgcttagtgaaagttaaggtactgctgaaacaggacaatacgacgcagctggtccaagacgaccaggtgaaaggaccacttcgcgtcggcgccatcgtggagacgcgcaccagtgacggctcgttccaggaagcaatcattagtaaattgaccgacgcctcctggtacacagtcgtcttcgacgatggggatgaacgtacactcaggcggacatcactctgcttgaagggcgagaggcacttcgcagagtccgagacactggatcagctgcctctgacaaatcctgaacatttcgggacccccgtcatcgctaaaaaaacgaaccgggggagacggtcttcccttcccgttactgaagatgagaaggaagaggagtcctccgaggaagaagacgaagacaagcgaaggctgaacgacgaactcttgggaaaagtcgtttccgtggtttccgctactgagcgcacagaatggtatcccgcgctggtcataagcccaagctgtaatgatgacattaccgtcaaaaaggaccagtgtctggtgcgttcgttcattgattctaagttttattctatcgcacggaaggacattaaagaagtcgacattttaaaccttcctgaaagcgaactgtccactaagccaggactgcagaaggccagtatcttcctgaaaacccgcgtcgtgcccgataactggaaaatggacattagtgagatactcgaatcaagttctagcgacgacgaagacggcccagccgaggagaatgacgaggagaaggaaaaggaagccaagaaaaccgaggaggaggttccagaggaggagctggatccggaggaacgtgacaatttccttcagcagctgtacaagttcatggaggaccggggcactccgattaacaagccacccgtcctgggctacaaggatctcaacctttttaagttgtttcgcttggtgtaccaccagggcggctgcgataacattgattctggtgcggtctggaaacagatttacatggacctgggcattcccattttaaactccgcggcttcctacaatgttaagacagcctacagaaagtatctttacggttttgaggagtactgcaggtcagccaacatccagtttagaaccgtccaccaccacgagccaaaggtaaaggaggagaagaaggacttggaggagtccatggaggaggccctgaagctggaccaagagatgcctctaactgaagtgaaatccgagcccgaagaaaacattgattccaactctgaaagcgaaagagaggagatcgaactcaagagcccgagaggtagacgaagaatcgcacgagatgttaatagcatcaagaaggagatagaggaggagaaaactgaggacaagctgaaagacaatgacacggaaaataaagacgttgatgatgactacgagacagcggagaaaaaggagaacgagttactgctgggccgcaaaaataccccaaaacagaaagagaagaagattaagaagcaagaggattctgacaaggacagtgatgaggaggaggagaaatcacaggaacgcgaagagaccgagtctaaatgcgatagcgagggagaggaggatgaagaagatatggagccctgtttgacggggacaaaagtgaaggttaaatacggccgagggaagacgcaaaagatttacgaggcatcaatcaaaagcaccgagattgacgatggagaggtgctgtacctggtacactactatggctggaacgtccggtacgacgaatgggtaaaggcagatcggatcatttggcctctggacaaaggagggcctaagaaaaagcagaagaagaaggctaagaataaagaggacagcgagaaagacgagaagagagatgaggaacggcaaaagtctaagaggggacgccccccactcaaaagcaccctgtcaagtaatatgccttatggtctgagcaaaactgcgaacagcgagggtaagagcgacagttgtagcagtgactctgagactgaagacgctttggagaaaaacctcatcaacgaggagctgtccttgaaggatgagctggagaaaaatgagaatctgaatgacgacaaattagatgaggaaaaccccaagatctctgcccatattctgaaagagaatgataggactcagatgcaaccacttgagaccctaaagctggaggtgggagaaaatgagcagattgtacagatcttcgggaacaagatggagaagaccgaggaggttaagaaagaggccgagaagagccctaaaggtaagggacggagatctaagacaaaggatctgtccctggagattatcaagataagctccttcgggcagaacgaagctgggtcggagccccatattgaagcacattcgctcgagctttctagcctcgacaataaaaacttctctagtgcaactgaagatgagattgatcagtgtgttaaagagaaaaagttaaagcgcaaaatactgggccaatcctcgcccgagaagaagattcgtatcgagaatggcatggaaatgacaaatactgtttcccaggagagaacatcagattgtatcggaagtgagggcatgaagaacctcaattttgaacagcactttgagcgcgagaacgaaggcatgccgtcactaattgcagaatcgaaccagtgtatccagcagttgacaagcgagcgctttgacagcccagctgaggaaacagttaatattccattaaaggaggacgaggacgccatgcccctcattggcccggaaactttggtgtgccacgaggtggacttggatgatctggacgagaaagataaaaccagcattgaggacgtcgccgttgagagtagtgaaagcaacagtctggtatcaatccccccagccttgcctccagtggttcagcataacttctctgtggccagccccctcacactcagtcaagatgaaagccggtctgtcaagtccgagtcggacatcacaatcgaagttgattctatagcagaggaatcccaggaaggcttgtgtgaacgcgagagcgccaacggatttgaaacaaacgtagcctctggaacctgctccataatcgtgcaggagagagagtcgagggagaagggccagaagagaccttctgatggcaacagcggcttaatggccaagaagcaaaagcggactccaaagcggaccagcgccgccgccaagaacgagaaaaacggaactgatgaactagacaatatgaatagcacagaacgtatttcctttctgcaggagaaattgcaggaaatcagaaaatactatatgtcactgaaaagcgaagtggctaccatcgacaggcgccgaaaaagattgaagaagaaggacagagaggtgtcccacgccggagcctctatgtcgtccgcctcttctgatactgggatgtcacctagtagcagtagtcctccacaaaatgtactcgctgtggaatgtaggtag

SEQ ID NO: 213788 - DNA, 165 bp, Artificial Sequence
  derived and/or modified sequence
atgaaggccgccgacgagcccgcctacctgaccgtgggcaccgacgtgagcgccaaataccgcggcgcgttctgcgaggctaagatcaagacagtaaaacgtcttgtcaaggttaaggtgctgttgaagcaggacaatactacacagctggtccaggatgactag

SEQ ID NO: 213789 - DNA, 3567 bp, Artificial Sequence
  derived and/or modified sequence
atgaaggccgccgacgagcccgcctacctgaccgtgggcaccgacgtgtccgcgaagtaccgaggcgccttctgtgaggcgaaaataaaaactgtaaaaaggttagttaaagtgaaagtcctgctcaagcaggataataccacccagctggtccaggatgaccaggtgaaaggccctctgcgtgtgggtgccatcgtggagacccgaacctcggatggatcattccaagaagctatcatcagcaaacttactgatgcatcttggtacaccgtggtcttcgatgacggcgatgagcggaccctgcgacggacctccctgtgcctaaaaggcgagaggcacttcgccgagtccgaaactttggaccagctgccactgacaaaccctgaacactttggaacaccagtgatcgccaaaaaaactaatagggggagacgttcatcactgccagtgactgaagatgagaaggaggaagaatcctctgaggaagaggatgaggataagagaagactaaacgacgagctgctgggcaaagtggtgtcagtcgtgagcgcgaccgaaaggaccgaatggtaccctgcattggtaatttccccaagttgcaatgatgatatcaccgtgaaaaaagaccagtgcctggtccggtcatttatcgatagcaaattctacagtatcgctagaaaagatataaaggaggtggacatattaaatttaccagaaagtgagctatccaccaaaccgggattgcagaaggcctcaatcttcctgaagactcgggttgtgcctgacaactggaaaatggacattagcgaaatcctcgagagcagctcatctgacgacgaggacggcccagccgaagaaaacgatgaagaaaaagaaaaagaggccaagaagacagaagaggaagtacccgaggaggagctggaccctgaggagagagacaactttctgcagcaactgtataaatttatggaagatcggggtactcctatcaataaacccccggttcttggctataaggaccttaacttgttcaagctattccgactcgtctatcaccaggggggttgcgataacatcgactctggcgcggtttggaagcagatatacatggacctcggaatccctattttaaattcagcagcctcctataacgtgaagactgcataccgcaaatatctctatggatttgaggaatattgtcggtcagctaacatacagttcaggactgtgcaccaccacgaacctaaggtgaaggaagaaaagaaggatctcgaagagtctatggaggaagctcttaaactagaccaggaaatgccactgaccgaagtgaaatctgaacctgaagagaacattgactctaattcggagagtgaacgagaggaaatcgagctcaaatcgcccaggggaagacggagaatagcccgtgacgttaactctattaaaaaagaaatcgaggaggagaagaccgaggacaaacttaaggataacgatactgaaaataaagacgtcgatgacgactacgaaacagcagagaaaaaggagaacgaattgctgctgggacggaagaataccccaaaacagaaggaaaaaaaaatcaagaagcaggaagattctgataaggactcagatgaagaggaagaaaaaagccaggagagagaggagaccgagagtaagtgcgactcggaaggtgaggaggatgaggaggacatggagccctgcctcaccgggacgaaggtgaaagtaaagtatggcaggggaaagacccagaagatctatgaggcctcaatcaaaagcaccgagatcgatgatggggaggtgctctacttagtgcactactatggctggaatgtcaggtacgatgagtgggtgaaggcggacaggatcatctggccacttgacaagggaggccccaaaaagaagcagaagaagaaggcaaaaaacaaagaggacagcgaaaaagatgagaagcgtgatgaggagcgtcagaaatctaaaaggggcagaccccctctgaaatcaaccctatcaagtaatatgccctacggtttgtctaaaacagcgaattccgagggcaaaagtgatagttgttccagtgacagtgaaacagaggatgcactggaaaagaacctcatcaatgaggagctgtccctaaaagacgagctcgagaaaaatgagaatctgaatgacgataagctagacgaagaaaaccctaaaatttcggcccacattttgaaagaaaacgaccgcacccagatgcagcccttggagaccctaaagctggaagtgggagagaatgaacagatagtgcagatatttggtaacaaaatggagaagaccgaggaggttaaaaaggaggccgagaaatccccgaaagggaaggggcgccggtccaaaaccaaagatctgtctctcgaaatcataaagatcagctctttcggccagaatgaggccgggtcagaaccacacatcgaggcccacagcctcgagctgtcctcactggacaataaaaatttcagttccgcaacagaagatgagattgaccagtgtgtgaaagagaagaagctgaagcgaaagatccttggccagagttcaccggaaaaaaagattcggatcgagaacgggatggagatgacaaacactgtgagtcaggaacgaacaagcgactgtatagggtcagaaggcatgaagaacctgaattttgaacagcactttgaaagggagaatgagggcatgccatctctcatcgctgaaagtaaccaatgtatccagcagctgacgtcagaacgcttcgactcccctgccgaggaaacagtgaacattcctttgaaggaggacgaagacgccatgcctctgattggacccgaaacactggtatgtcacgaggttgacttggatgatcttgatgagaaagacaaaacctctattgaggacgtagctgttgaaagtagcgaatccaactccctcgtgagcatcccacctgccttgcctcccgtggtacagcacaacttctctgtggcatctcccttaacactgagtcaagatgagagcagatctgttaagtcagaaagcgacataactatcgaagtggatagtattgcagaggaatcccaggaaggtttgtgtgaacgggaaagtgcaaacgggtttgaaaccaatgtagcctctgggacctgtagtatcatcgtccaggaacgtgaatctcgcgaaaaaggacagaagcgcccttctgacggcaacagcggacttatggctaagaaacaaaaaaggaccccaaaacgtactagcgccgccgccaagaacgagaagaacgggaccgacgagctcgacaatatgaacagcaccgaacgaattagctttctacaggagaagctacaagagatccgaaagtactacatgagcttgaaatccgaagtggcaaccatcgataggaggcgcaagaggttgaagaagaaagacagggaggttagtcatgcaggggcaagcatgtcgtccgcgtcaagtgatactggaatgagccctagcagttcctcccctccccagaacgttctcgcagtggagtgccgatag

SEQ ID NO: 213790 - DNA, 3567 bp, Artificial Sequence
  derived and/or modified sequence
atgaaagcagccgatgaaccagcgtacctgaccgtgggcactgatgttagcgctaaataccgtggggcattttgcgaggctaaaattaagacagttaagagattagtgaaagtgaaggtactcctgaaacaggacaataccacccagctggtccaagatgatcaggtgaagggtccgttgagagtgggggctattgtggaaacgcgtacctcagatggaagtttccaggaggcaattattagtaagttgaccgatgcttcctggtacacagtcgtctttgatgatggtgacgagcgtacgctgcgccgtacctcgctctgccttaaaggtgaaaggcattttgcggaaagtgaaactcttgaccagctccctctaaccaatcctgagcatttcgggacgccagtgatcgctaagaaaacgaatcgaggtcggcgatcttcattgcctgtcacagaggacgaaaaggaggaggaaagtagcgaggaagaggacgaggacaaacgacggctaaacgacgaactgcttggcaaggtggtgagcgtggtgagcgcaacggagaggaccgagtggtatccagcgctggtaatctctccgtcctgtaatgatgatattaccgtgaaaaaggatcagtgtctcgttagatcgtttattgactccaaattttactcaatcgctagaaaggacattaaggaggttgacatcttgaatctgccagagtccgagctgagcacaaagcccggactccagaaggcctcgattttcctgaaaactagggttgtgccggacaattggaagatggatatctctgagatactggagtcttcatccagtgacgacgaggacgggcctgcagaagagaacgatgaggagaaggaaaaagaagctaagaagactgaggaggaagtgccagaggaggaactcgatccggaggaaagggataattttctgcagcagttatacaagtttatggaggacaggggcactccaatcaataaaccgcctgtactggggtacaaagatttgaacctgttcaagctctttagactcgtttaccaccaaggtgggtgcgacaatatcgacagcggcgctgtatggaaacaaatctacatggatcttggaattcccattctgaacagcgcggcatcgtacaacgtgaagaccgcatataggaagtacctctacggctttgaagagtactgccgttccgcaaacatccagttccgtacagttcatcaccacgagcccaaagtgaaagaggagaagaaagaccttgaggagtccatggaggaagctctcaaactcgaccaggagatgcccttgactgaagtcaagagcgagccagaggagaatatcgactcgaactctgagtcggagcgtgaagaaatcgagctgaagtcccccagggggcgtagacgaatcgccagagatgtgaactctattaagaaagagattgaggaagaaaagactgaggataagttaaaggataatgatacagagaacaaggatgtagatgatgactatgagacagccgagaagaaggagaatgagctgctcctgggacgaaagaacacccctaaacagaaggagaagaagataaagaagcaagaggacagcgataaggacagtgacgaggaggaggagaaatctcaggaacgagaagagaccgagtcaaagtgcgattccgagggggaggaggatgaagaggatatggaaccttgcttaacgggtacgaaggtgaaggtgaaatacggtaggggaaagactcaaaagatttatgaggcttcaattaaatccactgagatcgacgatggagaggtattgtatttagtgcactattacggttggaacgtgaggtatgatgaatgggtcaaagctgaccggattatctggcccctggataaaggcggacccaagaagaagcaaaagaagaaagccaagaacaaggaggattccgagaaggacgagaagcgggacgaggagcgtcagaaaagcaagcgtggtcggcctcctcttaagagtactctgtccagcaacatgccctatggtttgtcaaagacagcaaatagtgagggaaaatcagactcatgctcaagtgatagcgagactgaggacgcgttggaaaagaacctcattaacgaggaactctccctgaaagacgaattagaaaagaatgagaaccttaatgacgataagctcgacgaggaaaaccccaaaattagtgcccacattttaaaagaaaatgacaggacccagatgcagcctttggaaactttgaaactggaagttggtgagaatgaacagatcgtgcagattttcggtaataagatggagaaaacggaggaagtgaaaaaggaagcagagaaatcccccaaaggcaaaggcagaagaagcaaaaccaaagacctctcccttgaaataattaaaatcagttccttcggccagaatgaggccggttctgagcctcatatcgaggcgcactccctcgagctaagtagtctggacaacaagaactttagtagcgcaacagaagatgagatagaccaatgcgtaaaggagaagaagctcaagcggaagatccttgggcagtcatctcccgagaagaagatccggatcgagaacggtatggaaatgacaaacacagtgagtcaggagcgaacctctgattgcatcggctcagagggaatgaagaatctgaatttcgagcagcacttcgaacgtgaaaacgagggcatgcctagtctcatcgcagagtccaaccagtgtatacagcaattaacatccgaaagattcgattcaccggcagaagagaccgtgaacatacccctcaaggaagacgaagacgctatgcccctaatcggaccggagaccttggtgtgccatgaggtggacctggacgatttggatgagaaggataagacttctattgaagacgttgcagtggagtcatccgagtccaactcactcgtttccatcccacctgccctccccccagttgtccaacacaacttctctgtggcttcacctctcacactgtcccaagacgagagccggagcgtgaagagtgaaagtgacattacaatcgaagtcgattctattgccgaggagagccaggagggcttgtgtgagcgggagtccgctaatggttttgagaccaacgtcgcctcaggaacgtgtagcatcattgttcaggagagggagtcccgcgaaaagggacagaaacgtcctagtgacggcaattccggccttatggctaaaaagcaaaagaggactccaaaacgtacatctgccgctgccaaaaacgaaaagaatgggactgacgaattggataacatgaatagcacggagcggatttcatttctgcaagaaaagctgcaggagatcaggaaatattacatgtccctcaagagtgaagtggcgactatcgatcggcgtagaaaacgactgaagaagaaagaccgggaagtgtcccacgcaggagcttctatgagtagcgcttccagcgatacggggatgtctccaagtagctcaagtccacctcagaatgtactggccgtcgaatgtcggtag

SEQ ID NO: 213791 - DNA, 165 bp, Artificial Sequence
  derived and/or modified sequence
atgaaagctgcagacgagcccgcataccttacggtggggacagacgtctccgctaagtacaggggtgctttttgcgaggccaaaattaaaaccgtgaagcgactggtaaaagtgaaggttctcctgaagcaagataacaccacccagttggtgcaggatgattag

SEQ ID NO: 213792 - DNA, 3567 bp, Artificial Sequence
  derived and/or modified sequence
atgaaagccgcagacgagccggcttatctaactgtcggaactgatgtgtcggccaagtacaggggtgccttttgcgaggccaaaatcaagactgtcaaaagacttgtcaaggtcaaggtcttgctgaaacaggataacactacacagcttgtgcaggatgaccaggtgaagggccctctccgcgtcggggctatcgttgagaccagaacatcagacggcagttttcaggaagcaattatctccaagcttaccgatgctagctggtatacagtcgtgttcgatgatggcgacgagcgtacactgcggcgtaccagcctgtgcctcaaaggcgagaggcacttcgctgagagcgagacccttgatcagcttcccctgaccaaccccgagcatttcggtacccctgtgattgctaaaaaaactaacaggggacgccgaagcagtctgccagtgaccgaggatgaaaaggaggaagaaagctccgaggaagaggatgaagacaaaagaagacttaacgacgaactgctggggaaggtggttagcgtcgtttcagctaccgaacggacagaatggtaccctgctctggtgatttctccgtcttgcaacgacgatataacggtgaagaaggatcagtgccttgtgcgttctttcatcgattccaagttttactcaattgctcgcaaggatatcaaagaggtggacattctcaacctccccgagtctgaactgtcaaccaagcctggacttcagaaagccagcatcttcctgaaaacgcgggtggtgcctgataactggaaaatggacatttccgagatcttggagtcctcatcctcagatgatgaagacggcccagcagaagaaaacgacgaagaaaaggaaaaagaagcgaagaaaaccgaggaagaggtgccggaggaggagctcgatcccgaggaaagggataactttctgcagcagctgtacaaatttatggaagatagaggaactccgatcaataaacccccagttttaggatataaggatcttaatctgttcaaattatttaggttggtgtatcaccaggggggatgtgacaacattgattccggggcagtgtggaagcagatttatatggatctcggtattcccattttgaatagcgcggcaagctacaacgttaagaccgcctaccgaaaatacctgtacggcttcgaggagtactgccggagtgcaaatatccagttcaggacggttcatcaccacgaacccaaagtcaaggaggaaaaaaaggacctggaagagtctatggaagaagctctgaaattagaccaggagatgccccttaccgaggtaaagagcgagccagaggagaatattgacagtaactccgaaagcgaacgcgaggaaattgaacttaagtccccccgaggtcggcgtcgcatcgccagagacgtcaacagtatcaaaaaagagatcgaagaggagaagaccgaagataagcttaaggataacgacactgaaaataaggatgtggacgacgattacgaaactgccgaaaaaaaggaaaatgaactgctcctgggtagaaaaaatacgcctaagcaaaaggaaaaaaagattaagaagcaggaggattctgataaggacagtgatgaggaagaggagaaatcccaggaacgcgaagagaccgaaagtaagtgtgactccgaaggagaggaagatgaagaagacatggaaccatgcttaactgggactaaggtaaaggttaagtatggacggggaaaaactcagaagatttacgaagcaagcataaaaagtacagaaatcgacgatggggaggtcctgtacctcgtccactattatgggtggaacgtgaggtacgatgagtgggtgaaggcggatagaattatttggccattggacaaagggggaccgaaaaagaagcagaaaaagaaggctaagaataaggaggattcggagaaggacgagaaaagggacgaagaacggcagaaatctaagcgcggtaggccaccactaaaatccaccttgtcttcgaatatgccatatggcctgtcaaaaaccgccaacagcgaggggaaatccgattcctgttctagcgacagtgaaactgaggacgccctggaaaagaatctgattaacgaggaactgtccctcaaggacgaactggaaaagaacgagaacctgaacgacgataagctagacgaggagaatccgaaaatctctgctcacattctgaaagagaacgatcggacacagatgcagccacttgagaccctgaagttggaggtgggtgagaatgagcaaattgttcaaatcttcggtaacaagatggagaaaaccgaggaggtgaagaaagaggccgagaaaagccctaagggcaagggaaggagatcaaagacaaaggatttgagtctcgaaatcattaagatatcctcatttgggcagaacgaagcgggaagtgagccccacatcgaggcccattccctggagctcagttcgctcgacaataagaactttagcagtgcaactgaggacgaaattgaccagtgtgtgaaggagaagaaacttaaacgaaaaatcctggggcaaagttcccccgaaaagaaaatccgcattgagaacggtatggaaatgaccaatacagtgtcacaagagaggacatccgattgtattggtagcgaaggtatgaaaaatcttaattttgagcaacattttgagagggaaaatgagggaatgccctcccttatcgccgagtcaaaccagtgtattcagcagttgacatccgaacggttcgacagtcctgcggaggagaccgtgaatatacccctgaaagaggacgaagatgccatgcccttgattggacccgagactctcgtgtgtcacgaggttgatctcgatgacttagatgagaaggacaaaacgtctattgaggacgttgccgtggaatcctcagaaagtaattcactggtctccatccctcccgctctgcctcccgttgtgcagcacaacttcagcgtggcctcccctctcaccctgagtcaagatgagtctaggagtgttaagagcgaatccgacatcactatcgaagtagattctatagccgaggagtcacaagaaggcctgtgcgagagagagtctgcaaacggctttgaaaccaatgtagcgagtggcacatgcagcataattgtccaggagcgagagtctcgcgagaagggccaaaagcggccaagcgatggcaacagcggcctaatggccaagaaacaaaagcgcacccctaaaaggacttcagcagcagctaaaaacgaaaaaaatggaaccgatgagctggataatatgaactccaccgaaagaatctcctttcttcaggagaagcttcaagaaattcgaaagtattacatgtctctgaaatctgaagtcgccactatcgacaggagaagaaagagactcaaaaagaaagacagggaggtgtctcacgccggagcttcaatgagttcggcgagctctgacacaggaatgtccccatcatcaagctcgccccctcagaacgtcctagccgtggagtgcagatag

SEQ ID NO: 213793 - DNA, 5562 bp, Artificial Sequence
  derived and/or modified sequence
caataggagttcgtgtagaagcgagtctgctcaacagcttgttatttggtggattgtggcagtaaatcggggcgagtggggaacccggcgcaggaactgcagccgcggctgggagtggtgctgcccggacgggggcccacggaggtcagaggggaggaggactctggagctgacagcgcgcacttcacccgcagttgttctagcgactgcgaagatagctcgctgagctggaaccccacagatcaccaacaaaaatgaaggcggcagatgagcctgcctacctgacagtgggaaccgatgtcagtgccaagtaccgaggtgccttctgtgaggcaaagattaagactgtgaaaaggctggtgaaagttaaggtactcctgaaacaggataataccacacaattggtacaagatgaccaagtaaagggtcctttaagagttggagctattgttgaaacaaggacatctgatggatcttttcaggaagctattatcagcaagttgacagatgctagttggtataccgtggtgtttgatgatggtgatgagcgaacattgagacgtacctcactttgtctgaaaggagagagacattttgcagagagtgagacacttgaccagcttccattaacaaatccagagcattttggaactccagtaattgcaaagaagacgaacagaggaaggagatcttctcttcctgttactgaagatgaaaaggaagaagaaagcagtgaagaggaagatgaagacaagcgccgtctcaatgatgaattactaggaaaagttgtaagtgtggtgtctgcaacggagaggactgaatggtatcctgctttggtaatatctcccagctgtaatgatgacatcacagtgaaaaaggatcagtgtttagttcgatcatttattgattctaaattttactctatagcaagaaaggacattaaggaagtagacattctcaatctaccggaatctgagctctccactaaaccagggcttcagaaagcaagcatcttcttaaaaactagagttgttcctgataattggaaaatggatataagtgaaatccttgagtcatccagtagtgatgatgaagatggcccagctgaagaaaatgatgaagagaaggaaaaggaggccaaaaagacagaagaagaggtgcctgaggaagaacttgatcctgaagagagggacaacttcctccagcagctttataagtttatggaagacagaggtactccaatcaacaaaccacctgttttgggctataaagatctcaatctcttcaaactcttcagactggtttatcatcagggtggatgtgacaatattgatagtggtgctgtatggaagcaaatttatatggaccttggcattcctattttgaattcagctgcttcctacaatgtaaaaactgcttatagaaagtatctctatggttttgaggagtactgccgttcggcaaatattcagttcagaactgttcatcaccatgaaccaaaagtaaaagaggaaaaaaaagacttagaagaatcaatggaagaggctctcaaattagatcaagaaatgcctttaacagaagtgaagagtgaacctgaggaaaatatcgattcaaacagtgaaagtgaaagagaagagatagaattaaaatctccgaggggacgaaggagaattgctcgagatgtaaattctattaaaaaggaaattgaagaagagaaaacagaagacaaattaaaagataatgatacagaaaataaggatgtagatgatgactatgaaactgcagagaaaaaagaaaatgagctactactggggagaaaaaatacaccaaagcaaaaagagaagaaaattaaaaaacaggaggattctgacaaagactcagatgaagaggaagagaaaagccaagagagggaagaaactgaaagcaaatgtgactctgaaggagaggaagatgaggaagacatggaaccctgcctaacaggaaccaaagtgaaagtaaaatatggacgagggaagactcagaaaatttatgaagccagtattaaaagcactgaaattgatgacggagaagttttatatttggtacattactatggatggaatgtcaggtatgatgagtgggtgaaggctgacaggataatctggcctttggacaaaggtggaccaaagaaaaaacagaagaaaaaagctaaaaataaagaagatagtgaaaaggacgaaaagagagatgaggagaggcagaagtcaaaacggggacgacctcctttaaaatcaaccctctcatcaaacatgccgtatggcttatctaagacagcaaacagtgaaggaaaatcagactcttgttcatctgatagtgaaacagaagatgctttagaaaagaatttaataaatgaagaactttctcttaaagatgaactagaaaaaaatgaaaatttgaatgatgataagctagatgaagaaaatccaaagatttctgcacatatattaaaagaaaatgataggactcaaatgcagcctttagaaaccctgaagttagaagttggagagaatgaacaaatagtacagatttttgggaacaaaatggaaaaaacagaagaagttaagaaagaagccgaaaaatctccaaaaggaaagggaagacgaagcaagacaaaagatctttctttagaaattataaagatttcatcatttggccagaatgaagcaggaagtgaacctcatatagaagctcatagtcttgaattgtcttcattagacaataaaaacttttcttctgctacagaagatgaaattgaccaatgtgtgaaagaaaagaagttgaaacggaaaatactaggacaatcatcgccagagaaaaaaataagaattgagaatggaatggaaatgacaaatactgtatctcaagaaaggaccagtgattgtattggatctgagggaatgaaaaacttaaattttgaacagcactttgaaagagaaaatgaaggaatgccatcattgatagcagagtcaaaccaatgcatccaacaactgactagtgaaagatttgatagtccagctgaagaaactgtaaatattccactaaaagaagatgaggatgcaatgcctctgatcgggcctgaaaccttggtttgccatgaagtagatttggatgatttggatgaaaaggataagaccagcattgaggatgtagcagttgaaagctctgagtctaactctcttgtttctattccacctgccctacctcctgtagtccaacataacttttcagtagcttcaccacttactcttagtcaagatgagtctcgaagcgtaaaaagtgagagtgatataacgattgaagttgatagtattgctgaagaatctcaagaaggtctctgtgagagggaatcggcaaatggatttgaaactaatgttgcctctggtacctgtagtataattgtacaagagagagagagcagagagaagggtcagaagaggccaagtgatggaaatagtggattaatggcaaaaaagcaaaagcgtaccccaaagcgaacaagtgctgcagccaaaaatgaaaagaatggaacagatgaattagataatatgaacagtacagagagaatctcatttctccaagaaaaactacaggaaatcagaaaatattatatgtctttgaagtctgaagttgcaaccatagacaggaggagaaaaagattaaaaaagaaagacagggaagtgtctcatgcgggagcctccatgtcatctgcttcatcagacactggaatgagtccctcatcatcatctcccccacaaaatgtacttgctgtagaatgcaggtgataaacattttctctaccttcccagcagtttgctgccatggacataaatccccaaaccctgaattacaaccacagaaagcactcaactggtttgacattgctaagtatatcctgtatacttttccaggctggattgtatctattcccctctctcttcttttttcttgttgcaaaaaataagctgattaataagtgaaggttaagcagcctgccatatttgtcataatttttcctctttacttttgtttttcgtttgttgtgatatagaacaaagggcacttagcaaatttgaatttgtataataaagctttcaggtgttacagaaatcgtagacaagcaagtgcacatgataaacatcaaaatattacccagctgaatagttactgctgcactttcactaagatgtatttgaacacttggtgagtagggggtttatgttgtgttttttttcattatcgttttttttatttttgtggaagcacttgctatttagaactgccaaagtatatgttcagcagtgtgcccaggattgaaggtgtaaatgggacaaaataaattgtgaaaggaagtgtagttgactgaaaactacagttgtaataagtcttccactttttataggatttttgagcacaaaattatgcaaatattttaatgtttattaatgtttacagtggaattgtgaataagttttcagtggactatcttatcccttgacaaaaatattttgtcttttttctatgtaatttcagagtttttattttgttacaaaaagacaaaaatgaaatatataacaacaatgaagttatttaacaagatttctaaagctgaaatttttgtgtaaaataaggtattatcttgcaacttgttaaatatatttattcagacattggatgttgtatttttatgtattttttaaaatattaataaaatttaaaaaaagaaaattctaggttaattcactctttggatgacaatagctctcagctgtcctttttacaggaggttgcatcctgcagccttgcctgtgttaaagggagtctgtctcagtccatcaaacagtatagaactataaatgggcatctggatcattaaagtatgtccttgtttagaaactttggcagtcctagtatttaaactgttttgaggatcaaatttttggttgcccttaagatactttgtcacagtttttatgtttgctatactgccgaatgaatttatatctcccaaagttgagatgcaacaactaagtaaagcaactatgtatgctttgtctgtgaattgttccacagactgatagattttgtaaataattcttccaaaatcatgtatttaaagcagttttgcatatacattatgtaaaaaggtgattttataaaagcagtttttaaattcatgtttgtacattgaaaggggttttttttttaaacctccttttctgtgtttaatatgctgtagaataataacctagatgctctagactgtatatcaggatctgatttacaagaaaaagtcagagctaaacactagtgatggcatagcattactgaaatcattgtttcttaatttcattttactacattgtgaacttgtgattcagattccattttctcagagaattaaaaacaaaaaaagtactcttgtaaaatgcacttttctgtcttttctttgcaaagcagaagtatctcaatgtaaaataaaaatggagctcagtgggcagtattaataaaggccatgttttaaac

SEQ ID NO: 213794 - DNA, 582 bp, Artificial Sequence
  derived and/or modified sequence
ggcgccgtgacactccgctgccgccaccgcgggcccggggcgggccgagggggccgagcggcggaggcggggcgcgggccgaagtcggggtatccgggggaccgcggagcggaggctcggcggtcgtctccgcgggggacctggggaagcccgaagggagctctggccttttccggagctatctgtcctggagctccgagttgagcattccgggtcaaagtggccagcgaggcgggggcgcggtgggccgctggcgagctccggggcggaacgggctgccctttggcgctcgtggggttctcgctgccccctcagctcctgcgtcctggctgccctcgtaaggggtcttgtcccttggctgttctagcgactgcgaagatagctcgctgagctggaaccccacagatcaccaacaaaaatgaaggcggcagatgagcctgcctacctgacagtgggaaccgatgtcagtgccaagtaccgaggtgccttctgtgaggcaaagattaagactgtgaaaaggctggtgaaagttaaggtactcctgaaacaggataataccacacaattggtacaagatgacca

SEQ ID NO: 213795 - DNA, 5783 bp, Artificial Sequence
  derived and/or modified sequence
attccgggtcaaagtggccagcgaggcgggggcgcggtgggccgctggcgagctccggggcggaacgggctgccctttggcgctcgtggggttctcgctgccccctcagctcctgcgtcctggctgccctcgtaaggggtcttgtcccttggctggtgaggattctgcccctccccgctggcgtttgtttactttctttcccttggtcgctccccgcagttgactgattatgtctgtgcctgtctttccccctccccatagttctagcgactgcgaagatagctcgctgagctggaaccccacagatcaccaacaaaaatgaaggcggcagatgagcctgcctacctgacagtgggaaccgatgtcagtgccaagtaccgaggtgccttctgtgaggcaaagattaagactgtgaaaaggctggtgaaagttaaggtactcctgaaacaggataataccacacaattggtacaagatgaccaagtaaagggtcctttaagagttggagctattgttgaaacaaggacatctgatggatcttttcaggaagctattatcagcaagttgacagatgctagttggtataccgtggtgtttgatgatggtgatgagcgaacattgagacgtacctcactttgtctgaaaggagagagacattttgcagagagtgagacacttgaccagcttccattaacaaatccagagcattttggaactccagtaattgcaaagaagacgaacagaggaaggagatcttctcttcctgttactgaagatgaaaaggaagaagaaagcagtgaagaggaagatgaagacaagcgccgtctcaatgatgaattactaggaaaagttgtaagtgtggtgtctgcaacggagaggactgaatggtatcctgctttggtaatatctcccagctgtaatgatgacatcacagtgaaaaaggatcagtgtttagttcgatcatttattgattctaaattttactctatagcaagaaaggacattaaggaagtagacattctcaatctaccggaatctgagctctccactaaaccagggcttcagaaagcaagcatcttcttaaaaactagagttgttcctgataattggaaaatggatataagtgaaatccttgagtcatccagtagtgatgatgaagatggcccagctgaagaaaatgatgaagagaaggaaaaggaggccaaaaagacagaagaagaggtgcctgaggaagaacttgatcctgaagagagggacaacttcctccagcagctttataagtttatggaagacagaggtactccaatcaacaaaccacctgttttgggctataaagatctcaatctcttcaaactcttcagactggtttatcatcagggtggatgtgacaatattgatagtggtgctgtatggaagcaaatttatatggaccttggcattcctattttgaattcagctgcttcctacaatgtaaaaactgcttatagaaagtatctctatggttttgaggagtactgccgttcggcaaatattcagttcagaactgttcatcaccatgaaccaaaagtaaaagaggaaaaaaaagacttagaagaatcaatggaagaggctctcaaattagatcaagaaatgcctttaacagaagtgaagagtgaacctgaggaaaatatcgattcaaacagtgaaagtgaaagagaagagatagaattaaaatctccgaggggacgaaggagaattgctcgagatgtaaattctattaaaaaggaaattgaagaagagaaaacagaagacaaattaaaagataatgatacagaaaataaggatgtagatgatgactatgaaactgcagagaaaaaagaaaatgagctactactggggagaaaaaatacaccaaagcaaaaagagaagaaaattaaaaaacaggaggattctgacaaagactcagatgaagaggaagagaaaagccaagagagggaagaaactgaaagcaaatgtgactctgaaggagaggaagatgaggaagacatggaaccctgcctaacaggaaccaaagtgaaagtaaaatatggacgagggaagactcagaaaatttatgaagccagtattaaaagcactgaaattgatgacggagaagttttatatttggtacattactatggatggaatgtcaggtatgatgagtgggtgaaggctgacaggataatctggcctttggacaaaggtggaccaaagaaaaaacagaagaaaaaagctaaaaataaagaagatagtgaaaaggacgaaaagagagatgaggagaggcagaagtcaaaacggggacgacctcctttaaaatcaaccctctcatcaaacatgccgtatggcttatctaagacagcaaacagtgaaggaaaatcagactcttgttcatctgatagtgaaacagaagatgctttagaaaagaatttaataaatgaagaactttctcttaaagatgaactagaaaaaaatgaaaatttgaatgatgataagctagatgaagaaaatccaaagatttctgcacatatattaaaagaaaatgataggactcaaatgcagcctttagaaaccctgaagttagaagttggagagaatgaacaaatagtacagatttttgggaacaaaatggaaaaaacagaagaagttaagaaagaagccgaaaaatctccaaaaggaaagggaagacgaagcaagacaaaagatctttctttagaaattataaagatttcatcatttggccagaatgaagcaggaagtgaacctcatatagaagctcatagtcttgaattgtcttcattagacaataaaaacttttcttctgctacagaagatgaaattgaccaatgtgtgaaagaaaagaagttgaaacggaaaatactaggacaatcatcgccagagaaaaaaataagaattgagaatggaatggaaatgacaaatactgtatctcaagaaaggaccagtgattgtattggatctgagggaatgaaaaacttaaattttgaacagcactttgaaagagaaaatgaaggaatgccatcattgatagcagagtcaaaccaatgcatccaacaactgactagtgaaagatttgatagtccagctgaagaaactgtaaatattccactaaaagaagatgaggatgcaatgcctctgatcgggcctgaaaccttggtttgccatgaagtagatttggatgatttggatgaaaaggataagaccagcattgaggatgtagcagttgaaagctctgagtctaactctcttgtttctattccacctgccctacctcctgtagtccaacataacttttcagtagcttcaccacttactcttagtcaagatgagtctcgaagcgtaaaaagtgagagtgatataacgattgaagttgatagtattgctgaagaatctcaagaaggtctctgtgagagggaatcggcaaatggatttgaaactaatgttgcctctggtacctgtagtataattgtacaagagagagagagcagagagaagggtcagaagaggccaagtgatggaaatagtggattaatggcaaaaaagcaaaagcgtaccccaaagcgaacaagtgctgcagccaaaaatgaaaagaatggaacagatgaattagataatatgaacagtacagagagaatctcatttctccaagaaaaactacaggaaatcagaaaatattatatgtctttgaagtctgaagttgcaaccatagacaggaggagaaaaagattaaaaaagaaagacagggaagtgtctcatgcgggagcctccatgtcatctgcttcatcagacactggaatgagtccctcatcatcatctcccccacaaaatgtacttgctgtagaatgcaggtgataaacattttctctaccttcccagcagtttgctgccatggacataaatccccaaaccctgaattacaaccacagaaagcactcaactggtttgacattgctaagtatatcctgtatacttttccaggctggattgtatctattcccctctctcttcttttttcttgttgcaaaaaataagctgattaataagtgaaggttaagcagcctgccatatttgtcataatttttcctctttacttttgtttttcgtttgttgtgatatagaacaaagggcacttagcaaatttgaatttgtataataaagctttcaggtgttacagaaatcgtagacaagcaagtgcacatgataaacatcaaaatattacccagctgaatagttactgctgcactttcactaagatgtatttgaacacttggtgagtagggggtttatgttgtgttttttttcattatcgttttttttatttttgtggaagcacttgctatttagaactgccaaagtatatgttcagcagtgtgcccaggattgaaggtgtaaatgggacaaaataaattgtgaaaggaagtgtagttgactgaaaactacagttgtaataagtcttccactttttataggatttttgagcacaaaattatgcaaatattttaatgtttattaatgtttacagtggaattgtgaataagttttcagtggactatcttatcccttgacaaaaatattttgtcttttttctatgtaatttcagagtttttattttgttacaaaaagacaaaaatgaaatatataacaacaatgaagttatttaacaagatttctaaagctgaaatttttgtgtaaaataaggtattatcttgcaacttgttaaatatatttattcagacattggatgttgtatttttatgtattttttaaaatattaataaaatttaaaaaaagaaaattctaggttaattcactctttggatgacaatagctctcagctgtcctttttacaggaggttgcatcctgcagccttgcctgtgttaaagggagtctgtctcagtccatcaaacagtatagaactataaatgggcatctggatcattaaagtatgtccttgtttagaaactttggcagtcctagtatttaaactgttttgaggatcaaatttttggttgcccttaagatactttgtcacagtttttatgtttgctatactgccgaatgaatttatatctcccaaagttgagatgcaacaactaagtaaagcaactatgtatgctttgtctgtgaattgttccacagactgatagattttgtaaataattcttccaaaatcatgtatttaaagcagttttgcatatacattatgtaaaaaggtgattttataaaagcagtttttaaattcatgtttgtacattgaaaggggttttttttttaaacctccttttctgtgtttaatatgctgtagaataataacctagatgctctagactgtatatcaggatctgatttacaagaaaaagtcagagctaaacactagtgatggcatagcattactgaaatcattgtttcttaatttcattttactacattgtgaacttgtgattcagattccattttctcagagaattaaaaacaaaaaaagtactcttgtaaaatgcacttttctgtcttttctttgcaaagcagaagtatctcaatgtaaaataaaaatggagctcagtgggcagtattaataaaggccatgttttaaacataggctttatacttttagttttcatttaagtgattgcttttttcctaagtgcttgtaacttacagttggaaaatcagatttcacaaaaccaagcattttagtatattcagcctttacaataaaatatttctactaattataaaaatgaaaaaaaaa

SEQ ID NO: 213796 - DNA, 3567 bp, Artificial Sequence
  derived and/or modified sequence
atgaaggccgccgacgagcccgcctacctgaccgtgggcaccgacgtgagcgccaagtacagaggcgccttctgcgaggccaagatcaagaccgtgaagagactggtgaaggtgaaggtgctgctgaagcaggacaacaccacccagctggtgcaggacgaccaggtgaagggccccctgagagtgggcgccatcgtggagaccagaaccagcgacggcagcttccaggaggccatcatcagcaagctgaccgacgccagctggtacaccgtggtgttcgacgacggcgacgagagaaccctgagaagaaccagcctgtgcctgaagggcgagagacacttcgccgagagcgagaccctggaccagctgcccctgaccaaccccgagcacttcggcacccccgtgatcgccaagaagaccaacagaggcagaagaagcagcctgcccgtgaccgaggacgagaaggaggaggagagcagcgaggaggaggacgaggacaagagaagactgaacgacgagctgctgggcaaggtggtgagcgtggtgagcgccaccgagagaaccgagtggtaccccgccctggtgatcagccccagctgcaacgacgacatcaccgtgaagaaggaccagtgcctggtgagaagcttcatcgacagcaagttctacagcatcgccagaaaggacatcaaggaggtggacatcctgaacctgcccgagagcgagctgagcaccaagcccggcctgcagaaggccagcatcttcctgaagaccagagtggtgcccgacaactggaagatggacatcagcgagatcctggagagcagcagcagcgacgacgaggacggccccgccgaggagaacgacgaggagaaggagaaggaggccaagaagaccgaggaggaggtgcccgaggaggagctggaccccgaggagagagacaacttcctgcagcagctgtacaagttcatggaggacagaggcacccccatcaacaagccccccgtgctgggctacaaggacctgaacctgttcaagctgttcagactggtgtaccaccagggcggctgcgacaacatcgacagcggcgccgtgtggaagcagatctacatggacctgggcatccccatcctgaacagcgccgccagctacaacgtgaagaccgcctacagaaagtacctgtacggcttcgaggagtactgcagaagcgccaacatccagttcagaaccgtgcaccaccacgagcccaaggtgaaggaggagaagaaggacctggaggagagcatggaggaggccctgaagctggaccaggagatgcccctgaccgaggtgaagagcgagcccgaggagaacatcgacagcaacagcgagagcgagagagaggagatcgagctgaagagccccagaggcagaagaagaatcgccagagacgtgaacagcatcaagaaggagatcgaggaggagaagaccgaggacaagctgaaggacaacgacaccgagaacaaggacgtggacgacgactacgagaccgccgagaagaaggagaacgagctgctgctgggcagaaagaacacccccaagcagaaggagaagaagatcaagaagcaggaggacagcgacaaggacagcgacgaggaggaggagaagagccaggagagagaggagaccgagagcaagtgcgacagcgagggcgaggaggacgaggaggacatggagccctgcctgaccggcaccaaggtgaaggtgaagtacggcagaggcaagacccagaagatctacgaggccagcatcaagagcaccgagatcgacgacggcgaggtgctgtacctggtgcactactacggctggaacgtgagatacgacgagtgggtgaaggccgacagaatcatctggcccctggacaagggcggccccaagaagaagcagaagaagaaggccaagaacaaggaggacagcgagaaggacgagaagagagacgaggagagacagaagagcaagagaggcagaccccccctgaagagcaccctgagcagcaacatgccctacggcctgagcaagaccgccaacagcgagggcaagagcgacagctgcagcagcgacagcgagaccgaggacgccctggagaagaacctgatcaacgaggagctgagcctgaaggacgagctggagaagaacgagaacctgaacgacgacaagctggacgaggagaaccccaagatcagcgcccacatcctgaaggagaacgacagaacccagatgcagcccctggagaccctgaagctggaggtgggcgagaacgagcagatcgtgcagatcttcggcaacaagatggagaagaccgaggaggtgaagaaggaggccgagaagagccccaagggcaagggcagaagaagcaagaccaaggacctgagcctggagatcatcaagatcagcagcttcggccagaacgaggccggcagcgagccccacatcgaggcccacagcctggagctgagcagcctggacaacaagaacttcagcagcgccaccgaggacgagatcgaccagtgcgtgaaggagaagaagctgaagagaaagatcctgggccagagcagccccgagaagaagatcagaatcgagaacggcatggagatgaccaacaccgtgagccaggagagaaccagcgactgcatcggcagcgagggcatgaagaacctgaacttcgagcagcacttcgagagagagaacgagggcatgcccagcctgatcgccgagagcaaccagtgcatccagcagctgaccagcgagagattcgacagccccgccgaggagaccgtgaacatccccctgaaggaggacgaggacgccatgcccctgatcggccccgagaccctggtgtgccacgaggtggacctggacgacctggacgagaaggacaagaccagcatcgaggacgtggccgtggagagcagcgagagcaacagcctggtgagcatcccccccgccctgccccccgtggtgcagcacaacttcagcgtggccagccccctgaccctgagccaggacgagagcagaagcgtgaagagcgagagcgacatcaccatcgaggtggacagcatcgccgaggagagccaggagggcctgtgcgagagagagagcgccaacggcttcgagaccaacgtggccagcggcacctgcagcatcatcgtgcaggagagagagagcagagagaagggccagaagagacccagcgacggcaacagcggcctgatggccaagaagcagaagagaacccccaagagaaccagcgccgccgccaagaacgagaagaacggcaccgacgagctggacaacatgaacagcaccgagagaatcagcttcctgcaggagaagctgcaggagatcagaaagtactacatgagcctgaagagcgaggtggccaccatcgacagaagaagaaagagactgaagaagaaggacagagaggtgagccacgccggcgccagcatgagcagcgccagcagcgacaccggcatgagccccagcagcagcagccccccccagaacgtgctggccgtggagtgcagatag

SEQ ID NO: 213797 - DNA, 165 bp, Artificial Sequence
  derived and/or modified sequence
atgaaggccgccgacgagcccgcctacctgaccgtgggcaccgacgtgagcgccaagtacagaggcgccttctgcgaggccaagatcaagaccgtgaagagactggtgaaggtgaaggtgctgctgaagcaggacaacaccacccagctggtgcaggacgactag

SEQ ID NO: 213798 - protein, 402 aa, Artificial Sequence
  derived and/or modified sequence
MVCARAALGPGALWAAAWGVLLLTAPAGAQRGRKKVVHVLEGESGSVVVQTAPGQVVSHRGGTIVLPCRYHYEAAAHGHDGVRLKWTKVVDPLAFTDVFVALGPQHRAFGSYRGRAELQGDGPGDASLVLRNVTLQDYGRYECEVTNELEDDAGMVKLDLEGVVFPYHPRGGRYKLTFAEAQRACAEQDGILASAEQLHAAWRDGLDWCNAGWLRDGSVQYPVNRPREPCGGLGGTGSAGGGGDANGGLRNYGYRHNAEERYDAFCFTSNLPGRVFFLKPLRPVPFSGAARACAARGAAVAKVGQLFAAWKLQLLDRCTAGWLADGSARYPIVNPRARCGGRRPGVRSLGFPDATRRLFGVYCYRAPGAPDPAPGGWGWGWAGGGGWAGGARDPAAWTPLHV

SEQ ID NO: 213799 - DNA, 1209 bp, Artificial Sequence
  derived and/or modified sequence
atggtttgcgccagagctgccctggggccaggagcgctttgggctgcggcatggggcgtgctgctgcttactgcccctgcgggtgcccaaagaggcagaaagaaggtcgtgcatgtgctggaaggtgaaagcggctccgtcgtcgtgcaaactgcaccgggtcaagtggtgagccaccggggtggtacaattgtgcttccctgccggtatcactacgaagcggcagcgcacgggcacgatggcgtgcgcttaaaatggacgaaagtcgtggatccactggcattcactgacgttttcgtggctctcggtccacaacaccgcgcttttggtagttaccggggacgcgcagaactgcagggagacggcccaggtgatgctagcctggttctccgtaatgttaccctccaggattacggacgttatgagtgtgaagttacaaatgagctcgaggacgatgcgggtatggtgaaactggatttggagggtgtggtttttccttaccatccccgaggcggacggtataaactcactttcgcggaggcccaacgcgcttgcgctgagcaagatgggattctcgcatcagctgagcaactccacgctgcttggagggatggtttggactggtgcaacgccggttggttgcgggacggttctgtgcagtacccggtgaatcgccctcgggagccctgcggcggacttgggggtaccgggtccgctggtggaggtggagacgccaatgggggactccgaaattacgggtatcggcacaatgcggaggaaaggtatgacgcattctgttttacgtctaacctaccgggaagagtgttttttcttaagcctctcaggcctgttcctttctccggggcagctcgcgcttgcgccgctcgcggagctgccgtggccaaagtcggccaattgttcgccgcatggaaacttcaactgctggaccgctgcacagcaggttggctcgctgacggaagcgcacggtaccccattgtgaatcctcgggctaggtgcggtgggcgtagacccggagtccgctcactgggatttccagacgccacacggcgtttgttcggagtttactgttaccgagccccaggcgcaccggacccagccccaggtgggtggggatgggggtgggctggaggcggagggtgggccggtggcgctagagatccagctgcatggacccccctacacgtatag

SEQ ID NO: 213800 - DNA, 1209 bp, Artificial Sequence
  derived and/or modified sequence
atggtttgtgcgcgtgccgctttaggaccgggtgctctatgggcagccgcttggggcgtgctgctgctgactgccccagccggcgcccaacgaggaaggaaaaaggtggtacacgttttggaaggagagagtgggagcgtggtggttcagaccgcccccggacaggtggtgagtcaccgcggcgggaccatcgtgttgccttgccggtatcattatgaggccgccgcacacggacatgatggggtgcgcttgaagtggacaaaagtggtggatccactggcattcactgatgttttcgtggccctaggaccccaacatcgcgcatttgggtcataccgagggagagccgaattacagggggacgggcccggcgacgccagcctggtgctgcgaaacgtaaccctccaggattacggcaggtatgagtgtgaagtgactaacgaactggaggatgacgccggaatggtcaagctcgatctggaaggtgtcgtctttccatatcacccgaggggcggaaggtacaaactgacattcgctgaagcacaaagggcatgtgccgaacaggatgggattttagcatccgccgagcagttgcacgcagcctggcgcgatggactcgactggtgcaacgccggctggcttcgggatggctccgtgcaatatccagtgaatcggcctcgtgaaccttgtggagggctgggcgggaccggatctgccggcgggggcggagatgccaacggcggcctgcgcaactacggatataggcacaatgcggaggagcggtatgatgcattttgttttacttccaacctccctggaagggtgtttttcctgaagcctctgcgccccgtccctttttcaggcgccgcgagagcttgcgcagcacgtggagcagctgtggcaaaggtgggccagttgtttgccgcctggaaattacaactgctagaccggtgcaccgccggctggctggctgacggcagcgctcgctaccctattgtgaaccctcgggcccgttgtgggggacggagacccggagtgagatccctcggattcccagacgcaaccagaagattatttggtgtgtactgctacagagctcctggggcgcccgaccccgctcccggcggatggggctggggttgggctggaggtgggggatgggcagggggagcccgggatcctgccgcttggactccactccatgtttag

SEQ ID NO: 213801 - DNA, 1209 bp, Artificial Sequence
  derived and/or modified sequence
atggtgtgcgctcgggccgctcttggccccggagcattatgggcagcagcttggggtgtcctgctcttgacagctccagcgggggctcagcgggggagaaaaaaagtggtgcacgtgctggaaggcgagtccgggtctgttgtagtgcagacagcccctggccaggtcgtctcacataggggagggaccatcgtactgccttgtcgatatcactacgaagcggctgcacatgggcacgacggggtgagattgaaatggaccaaggtggttgaccccctggcatttacggacgtgttcgtcgccctaggaccccagcaccgcgcatttggcagttacagggggcgggccgagcttcagggagatggaccaggcgacgcctccctcgtgcttcgaaatgtgactctgcaggattatggccgctatgaatgcgaggtgaccaatgagctcgaagacgacgcagggatggttaagttggacctcgaaggcgtcgtattcccttaccaccctagaggagggcgatataagttgacattcgctgaggcacagagagcatgtgcagaacaggatgggatactggcaagcgcagagcagctccatgctgcgtggagggatgggcttgactggtgcaacgcaggctggttaagagatggctccgtgcagtatcctgttaatcgtcccagagagccctgtggaggtctgggaggtactggaagcgctggtgggggaggtgacgctaacggcggcttacgcaactatggctatagacataacgcggaggaacgctatgatgcattctgctttacttcaaacctgcccgggagggtgtttttcttgaagcctctgcgaccagttccttttagtggggccgctcgcgcttgcgctgctcgcggtgccgctgtagccaaagtgggccagctttttgccgcatggaagctacaattactggaccgctgcacagcaggatggctcgcggacggtagtgctcggtatccgatagtgaatcctcgcgccagatgcggtggcagacgccccggcgtccgaagtctcggattccctgatgccacacgtcggctttttggggtgtattgttatagggcccctggtgcacctgatcctgcccctggagggtggggatggggctgggctggtggtggcggatgggctggtggagcgcgtgacccagccgcgtggacccctctgcacgtgtag

SEQ ID NO: 213802 - DNA, 3434 bp, Artificial Sequence
  derived and/or modified sequence
cggggagcgcagtccgggtgcgtaggggccgctcggcgggggccgcgcgggcaagatggtgtgcgctcgggcggccctcggtcccggcgcgctctgggccgcggcctggggcgtcctgctgctcacagcccctgcgggggcgcagcgtggccggaagaaggtcgtgcacgtgctggagggtgagtcgggctcggtagtggtacagacagcgcctgggcaggtggtaagccaccgtggtggcaccatcgtcttgccctgccgctaccactatgaggcagccgcccacggtcacgacggcgtccggctcaagtggacaaaggtggtggacccgctggccttcaccgacgtcttcgtggcactaggcccccagcaccgggcattcggcagctaccgtgggcgggctgagctgcagggcgacgggcctggggatgcctccctggtcctccgcaacgtcacgctgcaagactacgggcgctatgagtgcgaagtcaccaatgagctggaagatgacgctggcatggtcaagctggacctggaaggcgtggtctttccctaccacccccgtggaggccgatacaagctgaccttcgcggaggcgcagcgcgcgtgcgccgagcaggacggcatcctggcatctgcagaacagctgcacgcggcctggcgcgacggcctggactggtgcaacgcgggctggttgcgcgacggctcagtgcaataccccgtgaaccggccccgggagccctgcggcggcctgggggggaccgggagtgcagggggcggcggtgatgccaacgggggcctgcgcaactacgggtatcgccataacgccgaggaacgctacgacgccttctgcttcacgtccaacctgccggggcgcgtgttcttcctgaagccgctgcgacctgtacccttctccggagctgcgcgcgcgtgtgctgcgcgtggcgcggccgtggccaaggtggggcagctgttcgccgcgtggaagctgcagctgctagaccgctgcaccgcgggttggctggccgatggcagtgcgcgctaccccatcgtgaacccgcgagcgcgctgcggaggccgcaggcctggtgtgcgcagcctcggcttcccggacgccacccgacggctcttcggcgtctactgctaccgcgctccaggagcaccggacccggcacctggcggctggggctggggctgggcgggcggcggcggctgggcagggggcgcgcgcgatcctgctgcctggacccctctgcacgtctaggctgggagtaggcggacagccagggcgcttgaccactggtctagagccctgtggtcccctggagcctggccacgcccttgaagccctggacactggccacattccctgtggtcccttacaaactaactgtgcccctggggtccctgaagactggctagtcctggcagaacagtactttggagttccctggagcctggccagccctcacctcttctggatagaggattcccccaactccccaactttctccatgagggtcacgccccctgaggacctcaggaggccagcagaacccgcaggctcctgaagactggccacgcctcctgagaccacttggaaacagaccaactgcccccgtggtcgcctggtggctggacccccgggattgactagagaccggccgtacaccttctgcatctcactggagactgaacactagtcccttgcggtcacgtgggacactgggcgcctcctcctccccctcctcctcacctggagagactacaggaacttcagggtcactccccgtggtcacatggaggttgtgggccgaggcgcttattttcccttatggtgacctgagtcctggagactcccattctccccctctccctgagagtcccctgcagtttctgggtaacagggcacacccctctagtttcatgggcgagcacccccatctgccacctcagactgacacacagccagctggctcacttactgggggccacgtcccacccctcagatatttctttgaagggagagcaaacccaccctgtcctctgacgtccctttcccaactgtcaccaaacagaccatcttcccaggcctggggaccggtaagatccatgtcactagttatgcagagcagttgccttgggtcccactgtcaccaaggcaaccagtcctgctgctacctgtcacctagagtcacacaccccttccctcatcaggcacacccatgaagacagtgcctccctcctccagctgtaaccatggataccacacatttctcatctcattggcccccaccccagagacctccacctcaacttctggctgtccctaccctgactcaccgccatggagatcaccctccccgaagctgtcgccagggtgacccaacatccagttctccggctctcaccatggaaacaaactgtccctgtccccaggcccactccagttccagaccaccctccatgctccacccccaggcggtttggaccccaccactgttgccatggtgaccaaactctggagtccgaggtaacagaacacctgtccccctaggcttttccttgtggacaacggggccctgttcaccaagctgttgccatagagactgtcaacgttgtcctcatgacaaccagacttccagttctcaggaacttctcattgtgggccagaagtcctgggtgcctcctactagggctaccctactgcaccccatcaggggcctgatggctgccccttccccagacagggctggacttctggagctgctaagccaccctccgtttgcacgttaactctatgccggatagcagctgtgcacgagacaatcttgcaacacccgggcatgtttgtcgtcgtcctacaaatgaggaaaccgagcctatggcgtgccctggtctgttgagatatgcaagcactgagctcctcttttgtcctctgagaccccatctccattctcacccagttcctctctccttccctgacccccacccacatttccctccttagagatccaggagggatggaatgttctttaaaattcaacacccaccaggctctaagcggcgatctgtgctaagaggtcaggacccagccgaagtcctcggcgttgacaggcagctggggggacatgatccatggacaaggccatcccggccgtgggagaccccagtcccgaagtcttgcctgcaggagtactggggtccccctggggccctctttactgtcacgtcatctctaggaaacctatctctgagttttgggaccaggtcggtttgggtttgaattctgcctcttcttgctcactgtgtgaccaagtgacaaactccttctgaacctgtgttctcccactgtaccagggctgttctgtggtccccgtgagtgccaagcatacagtaggggctcaataaatccttgtttcttttgatgaatg

SEQ ID NO: 213803 - DNA, 1209 bp, Artificial Sequence
  derived and/or modified sequence
atggtgtgcgccagagccgccctgggccccggcgccctgtgggccgccgcctggggcgtgctgctgctgaccgcccccgccggcgcccagagaggcagaaagaaggtggtgcacgtgctggagggcgagagcggcagcgtggtggtgcagaccgcccccggccaggtggtgagccacagaggcggcaccatcgtgctgccctgcagataccactacgaggccgccgcccacggccacgacggcgtgagactgaagtggaccaaggtggtggaccccctggccttcaccgacgtgttcgtggccctgggcccccagcacagagccttcggcagctacagaggcagagccgagctgcagggcgacggccccggcgacgccagcctggtgctgagaaacgtgaccctgcaggactacggcagatacgagtgcgaggtgaccaacgagctggaggacgacgccggcatggtgaagctggacctggagggcgtggtgttcccctaccaccccagaggcggcagatacaagctgaccttcgccgaggcccagagagcctgcgccgagcaggacggcatcctggccagcgccgagcagctgcacgccgcctggagagacggcctggactggtgcaacgccggctggctgagagacggcagcgtgcagtaccccgtgaacagacccagagagccctgcggcggcctgggcggcaccggcagcgccggcggcggcggcgacgccaacggcggcctgagaaactacggctacagacacaacgccgaggagagatacgacgccttctgcttcaccagcaacctgcccggcagagtgttcttcctgaagcccctgagacccgtgcccttcagcggcgccgccagagcctgcgccgccagaggcgccgccgtggccaaggtgggccagctgttcgccgcctggaagctgcagctgctggacagatgcaccgccggctggctggccgacggcagcgccagataccccatcgtgaaccccagagccagatgcggcggcagaagacccggcgtgagaagcctgggcttccccgacgccaccagaagactgttcggcgtgtactgctacagagcccccggcgcccccgaccccgcccccggcggctggggctggggctgggccggcggcggcggctgggccggcggcgccagagaccccgccgcctggacccccctgcacgtgtag

SEQ ID NO: 213804 - DNA, 1209 bp, Artificial Sequence
  derived and/or modified sequence
atggtatgtgcaagggccgcattgggccccggtgcactgtgggcagccgcctggggggtcctgctgttgactgcaccagccggagcccaacgtggccgtaaaaaagtggtccacgtgctggaaggggagagcgggtctgtggtcgttcagaccgcccccggacaggtcgtctcacatcgcgggggcacaattgtgctgccttgtcgataccattacgaggccgcagctcacgggcacgatggcgtgcgtcttaagtggaccaaagtggtggaccctctggcctttacagacgttttcgttgcgctgggaccccagcaccgagcgtttggtagttaccgcggccgcgctgaactacagggagatggacctggggatgcctcactggtgctgcggaacgtcaccttacaggactatggacgatatgagtgtgaggtcacaaacgagctggaggatgatgcagggatggtgaaacttgacctggaaggcgtggtttttccctaccaccctcgaggtggcagatacaaactgacttttgctgaagcccaaagagcctgtgccgaacaagacggaatccttgcgtctgctgagcagttgcacgcagcgtggcgagatggcctggattggtgtaacgcaggctggctgcgagatggaagtgttcagtaccctgtcaatcggcccagagagccttgcggtggtttggggggaacaggctctgccggaggcggcggcgacgctaacggcggcctgcgaaattatgggtatcggcacaacgctgaggagaggtatgatgcattttgctttacatcaaaccttccggggagagtcttcttcctgaaacccctgaggcctgtgccgtttagtggagcagcaagggcttgtgcggcccgcggagccgctgtcgctaaagtgggtcagctcttcgcagcttggaaacttcagttgctggatcggtgcaccgcgggatggttggccgacggctccgcccgctatcccatcgtgaatccccgggcccgctgcggcggaagacgccctggagttaggtccttgggatttcctgacgctacgagaagactttttggagtgtactgttaccgagccccaggagcgcctgacccagctcccgggggctggggatgggggtgggccggcggtggaggctgggccggcggcgccagagaccccgcagcgtggacaccgctgcacgtgtag

SEQ ID NO: 213805 - DNA, 1209 bp, Artificial Sequence
  derived and/or modified sequence
atggtgtgtgcccgggccgccctgggccctggggccctgtgggccgccgcctggggcgtgctgctgctgacagccccagctggggcccagaggggcaggaagaaggtggtgcacgtgctggagggggagagcggctctgtggtggtgcagacagcccctggccaggtggtgagccacagaggaggcaccatcgtgctgccctgccgctaccactatgaggccgccgcccacggccatgatggagtgcggctgaagtggaccaaggtggtggaccccctggccttcacagatgtgtttgtggccctgggcccccagcaccgggccttcggcagctaccggggccgggcagagctgcagggagatggccctggagatgccagcctggtgctgagaaatgtgaccctgcaggactatggccgctatgaatgtgaggtgaccaatgagctggaggatgatgctggcatggtgaagctggacctggagggcgtggtgttcccctaccacccccggggcggccgctacaagctgacctttgctgaggcccagagggcctgtgccgagcaggacggcatcctggccagcgctgagcagctgcacgccgcctggagagatggcctggactggtgcaatgccggctggctgagagatggctctgtgcagtaccctgtgaaccggccccgggagccctgtggcggcctgggcggcaccggcagcgctgggggcggcggagatgccaacggcggcctgaggaactacggctaccgccacaatgctgaggagagatatgatgccttctgcttcaccagcaacctgcccggccgggtcttcttcctgaagcccctgcggcctgtgcccttctctggagctgcccgggcctgtgccgcccggggagctgctgtggccaaggtgggccagctgtttgctgcctggaagctgcagctgctggaccgctgcacagctggctggctggctgatggcagcgcccgctaccccatcgtgaacccccgggcccgctgtggcggccggcggcctggggtgcgcagcctgggcttcccagatgccacccggcggctgtttggagtgtactgctaccgggcccctggggccccagaccctgcccctgggggctggggctggggctgggccggcggcggcggctgggccggcggggcccgggaccctgctgcctggacccccctgcacgtgtag

SEQ ID NO: 213806 - DNA, 1209 bp, Artificial Sequence
  derived and/or modified sequence
atggtgtgcgcccgggccgccctgggccccggcgccctgtgggccgccgcttggggcgtcctcttgttgaccgcaccagccggcgcacagcgcggtcgcaaaaaagtggtgcacgtgctcgagggagagtcgggatcagtcgtcgtgcaaactgcccccggtcaggttgtgtcacaccgaggtggcactattgtacttccgtgcagataccactatgaggccgctgctcacggccatgacggggtgaggttaaaatggaccaaggtggtcgacccactcgcctttactgatgtctttgtggccttaggcccacaacatagagcctttggctcatacagaggacgggcagagttgcaaggagacgggccaggcgacgcaagtctagtgctccgaaatgtgactctccaagattacggccgttatgaatgcgaagtcacaaacgagctggaggacgacgccggcatggtgaagttggatctggaaggggtggtgttcccatatcatccgagaggagggcgatataagcttacctttgcagaggctcagcgggcatgcgccgagcaggatggtatccttgcgtctgccgaacagctgcacgcagcctggagagatggcctggactggtgcaatgccggatggcttcgggacggctcagtccaataccctgttaacaggcccagagagccatgcggtggtctaggaggaaccgggagcgccggcggcggcggcgacgcgaacggtggactgcggaactatggctatcggcataatgctgaggaacggtatgacgctttctgctttacctcaaacctccccggacgagtcttcttcctgaagcccttacgacctgtcccttttagcggagctgcaagagcctgtgcagcgcgcggcgctgccgtcgctaaagttggccagctgttcgcggcttggaagctccagttactggaccgctgtactgcaggatggttagccgacggcagcgctcgatacccaattgtgaaccctcgtgctaggtgtggcggtcgccggcctggtgtgcggagtttaggattcccagacgccacacggcgcctatttggtgtgtattgttatcgagctcccggtgcgcccgatcctgcaccaggcggatggggctggggatgggccggggggggagggtgggcaggtggggctcgcgaccctgctgcttggacccccctccacgtgtag

SEQ ID NO: 213807 - DNA, 384 bp, Artificial Sequence
  derived and/or modified sequence
atgatctaccccctggacctcttcaggaacatcccctggaagcagggcaaatgttttgccagcctgagccctgagggggagcgggcctttgatggcatggagcccctgtgccagcccggggcccggcctgccctgcggggcctgcagcacgccagtgactgctaccgcctgctgagccccccaggcagcggcctggtgggcaccaaccccagcgtgcctgcccccagcccccactgcggctgctgccaggcctggagcatcagcagcttcaccttcaccggccccacccccttcaagatcaacagcgaccaggccaccccctgccacctgcggagccctgagaccatcttccggcagcgggagatcagcaatgaggccttctag

SEQ ID NO: 213808 - DNA, 75 bp, Artificial Sequence
  derived and/or modified sequence
cgggagaccgagcggaccatcaccgacgacggctggatggacggctggatggatggctggatggatggctggtag

SEQ ID NO: 213809 - RNA, 1209 nt, Artificial Sequence
  derived and/or modified sequence
augguuugugcgcgugccgcuuuaggaccgggugcucuaugggcagccgcuuggggcgugcugcugcugacugccccagccggcgcccaacgaggaaggaaaaaggugguacacguuuuggaaggagagagugggagcguggugguucagaccgcccccggacagguggugagucaccgcggcgggaccaucguguugccuugccgguaucauuaugaggccgccgcacacggacaugauggggugcgcuugaaguggacaaaagugguggauccacuggcauucacugauguuuucguggcccuaggaccccaacaucgcgcauuugggucauaccgagggagagccgaauuacagggggacgggcccggcgacgccagccuggugcugcgaaacguaacccuccaggauuacggcagguaugagugugaagugacuaacgaacuggaggaugacgccggaauggucaagcucgaucuggaaggugucgucuuuccauaucacccgaggggcggaagguacaaacugacauucgcugaagcacaaagggcaugugccgaacaggaugggauuuuagcauccgccgagcaguugcacgcagccuggcgcgauggacucgacuggugcaacgccggcuggcuucgggauggcuccgugcaauauccagugaaucggccucgugaaccuuguggagggcugggcgggaccggaucugccggcgggggcggagaugccaacggcggccugcgcaacuacggauauaggcacaaugcggaggagcgguaugaugcauuuuguuuuacuuccaaccucccuggaaggguguuuuuccugaagccucugcgccccgucccuuuuucaggcgccgcgagagcuugcgcagcacguggagcagcuguggcaaaggugggccaguuguuugccgccuggaaauuacaacugcuagaccggugcaccgccggcuggcuggcugacggcagcgcucgcuacccuauugugaacccucgggcccguugugggggacggagacccggagugagaucccucggauucccagacgcaaccagaagauuauuugguguguacugcuacagagcuccuggggcgcccgaccccgcucccggcggauggggcugggguugggcuggaggugggggaugggcagggggagcccgggauccugccgcuuggacuccacuccauguuuag

SEQ ID NO: 213810 - RNA, 1209 nt, Artificial Sequence
  derived and/or modified sequence
auggugugcgcucgggccgcucuuggccccggagcauuaugggcagcagcuugggguguccugcucuugacagcuccagcgggggcucagcgggggagaaaaaaaguggugcacgugcuggaaggcgaguccgggucuguuguagugcagacagccccuggccaggucgucucacauaggggagggaccaucguacugccuugucgauaucacuacgaagcggcugcacaugggcacgacggggugagauugaaauggaccaaggugguugacccccuggcauuuacggacguguucgucgcccuaggaccccagcaccgcgcauuuggcaguuacagggggcgggccgagcuucagggagauggaccaggcgacgccucccucgugcuucgaaaugugacucugcaggauuauggccgcuaugaaugcgaggugaccaaugagcucgaagacgacgcagggaugguuaaguuggaccucgaaggcgucguauucccuuaccacccuagaggagggcgauauaaguugacauucgcugaggcacagagagcaugugcagaacaggaugggauacuggcaagcgcagagcagcuccaugcugcguggagggaugggcuugacuggugcaacgcaggcugguuaagagauggcuccgugcaguauccuguuaaucgucccagagagcccuguggaggucugggagguacuggaagcgcuggugggggaggugacgcuaacggcggcuuacgcaacuauggcuauagacauaacgcggaggaacgcuaugaugcauucugcuuuacuucaaaccugcccgggaggguguuuuucuugaagccucugcgaccaguuccuuuuaguggggccgcucgcgcuugcgcugcucgcggugccgcuguagccaaagugggccagcuuuuugccgcauggaagcuacaauuacuggaccgcugcacagcaggauggcucgcggacgguagugcucgguauccgauagugaauccucgcgccagaugcgguggcagacgccccggcguccgaagucucggauucccugaugccacacgucggcuuuuugggguguauuguuauagggccccuggugcaccugauccugccccuggaggguggggauggggcugggcuggugguggcggaugggcugguggagcgcgugacccagccgcguggaccccucugcacguguag

SEQ ID NO: 213811 - protein, 473 aa, Artificial Sequence
  derived and/or modified sequence
MKRASAGGSRLLAWVLWLQAWQVAAPCPGACVCYNEPKVTTSCPQQGLQAVPVGIPAASQRIFLHGNRISHVPAASFRACRNLTILWLHSNVLARIDAAAFTGLALLEQLDLSDNAQLRSVDPATFHGLGRLHTLHLDRCGLQELGPGLFRGLAALQYLYLQDNALQALPDDTFRDLGNLTHLFLHGNRISSVPERAFRGLHSLDRLLLHQNRVAHVHPHAFRDLGRLMTLYLFANNLSALPTEALAPLRALQYLRLNDNPWVCDCRARPLWAWLQKFRGSSSEVPCSLPQRLAGRDLKRLAANDLQGCAVATGPYHPIWTGRATDEEPLGLPKCCQPDAADKASVLEPGRPASAGNALKGRVPPGDSPPGNGSGPRHINDSPFGTLPGSAEPPLTAVRPEGSEPPGFPTSGPRRRPGCSRKNRTRSHCRLGQAGSGGGGTGDSEGSGALPSLTCSLTPLGLALVLWTVLGPC

SEQ ID NO: 213812 - DNA, 1422 bp, Artificial Sequence
  derived and/or modified sequence
atgaaaagggcgtcagccggcggctcccggctgttggcttgggtcctctggttgcaggcttggcaggtggcagctccctgccctggagcttgtgtgtgttacaatgaaccaaaagtgacgacctcttgcccccagcagggtcttcaggccgtccctgtggggattccagcggcttcacagagaattttcttgcacggcaacagaatctcccacgtgccagccgcctcattcagagcttgcaggaacctgaccattctctggttgcactcaaacgtattggcacgaattgatgctgctgcctttacaggactcgcccttcttgaacagctcgacctgtctgataatgctcagctcagatcagtggaccccgccacgtttcacggcctcggcaggctgcacacgctgcacttggataggtgtggactacaggaactgggacctgggctcttccgaggactggctgccttgcagtacctttaccttcaggataacgctttgcaagccctgcccgatgatacgttcagagatctgggaaatctgacccacttgttcctacatggcaataggatttcatcagttcccgagcgggcttttcgcggccttcacagcctcgatagactgctcctgcaccagaatcgcgtggcccatgtgcatcctcatgctttccgtgacttgggtagactcatgaccttgtacttgtttgccaataacttgagtgctcttcctactgaggctcttgccccccttcgagctcttcagtacctcaggctgaacgataatccatgggtgtgcgattgtcgagcccgccccctgtgggcatggttgcaaaagttccgcggctcgagctccgaagtaccatgttcattgcctcaacgcctggctgggagggacctcaagcggctggcagccaacgatctccagggttgcgccgtggcaaccggcccttaccaccccatctggaccggtagggcaacagacgaagaaccattgggcctgcctaagtgctgtcagcctgacgctgccgacaaagccagcgtgcttgagcctggccggccggcctctgccggcaatgcattaaaggggagagtgcccccaggagatagccctccgggtaatggttccggccctcgtcacatcaatgattcacccttcggaacgttacctggatctgctgagccacccctgaccgcggtgcgacctgaaggcagtgaaccccctggatttcctaccagcggcccgcgcagacgccccggctgctccaggaaaaatagaacgaggtctcattgccggctcgggcaggctggctctggggggggaggcaccggggattccgaaggaagcggagccctacctagcctgacttgttctctgactcccttggggctggcattggtgctgtggactgtcttgggcccatgctag

SEQ ID NO: 213813 - DNA, 1422 bp, Artificial Sequence
  derived and/or modified sequence
atgaagagggccagcgctgggggcagccggctgctggcctgggtgctgtggctgcaggcctggcaggtggccgccccctgccctggggcctgtgtgtgctacaatgagcccaaggtgaccaccagctgcccccagcagggcctgcaggccgtgcctgtgggcatcccagctgccagccagaggatcttcctgcacggcaaccgcatcagccacgtgcctgctgccagcttccgggcctgcaggaacctgaccatcctgtggctgcacagcaatgtgctggccagaattgatgctgctgccttcaccggcctggccctgctggagcagctggacctgagtgacaatgcccagctgcggtctgtggaccctgccaccttccacggcctgggccgcctgcacaccctgcacctggacagatgtggcctgcaggagctgggccctggcctcttccggggcctggccgccctgcagtacctgtacctgcaggacaatgccctgcaggccctgcctgatgacaccttccgggacctgggcaacctgacccacctgttcctgcacggcaaccgcatcagctctgtgcctgagcgggccttccggggcctgcacagcctggaccggctgctgctgcaccagaacagagtggcccacgtgcacccccacgccttccgggacctgggccgcctgatgaccctgtacctgtttgccaacaacctgagcgccctgcccacagaggccctggcccccctgcgggccctgcagtacctgcggctgaatgacaacccctgggtgtgtgactgccgggcccggcccctgtgggcctggctgcagaagttccggggcagcagcagcgaggtgccctgcagcctgccccagaggctggccggccgggacctgaagaggctggccgccaatgacctgcagggctgtgctgtggccaccggcccctaccaccccatctggacaggccgggccacagatgaggagcccctgggcctgcccaagtgctgccagccagatgctgctgacaaggcctctgtgctggagcccggccggcctgccagcgctggaaatgccctgaagggccgggtgcccccaggggacagccccccaggaaatggcagcggccccaggcacatcaatgacagccccttcggcaccctgcccggcagcgctgagccccccctgacagctgtgcggcctgagggcagcgagcccccaggcttccccaccagcggccccaggagaagacctggctgcagcaggaagaacagaaccaggagccactgccgcctgggccaggccggcagcggcggcggcggcactggagacagcgagggcagcggggccctgcccagcctgacctgcagcctgacccccctgggcctggccctggtgctgtggacagtgctgggcccctgctag

SEQ ID NO: 213814 - DNA, 1422 bp, Artificial Sequence
  derived and/or modified sequence
atgaagcgggccagcgccggcggcagccggctgctggcctgggtgctgtggttacaggcctggcaggtggccgccccgtgtccaggagcctgcgtctgttacaacgagcccaaagtgaccacatcatgccctcagcagggattgcaggctgttcccgtggggattcccgcggcatcacagaggatcttcttgcatggaaatcgtatctcccacgtaccagcggcaagtttcagagcatgccggaacctgactatattgtggttgcatagtaatgtacttgcacgtattgacgctgctgctttcactgggttggccctgttggaacaactcgacctgagcgataacgcccagctgcggagcgtggatccagcaacctttcatggattaggtcggttgcatactctccaccttgatcggtgcggcttacaagagttaggccctggcctattccgcggtctggcagcactccagtacctgtatctgcaggacaacgctctgcaagcgttgcccgacgacacattccgggatctcggaaatctcactcacttgttcctgcacggtaatcgtatctccagcgtgcctgagcgggccttcagaggattgcattcacttgaccgcctgctgttacaccagaacagggtggctcacgtgcaccctcacgcatttcgggatttgggaaggctgatgaccctatacttattcgccaataacctgtccgcactacccacggaggctctagcacctctgcgcgccctgcagtatttgcgtctgaatgacaatccctgggtgtgcgactgtcgagcccgccctttgtgggcctggctccagaagttccggggcagttccagcgaggtgccgtgcagcctcccccagagactagctgggcgcgatttgaaacggctagctgctaacgacctgcagggctgtgctgttgctaccgggccataccaccccatttggacaggacgggccacggatgaggaaccactcgggttgcctaagtgctgccaacccgatgctgctgataaagcatcggtcctcgaaccaggccggccggcatccgcaggaaatgcactcaaaggaagggttccccctggtgactctccacccggaaatggttcgggcccccggcacataaatgatagtccattcggcacattgccgggctcggctgagccgccccttactgctgtgcgacccgagggatccgagcctcccggattccccactagcgggccacgaaggcgacccggctgctccaggaaaaatcgaactcgctcccactgtagacttggccaggcaggtagtggcggtggcggaactggggactccgaggggagtggagcacttcccagtctgacctgcagtctaacacctcttgggcttgctttagtgctctggactgtactgggaccgtgctag

SEQ ID NO: 213815 - DNA, 1422 bp, Artificial Sequence
  derived and/or modified sequence
atgaaaagagcctccgcaggcggaagtaggctgctcgcatgggtattgtggctgcaggcctggcaggtggcagctccttgtcctggtgcatgtgtgtgctataacgaacccaaagtcacaacctcctgccctcagcagggactgcaagccgtaccagtgggaatccccgctgcttcacagcgcatattcctgcatggcaaccggatttcgcacgtacccgctgcgagcttccgagcatgtcgtaacttgaccatcttatggttgcactccaatgttctggctcgtatcgatgctgctgcgtttaccggtttggccctgttggaacagctggacctgtctgataatgcccagctacggtctgtggatccagccaccttccatggactgggccgtctgcacacacttcacttggacagatgcgggctgcaggaactggggccaggtctcttcagggggttggccgcactgcagtacctgtacctgcaagacaacgccctgcaggcgctgcccgatgacaccttccgcgatcttggaaatctaactcacctatttctgcatggtaacagaatctcgtcagtgccagagcgcgcattccggggattgcactcgctggaccgattgcttctgcatcaaaacagagtggcacatgtccatccccacgcctttagggacctcgggcgtttgatgacgctttatctgttcgcgaataacctgagtgccctccccactgaagccctggccccactgagagccctgcaatacctgagattaaacgacaacccttgggtgtgcgactgcagggcccgacctttatgggcctggctgcaaaaattcagggggtcctccagtgaagtgccttgtagcctgcctcagcgcttagccggacgggacctgaagcgcctggcggcaaacgacctgcaggggtgtgccgtagccacgggtccatatcacccaatttggaccgggagagctactgatgaggaaccactgggcctgcctaagtgttgtcagcctgatgctgccgacaaggctagcgtgctggagcccggacgcccagcaagtgccggtaacgcgctcaaaggtagagtgccaccaggagacagtccaccaggtaacggatccgggccacgacacattaacgattcacctttcgggacgttacctgggtctgcagagccccctctgactgctgttcgacccgagggcagcgagcccccagggttccccacatcggggcctagaaggagaccgggatgctctcgaaaaaatagaacacgctcccactgcagactgggacaggcaggctcgggaggtggtggaacgggcgactctgaagggtctggcgctctgccgtccctgacgtgttcattgacacctctcggcctcgccctggtcctgtggacagtactggggccatgctag

SEQ ID NO: 213816 - DNA, 1422 bp, Artificial Sequence
  derived and/or modified sequence
atgaagagggcctctgccggaggtagccgccttctagcatgggtgttgtggctacaagcctggcaggtagctgcgccatgcccgggcgcctgcgtgtgttataatgaaccaaaggtgacgactagctgccctcagcagggcctacaggcggtaccggttgggattcccgcagcgagtcaaaggatttttctccatggcaaccgaatcagtcatgtccccgccgcttccttcagagcctgtcggaacctcactatcctgtggctacattccaacgtactggccagaatcgatgcggcagcttttacaggactcgctctgttagaacaactggatctgtccgataacgctcagctgcggtccgtcgatcccgcaacctttcacggcttaggccgcttacatacacttcatctggatagatgcggacttcaggagctgggaccaggactgtttagaggactggcggccttacaatacctgtacctccaggacaacgcactgcaggctttgcccgatgatactttccgagatctaggcaatctgactcatctgttcttacacggaaaccgaatctccagcgtacccgaacgcgcgtttaggggactccactcactggaccggctattacttcaccagaacagggttgctcacgttcacccccatgcctttcgggacctggggcggctgatgacactatacctgttcgctaataacctaagtgcacttcccacagaagcactggccccacttcgcgccttacaatatctgagactaaatgacaacccttgggtctgcgattgccgggccaggccgctctgggcgtggctgcagaaattccggggatccagctctgaagtcccatgcagcctgcctcagagactggctggtcgagacctaaaacgactggcagccaatgatctccagggatgcgcagttgcaactgggccctatcaccccatctggaccgggagagccacggatgaagagccgcttggattgcctaagtgttgccagcctgatgctgccgacaaggctagtgttctggagcccggcagaccggcgtccgccggaaacgcactgaaaggaagggtgccacccggcgattctcccccaggcaatggcagcgggccgcgccacataaacgattctcctttcggcacgcttccaggttcagcagagccaccactaactgccgtccgtcctgaggggtcagaacctcctggattcccaacttccgggccccgccgccgtcctgggtgcagcaggaagaaccggaccagatcccactgcaggctcgggcaagcaggtagcgggggtgggggaacaggcgatagcgaaggtagtggagccctgccatcccttacttgctcgctaacccctttgggtctggccctcgtgctctggaccgttctgggaccctgttag

SEQ ID NO: 213817 - DNA, 1422 bp, Artificial Sequence
  derived and/or modified sequence
atgaagagggcatcagctggcggaagccgattactagcatgggtgctgtggcttcaagcctggcaagtggctgctccatgcccaggcgcctgtgtgtgttataacgaacctaaagttactacgagttgcccccagcagggattgcaggccgtgcccgtaggcattcctgccgccagccaacgaatatttctgcacggtaataggatttcgcacgtccccgccgcctcatttagagcctgtaggaacttgaccatcctgtggctgcatagcaacgtgcttgcccgcattgacgctgcagcttttacaggactcgctctgttagaacaactggatctgtccgataacgctcagctgcggtccgtcgatcccgcaacctttcacggcttaggccgcttacatacacttcatctggatagatgcggacttcaggagctgggaccaggactgtttagaggactggcggccttacaatacctgtacctccaggacaacgcactgcaggctttgcccgatgatactttccgagatctaggcaatctgactcatctgttcttacacggaaaccgaatctccagcgtacccgaacgcgcgtttaggggacttcatagcttagaccgactgctattgcatcagaatagagtggcccacgttcatccccatgctttcagagacctcggaagactgatgacactgtacctcttcgctaacaacttgtccgctctgccaacagaggcactggcaccattgcgtgcattgcagtacttgagactcaacgacaatccatgggtttgcgactgtcgtgcccgacccctgtgggcctggctgcagaaattccggggcagctcaagtgaagtgccatgtagcctcccccagcgcctggccggccgggacctcaaacgccttgcggctaacgacctccaggggtgcgccgtagccacgggcccttaccatccaatctggacaggcagagctacggacgaggagccactgggccttcctaagtgctgccaacctgacgctgccgataaagcatccgtgctcgaacccggcagaccagcctcagcggggaatgccctgaagggacgcgtgccaccaggagacagccccccaggaaatggatcaggtccaagacacatcaatgattctcccttcggaactctgcccgggagcgctgaacctccattaaccgcggttcgtcctgagggatcagagccacccggtttccctacatccggaccacggaggcgtccaggatgctcgagaaagaatcgcaccaggagccactgccggctagggcaggcgggcagtggaggcggcggaactggtgactccgaaggttcgggcgcacttccttctttaacttgctctcttacccctctaggactggctcttgtgttatggactgtgctgggaccttgttag

SEQ ID NO: 213818 - DNA, 2157 bp, Artificial Sequence
  derived and/or modified sequence
ccgggccagcctaggccgccacaccctcgggcccgcgtccccggccggctccggcccgggccgccatcccctccgccgcctgcaggggccgccgcctcttcaggaatgcgccgcctttgtctgggaccgcgcggcgccggtgcaccgggcgggctgagcgcctcctgcggcccggcctgcgcgccccggcccgccgcgccgcccacgccccaacccccgcgccgccgccgccctcgccctgtgcgccctgcgcgccctgcgcacccgcggcccgagcccagccagagccgggcggagcggagcgcgccgagcctcgtcccgcggccgggccggggccgggccgtagcggcggcgcctggatgcggacccggccgcggggagacgggcgcccgccccgaaacgactttcagtccccgacgcgccccgcccaacccctacgatgaagagggcgtccgctggagggagccggctgctggcatgggtgctgtggctgcaggcctggcaggtggcagccccatgcccaggtgcctgcgtatgctacaatgagcccaaggtgacgacaagctgcccccagcagggcctgcaggctgtgcccgtgggcatccctgctgccagccagcgcatcttcctgcacggcaaccgcatctcgcatgtgccagctgccagcttccgtgcctgccgcaacctcaccatcctgtggctgcactcgaatgtgctggcccgaattgatgcggctgccttcactggcctggccctcctggagcagctggacctcagcgataatgcacagctccggtctgtggaccctgccacattccacggcctgggccgcctacacacgctgcacctggaccgctgcggcctgcaggagctgggcccggggctgttccgcggcctggctgccctgcagtacctctacctgcaggacaacgcgctgcaggcactgcctgatgacaccttccgcgacctgggcaacctcacacacctcttcctgcacggcaaccgcatctccagcgtgcccgagcgcgccttccgtgggctgcacagcctcgaccgtctcctactgcaccagaaccgcgtggcccatgtgcacccgcatgccttccgtgaccttggccgcctcatgacactctatctgtttgccaacaatctatcagcgctgcccactgaggccctggcccccctgcgtgccctgcagtacctgaggctcaacgacaacccctgggtgtgtgactgccgggcacgcccactctgggcctggctgcagaagttccgcggctcctcctccgaggtgccctgcagcctcccgcaacgcctggctggccgtgacctcaaacgcctagctgccaatgacctgcagggctgcgctgtggccaccggcccttaccatcccatctggaccggcagggccaccgatgaggagccgctggggcttcccaagtgctgccagccagatgccgctgacaaggcctcagtactggagcctggaagaccagcttcggcaggcaatgcgctgaagggacgcgtgccgcccggtgacagcccgccgggcaacggctctggcccacggcacatcaatgactcaccctttgggactctgcctggctctgctgagcccccgctcactgcagtgcggcccgagggctccgagccaccagggttccccacctcgggccctcgccggaggccaggctgttcacgcaagaaccgcacccgcagccactgccgtctgggccaggcaggcagcgggggtggcgggactggtgactcagaaggctcaggtgccctacccagcctcacctgcagcctcacccccctgggcctggcgctggtgctgtggacagtgcttgggccctgctgacccccagcggacacaagagcgtgctcagcagccaggtgtgtgtacatacggggtctctctccacgccgccaagccagccgggcggccgacccgtggggcaggccaggccaggtcctccctgatggacgcctgccgcccgccacccccatctccaccccatcatgtttacagggttcggcggcagcgtttgttccagaacgccgcctcccacccagatcgcggtatatagagatatgcattttattttacttgtgtaaaaatatcggacgacgtggaataaagagctcttttcttaa

SEQ ID NO: 213819 - DNA, 1422 bp, Artificial Sequence
  derived and/or modified sequence
atgaagagagccagcgccggcggcagcagactgctggcctgggtgctgtggctgcaggcctggcaggtggccgccccctgccccggcgcctgcgtgtgctacaacgagcccaaggtgaccaccagctgcccccagcagggcctgcaggccgtgcccgtgggcatccccgccgccagccagagaatcttcctgcacggcaacagaatcagccacgtgcccgccgccagcttcagagcctgcagaaacctgaccatcctgtggctgcacagcaacgtgctggccagaatcgacgccgccgccttcaccggcctggccctgctggagcagctggacctgagcgacaacgcccagctgagaagcgtggaccccgccaccttccacggcctgggcagactgcacaccctgcacctggacagatgcggcctgcaggagctgggccccggcctgttcagaggcctggccgccctgcagtacctgtacctgcaggacaacgccctgcaggccctgcccgacgacaccttcagagacctgggcaacctgacccacctgttcctgcacggcaacagaatcagcagcgtgcccgagagagccttcagaggcctgcacagcctggacagactgctgctgcaccagaacagagtggcccacgtgcacccccacgccttcagagacctgggcagactgatgaccctgtacctgttcgccaacaacctgagcgccctgcccaccgaggccctggcccccctgagagccctgcagtacctgagactgaacgacaacccctgggtgtgcgactgcagagccagacccctgtgggcctggctgcagaagttcagaggcagcagcagcgaggtgccctgcagcctgccccagagactggccggcagagacctgaagagactggccgccaacgacctgcagggctgcgccgtggccaccggcccctaccaccccatctggaccggcagagccaccgacgaggagcccctgggcctgcccaagtgctgccagcccgacgccgccgacaaggccagcgtgctggagcccggcagacccgccagcgccggcaacgccctgaagggcagagtgccccccggcgacagcccccccggcaacggcagcggccccagacacatcaacgacagccccttcggcaccctgcccggcagcgccgagccccccctgaccgccgtgagacccgagggcagcgagccccccggcttccccaccagcggccccagaagaagacccggctgcagcagaaagaacagaaccagaagccactgcagactgggccaggccggcagcggcggcggcggcaccggcgacagcgagggcagcggcgccctgcccagcctgacctgcagcctgacccccctgggcctggccctggtgctgtggaccgtgctgggcccctgctag

SEQ ID NO: 213820 - protein, 470 aa, Artificial Sequence
  derived and/or modified sequence
MKEEKEHRPKEKRVTLLTPAGATGSGGGTSGDSSKGEDKQDRNKEKKEALSKVVIRRLPPTLTKEQLQEHLQPMPEHDYFEFFSNDTSLYPHMYARAYINFKNQEDIILFRDRFDGYVFLDNKGQEYPAIVEFAPFQKAAKKKTKKRDTKVGTIDDDPEYRKFLESYATDNEKMTSTPETLLEEIEAKNRELIAKKTTPLLSFLKNKQRMREEKREERRRREIERKRQREEERRKWKEEEKRKRKDIEKLKKIDRIPERDKLKDEPKIKLLKKPEKGDEKELDKREKAKKLDKENLSDERASGQSCTLPKRSDSELKDEKPKRPEDESGRDYREREREYERDQERILRERERLKRQEEERRRQKERYEKEKTFKRKEEEMKKEKDTLRDKGKKAESTESIGSSEKTEKKEEVVKRDRIRNKDRPAMQLYQPGARSRNRLCPPDDSTKSGDSAAERKQESGISHRKEGGEE

SEQ ID NO: 213821 - protein, 218 aa, Artificial Sequence [sequence omitted]

SEQ ID NO: 213822 - DNA, 1413 bp, Artificial Sequence
  derived and/or modified sequence
atgaaggaggagaaggagcacagacccaaggagaagagagtgaccctgctgacccccgccggcgccaccggcagcggcggcggcaccagcggcgacagcagcaagggcgaggacaagcaggacagaaacaaggagaagaaggaggccctgagcaaggtggtgatcagaagactgccccccaccctgaccaaggagcagctgcaggagcacctgcagcccatgcccgagcacgactacttcgagttcttcagcaacgacaccagcctgtacccccacatgtacgccagagcctacatcaacttcaagaaccaggaggacatcatcctgttcagagacagattcgacggctacgtgttcctggacaacaagggccaggagtaccccgccatcgtggagttcgcccccttccagaaggccgccaagaagaagaccaagaagagagacaccaaggtgggcaccatcgacgacgaccccgagtacagaaagttcctggagagctacgccaccgacaacgagaagatgaccagcacccccgagaccctgctggaggagatcgaggccaagaacagagagctgatcgccaagaagaccacccccctgctgagcttcctgaagaacaagcagagaatgagagaggagaagagagaggagagaagaagaagagagatcgagagaaagagacagagagaggaggagagaagaaagtggaaggaggaggagaagagaaagagaaaggacatcgagaagctgaagaagatcgacagaatccccgagagagacaagctgaaggacgagcccaagatcaagctgctgaagaagcccgagaagggcgacgagaaggagctggacaagagagagaaggccaagaagctggacaaggagaacctgagcgacgagagagccagcggccagagctgcaccctgcccaagagaagcgacagcgagctgaaggacgagaagcccaagagacccgaggacgagagcggcagagactacagagagagagagagagagtacgagagagaccaggagagaatcctgagagagagagagagactgaagagacaggaggaggagagaagaagacagaaggagagatacgagaaggagaagaccttcaagagaaaggaggaggagatgaagaaggagaaggacaccctgagagacaagggcaagaaggccgagagcaccgagagcatcggcagcagcgagaagaccgagaagaaggaggaggtggtgaagagagacagaatcagaaacaaggacagacccgccatgcagctgtaccagcccggcgccagaagcagaaacagactgtgcccccccgacgacagcaccaagagcggcgacagcgccgccgagagaaagcaggagagcggcatcagccacagaaaggagggcggcgaggagtag

SEQ ID NO: 213823 - DNA, 657 bp, Artificial Sequence
  derived and/or modified sequence
atgaaggaggagaaggagcacagacccaaggagaagagagtgaccctgctgacccccgccggcgccaccggcagcggcggcggcaccagcggcgacagcagcaagggcgaggacaagcaggacagaaacaaggagaagaaggaggccctgagcaaggtggtgatcagaagactgccccccaccctgaccaaggagcagctgcaggagcacctgcagcccatgcccgagcacgactacttcgagttcttcagcaacgacaccagcctgtacccccacatgtacgccagagcctacatcaacttcaagaaccaggaggacatcatcctgttcagagacagattcgacggctacgtgttcctggacaacaagggccaggagtaccccgccatcgtggagttcgcccccttccagaaggccgccaagaagaagaccaagaagagagacaccaaggtgggcaccatcgacgacgaccccgagtacagaaagttcctggagagctacgccaccgacaacgagaagatgaccagcacccccgagaccctgctggaggagatcgaggccaagaacagagagctgatcgccaagaagaccacccccctgctgagcttcctgaagaacaagcagagaatgagagaggagaagagagaggacttctag

SEQ ID NO: 213824 - DNA, 1413 bp, Artificial Sequence
  derived and/or modified sequence
atgaaggaggagaaagaacaccgcccaaaagaaaagagagtgacactgctgacgcccgccggagcaaccggtagtggaggcgggacatccggcgattccagtaagggtgaagataagcaggatcgtaacaaggagaaaaaggaggccctttcgaaggtcgtgatacgtcgtctgccacctacactgaccaaggaacaacttcaggagcacttgcaacccatgcctgaacatgattactttgaatttttcagtaatgacacgagcttgtatccccatatgtatgctcgagcttacattaacttcaagaatcaggaagacattattctcttcagggatcggttcgatggctatgtttttctggacaataaaggacaggaatatcctgccatcgtggagttcgccccgtttcaaaaggctgccaagaagaaaaccaaaaaacgcgacaccaaagtgggtacaatcgatgacgatccagaataccgcaagtttctggagtcttatgccaccgataacgagaaaatgacctctactcccgagaccctcctggaagaaatcgaggctaaaaaccgggaactgattgccaagaagaccactcccctgttgtcatttctcaagaataagcagaggatgagagaagaaaagcgcgaggaaagaaggcgccgcgaaattgaaaggaagaggcagcgagaggaagagagaaggaaatggaaagaggaagagaagagaaaaagaaaggatattgagaaactcaagaagatcgatagaatcccagaaagagacaagctgaaggatgagcccaagataaagctcctgaagaagcctgagaagggtgatgagaaagagctggacaaacgcgagaaggctaaaaagctggacaaggagaacctaagtgacgagcgggcgagcggccaatcttgcaccttgccaaaaaggagcgattccgaattaaaagacgagaagcccaagcgaccggaggacgagtccgggagagattaccgagagcgcgagcgtgaatacgagagggatcaggaacgaatcttgagggaacgggaacgcctgaaaaggcaggaggaggaacggcgacgacaaaaagagcggtatgaaaaagaaaaaacattcaagcggaaggaggaagagatgaaaaaagaaaaggacactctcagggacaaggggaaaaaagccgagtctaccgaaagcatcggatcttcagaaaaaacagagaagaaagaagaggttgtgaagagggatcggatcagaaataaggacagacccgcaatgcagctttaccagccgggcgctcgctctcggaaccgcctgtgcccccctgatgactctacgaaatcaggcgattcggccgcagaaagaaaacaagaaagcggcattagccacaggaaagaggggggtgaggagtag

SEQ ID NO: 213825 - DNA, 657 bp, Artificial Sequence
  derived and/or modified sequence
atgaaagaagaaaaggagcatcgaccgaaagagaaaagggtgaccctgttaaccccagcaggcgcgaccggctccggaggcggtacctcaggcgacagtagtaagggggaggacaaacaggataggaataaggagaaaaaggaagccctgtcaaaagtggtaattagaaggctgccgccaacactgacaaaggagcagctacaggagcatctccaaccgatgccagagcatgattacttcgagttttttagcaacgatacctccctgtaccctcacatgtacgccagggcctacattaactttaagaatcaggaagatattatcctgttccgcgataggtttgatggctacgtgttcctggacaacaaaggccaggaataccctgctatcgtggagtttgccccatttcagaaagccgctaagaagaaaactaagaagagggataccaaggtgggcactatagacgacgacccagagtatcgtaaatttttagaaagctacgcgactgacaacgagaagatgactagcaccccagagacactgctcgaggagatcgaagccaaaaatcgcgaactgattgctaagaagacaacaccgcttctatcatttttgaaaaataagcagaggatgagagaggagaaacgggaagatttctag

SEQ ID NO: 213826 - DNA, 1413 bp, Artificial Sequence
  derived and/or modified sequence
atgaaggaggagaaggagcaccggcccaaggagaagagggtgaccctgctgaccccagctggggccactggaagtggcggcggcaccagcggggacagcagcaaaggagaggacaagcaggacaggaacaaggagaagaaggaggccctgagcaaggtggtgatccggcggctgccccccaccctgaccaaggagcagctgcaggagcacctgcagcccatgcctgagcatgactactttgagttcttcagcaatgacaccagcctgtacccccacatgtatgcccgggcctacatcaacttcaagaaccaggaggacatcatcctcttccgggacagatttgatggctacgtgttcctggacaacaagggccaggagtacccagccatcgtggagtttgcccccttccagaaggccgccaagaagaagaccaagaagagggacaccaaggtgggcaccattgatgatgatcctgagtacaggaagttcctggagagctatgccacagacaatgagaagatgaccagcaccccagagaccctgctggaggagattgaggccaagaaccgggagctgattgccaagaagaccacccccctgctgtccttcctgaagaacaagcagaggatgagggaggagaagcgggaggagaggagaagaagagaaattgaaaggaagaggcagcgggaggaggagaggaggaagtggaaggaggaggagaagaggaagaggaaggacatcgagaagctgaagaagattgaccgcatccctgagcgggacaagctgaaggatgagcccaagatcaagctgctgaagaagccagagaagggagatgagaaggagctggacaagcgggagaaggccaagaagctggacaaggagaacctgagtgatgagcgggccagcggccagagctgcaccctgcccaagagaagtgacagcgagctgaaggatgagaagcccaagaggccagaagatgagagcggccgggactaccgggagcgggagcgggagtatgagcgggaccaggagcgcatcctgcgggagcgggagcggctgaagaggcaggaggaggagcggcggcggcagaaggagagatatgagaaggagaagaccttcaagaggaaggaggaggagatgaagaaggagaaggacaccctgcgggacaagggcaagaaggccgagagcacagagagcatcggcagcagcgagaagacagagaagaaggaggaggtggtgaagagggaccgcatccggaacaaggacaggcctgccatgcagctgtaccagcccggggcccggagcaggaaccggctgtgccccccagatgacagcaccaagagcggggacagcgctgctgagaggaagcaggagagcggcatcagccacaggaaggagggcggggaggagtag

SEQ ID NO: 213827 - DNA, 657 bp, Artificial Sequence
  derived and/or modified sequence
atgaaggaggagaaggagcaccggcccaaggagaagagggtgaccctgctgaccccagctggggccactggaagtggcggcggcaccagcggggacagcagcaaaggagaggacaagcaggacaggaacaaggagaagaaggaggccctgagcaaggtggtgatccggcggctgccccccaccctgaccaaggagcagctgcaggagcacctgcagcccatgcctgagcatgactactttgagttcttcagcaatgacaccagcctgtacccccacatgtatgcccgggcctacatcaacttcaagaaccaggaggacatcatcctcttccgggacagatttgatggctacgtgttcctggacaacaagggccaggagtacccagccatcgtggagtttgcccccttccagaaggccgccaagaagaagaccaagaagagggacaccaaggtgggcaccattgatgatgatcctgagtacaggaagttcctggagagctatgccacagacaatgagaagatgaccagcaccccagagaccctgctggaggagattgaggccaagaaccgggagctgattgccaagaagaccacccccctgctgtccttcctgaagaacaagcagaggatgagggaggagaagcgggaggacttctag

SEQ ID NO: 213828 - DNA, 1413 bp, Artificial Sequence
  derived and/or modified sequence
atgaaggaggagaaggagcaccggcccaaggagaagcgggtgaccttactcacccctgcgggtgccactggcagcgggggcggtacctccggggacagctccaagggcgaagacaagcaggatcgcaataaggagaaaaaagaggcactgagcaaggtcgtgatccgccggctgcccccaactttgaccaaagaacagctccaggaacacctgcagcccatgccagaacatgactattttgagttctttagtaatgacacctcgctctacccccatatgtatgcacgggcatatatcaacttcaagaaccaagaagatataatcctgttcagagacaggttcgatggctacgtgttcctcgataacaagggacaggagtacccggccattgtggagttcgcaccattccaaaaagccgccaaaaagaagacgaagaagcgtgatacgaaagtcggtaccattgacgatgaccccgagtatcgaaagttcctagagtcctatgcaactgacaatgagaagatgacctctactccagaaaccctccttgaagagatcgaggctaagaaccgagagctgatagcgaagaaaacaactccgcttctttcgttcttgaagaataagcaacggatgagggaggagaaacgggaagagagaagacgtcgcgaaatcgaacgcaagcggcaacgagaggaggagcggcgaaagtggaaggaggaagaaaaacgcaaaaggaaggacatcgagaagcttaagaagattgacagaatccctgagcgggacaagctgaaggacgagcccaaaattaaacttcttaaaaagccagagaaaggggatgagaaggaactggacaaacgggagaaggccaaaaagctagacaaggagaacctctccgatgagcgagcctcgggtcagtcttgcacactgcccaaaagaagcgattccgaactgaaagacgagaagccaaagagaccagaggatgagtcagggcgcgactatcgagagagggagagagagtatgagcgcgaccaagagcggatccttagggaacgagaaagactgaaaagacaggaggaagagcgaagaagacagaaagagagatacgaaaaggagaaaacattcaagcgcaaagaagaggagatgaaaaaagaaaaagatacgctccgcgacaaaggtaagaaagctgagagtacagaaagtattgggagctcagaaaaaaccgaaaaaaaggaagaggtggtgaaacgggaccggatccgcaacaaggacagacccgctatgcagttgtatcagcccggtgcccgatcccggaataggctgtgcccacccgatgatagcactaaaagcggagatagcgccgcggaaagaaagcaggagtccgggattagccatcggaaggagggaggcgaggaatag

SEQ ID NO: 213829 - DNA, 657 bp, Artificial Sequence
  derived and/or modified sequence
atgaaggaggagaaggagcaccggcccaaggagaagcgggtgaccctgttgacccctgcgggggctaccggcagcggaggtggcactagcggcgactcttctaagggagaggacaagcaggaccgcaataaagaaaagaaggaagccctgtccaaagtggtcattagacgacttccacctaccctgactaaagagcaactccaagaacaccttcagccgatgcccgagcatgactacttcgagtttttctcaaacgatactagtctgtatccccacatgtacgctcgtgcatatatcaacttcaagaaccaggaggacataatcctgttccgcgacaggttcgacggatacgttttcctggataataaaggtcaagagtatccagccatagtcgagttcgccccattccagaaggccgcaaagaagaaaacaaagaaacgggacacaaaagtgggcaccatagacgatgaccccgagtaccggaaattcctggagtcgtatgcaacagacaatgagaaaatgacgtccactcccgaaaccttgctcgaagagatcgaggctaagaaccgagaactgatcgcaaagaaaacgacacctctgctgtccttcctgaagaacaagcagcgaatgcgcgaggaaaagagggaagatttttag

SEQ ID NO: 213830 - DNA, 1413 bp, Artificial Sequence
  derived and/or modified sequence
atgaaggaggaaaaagaacaccggccaaaagaaaaacgagtgacactcttgacaccggcaggagcaaccggatcaggcggaggtacatcaggcgacagctcaaagggagaggataagcaggaccgcaacaaggagaagaaagaggcactgtctaaggtcgtgatcaggagactcccccctaccctgacaaaggaacagttgcaggagcacctgcagcctatgcctgagcatgactattttgagttcttcagcaacgatacatccctgtatccccatatgtatgcccgtgcatacatcaactttaagaaccaggaggacattattttattccgggaccgctttgatggctatgtgtttcttgacaataaaggacaggagtacccggcaatcgttgaattcgccccatttcagaaggccgctaagaaaaaaacaaagaagagggacactaaggtgggaacaatcgatgacgatccagagtaccggaagttcctggagtcctacgccacagacaacgagaaaatgacaagcacacccgaaacgctgctggaagaaatcgaggccaaaaatagggaactgatcgcgaaaaaaaccacgcccttgctctcttttctgaaaaacaaacagcggatgagagaggaaaagcgagaggagcgcaggcgacgggagatcgagcgtaagaggcagcgggaggaagagcgccgaaagtggaaggaggaagagaaaaggaagcgcaaagacatcgagaagttaaaaaagattgatcgcatccccgagcgggacaagctgaaagacgaacccaaaatcaaattgctgaaaaagcctgagaagggtgatgaaaaagagcttgataagcgtgagaaagccaagaagctggacaaagagaatctgagtgatgagagagcctcaggacagagttgcactttgccaaaacgttctgattctgagctgaaagacgagaagcccaagaggcctgaggacgagagcggtcgagactatcgcgaaagggagcgtgagtatgagcgcgaccaggaaagaatcctcagagaaagagagcgcctgaagagacaagaggaggagcggaggagacagaaagaacgttatgaaaaagagaagacatttaaaagaaaggaggaggaaatgaaaaaggaaaaggataccctccgagacaaaggtaaaaaggccgagtctacagagtcaattggaagctccgaaaagacagagaaaaaggaagaagtggttaaaagagatcgcataaggaataaagatcggccagccatgcagctctaccagcctggggcaaggagcaggaatcgactctgccctcccgacgactcaactaagtccggcgactctgccgcagaacggaagcaagagtccggaataagccacaggaaggaaggaggagaggagtag

SEQ ID NO: 213831 - DNA, 657 bp, Artificial Sequence
  derived and/or modified sequence
atgaaagaggaaaaggaacaccggccaaaggaaaaaagagtcacactcctgacccccgcaggcgcaactgggagcgggggaggcacatccggcgactcatccaagggcgaagacaaacaggaccggaataaagaaaagaaggaggctctgtctaaagtggtcattaggcgcctcccacccaccctgactaaagagcaactgcaagagcatctgcagcccatgccagaacacgactattttgaattcttcagcaatgataccagtctgtatccccacatgtacgccagggcgtatattaattttaagaaccaggaggacataatactgttccgtgaccgttttgacggatatgtctttttagataacaagggacaggagtatcccgctatcgtagagttcgccccttttcaaaaggccgctaaaaaaaagaccaagaaaagagatactaaggtgggcaccattgatgatgatcccgagtatcgcaaattcctcgagagctacgccacagacaacgaaaagatgacaagtacaccggagacgctgctcgaagaaatagaggcaaagaatcgagaactaatagccaaaaagacaacacccctcttaagtttcctcaaaaataaacagcgcatgagagaggaaaaacgcgaggatttctag

SEQ ID NO: 213832 - DNA, 2335 bp, Artificial Sequence
  derived and/or modified sequence
gcttcccgggagccgtttgtgcccggggtaaccccgttccggccaagccgcttcagcgggggacgtagccatgaaggaagagaaggagcacaggcctaaggagaagcgagtaaccctgttaacccccgccggggccacaggcagcggtggtgggacctcgggggacagctccaagggggaagataagcaggatcgcaacaaggagaagaaagaagcgctgagcaaggtggtaattcgaagattacctcccactttgaccaaggagcagcttcaggaacatcttcaacctatgcctgagcatgattattttgagtttttttctaatgatacgagtttgtatcctcatatgtatgccagagcatacatcaactttaaaaaccaagaggacattattttgttcagggatcgctttgatggttatgtattccttgacaataaaggtcaggaatatcccgctatagtagaatttgcaccttttcaaaaagctgcaaaaaagaagactaagaaaagagataccaaagtcgggactatcgatgatgatccagaatatagaaagtttttggaaagttatgccacagataatgagaaaatgacatctactccagagacactgctagaggaaatagaagcaaaaaatagagaattaatagctaaaaagacaaccccacttttgagcttcctgaaaaacaagcagagaatgagagaagaaaagagagaagaaaggaggaggagagaaatagaaagaaaaagacaaagagaagaagagaggaggaaatggaaagaagaagagaaacgaaaaaggaaagatatagaaaagctaaagaagatagacagaattccagaaagggacaaattaaaggatgaaccaaagattaagctgctcaagaagccagaaaaaggagatgaaaaagaattggacaaaagagaaaaagccaagaaattggacaaagagaatctcagtgatgaaagagccagtgggcaaagttgtacattgcccaagcgttctgatagcgaacttaaagatgaaaaaccaaagagacctgaagatgagagcggcagagactatagggagagggaacgggaatatgaacgagatcaggagcgcatacttcgagaaagagagaggctgaagcggcaagaagaagagcgccgtaggcagaaggagcgctatgagaaagagaagacttttaagagaaaagaagaagaaatgaaaaaagagaaagacacacttcgggataaaggaaagaaggctgaaagtacagaatcaataggcagctcagaaaaaactgaaaagaaagaagaagtggtcaagagagatcgaataagaaacaaggatcgtccagcgatgcagctttaccaaccaggagctcgaagccgaaatcgactctgtccccctgatgacagcaccaagtctggagattcagcagcagaaaggaagcaggaaagtggtattagccatagaaaagaaggaggagaggagtgataagtccagatggccttaggtgtcctgactgtctaggcagccaaagagcacacgttaagcaatccagaggtgccttcagggcaaagaatagagagaaagggagccgctgtgctggtggggtacactgcagaggagtaagtcttgtgtcaaagcaggaatctgatcagaggttcagaattggaagtacaatttcattgcttttgcaatttctacaaattaattttaaagtgtcagaaaaaggtgacggcaaggacatgcattgcaatttgcagggggaattgtcaagtgaggacttcatcacatatgacacgagagaaaagtaagagctggttctaaaatcaaaagctgttgttcatcctgaattgaattttctgaatttgggtggagcagagtcgctttgaagccttgttccgatctaattctattgtattgttgatgataagtgttgacattgggtagtgtagaagcaacaagcatgtccttgtagtacaggtacagtgaaggatagaacacactttcgttgatacaaaaatttaaatagttatgttacttctgtatccagtgtcctaaagttttaggattagttttagttttttgtttgcttatatgagcttagcgtaaagaatatttttaaacttcgtgttttgtcatcagcatcttttctattaagaggtaaaatgtagtccttgtttgactcttgacaatccagtgtgtttgatcttaggtctcatgatctgagtgcataccctctccaggaaggaaactgcaccagtgtctattcctgttaaatagcaacttttagtctcagcttgtttcgttttgatgtcaataaatagtaacagcattcaagtg

SEQ ID NO: 213833 - DNA, 1388 bp, Artificial Sequence
  derived and/or modified sequence
gtaaccccgttccggccaagccgcttcagcgggggacgtagccatgaaggaagagaaggagcacaggcctaaggagaagcgagtaaccctgttaacccccgccggggccacaggcagcggtggtgggacctcgggggacagctccaagggggaagataagcaggatcgcaacaaggagaagaaagaagcgctgagcaaggtggtaattcgaagattacctcccactttgaccaaggagcagcttcaggaacatcttcaacctatgcctgagcatgattattttgagtttttttctaatgatacgagtttgtatcctcatatgtatgccagagcatacatcaactttaaaaaccaagaggacattattttgttcagggatcgctttgatggttatgtattccttgacaataaaggtcaggaatatcccgctatagtagaatttgcaccttttcaaaaagctgcaaaaaagaagactaagaaaagagataccaaagtcgggactatcgatgatgatccagaatatagaaagtttttggaaagttatgccacagataatgagaaaatgacatctactccagagacactgctagaggaaatagaagcaaaaaatagagaattaatagctaaaaagacaaccccacttttgagcttcctgaaaaacaagcagagaatgagagaagaaaagagagaagacttttaagagaaaagaagaagaaatgaaaaaagagaaagacacacttcgggataaaggaaagaaggctgaaagtacagaatcaataggcagctcagaaaaaactgaaaagaaagaagaagtggtcaagagagatcgaataagaaacaaggatcgtccagcgatgcagctttaccaaccaggagctcgaagccgaaatcgactctgtccccctgatgacagcaccaagtctggagattcagcagcagaaaggaagcaggaaagtggtattagccatagaaaagaaggaggagaggagtgataagtccagatggccttaggtgtcctgactgtctaggcagccaaagagcacacgttaagcaatccagaggtgccttcagggcaaagaatagagagaaagggagccgctgtgctggtggggtacactgcagaggagtaagtcttgtgtcaaagcaggaatctgatcagaggttcagaattggaagtacaatttcattgcttttgcaatttctacaaattaattttaaagtgtcagaaaaaggtgacggcaaggacatgcattgcaatttgcagggggaattgtcaagtgaggacttcatcacatatgacacgagagaaaagtaagagctggttctaaaatcaaaagctgttgttcatcctgaattgaattttctgaatttgggtggagcagagtcgc

SEQ ID NO: 213834 - protein, 476 aa, Artificial Sequence
  derived and/or modified sequence
MRSEKEGAGGLRAAVAARGPSGREKLSALEVQFHRDSQQQEAETPPTSSSGCGGGAGKPREEKRTALSKVVIRRLPPGLTKEQLEEQLRPLPAHDYFEFFAADLSLYPHLYSRAYINFRNPDDILLFRDRFDGYIFLDSKGLEYPAVVEFAPFQKIAKKKLRKKDAKTGSIEDDPEYKKFLETYCVEEEKTSANPETLLGEMEAKTRELIARRTTPLLEYIKNRKLEKQRIREEKREERRRRELEKKRLREEEKRRRREEERCKKKETDKQKKIAEKEVRIKLLKKPEKGEEPTTEKPKERGEEIDTGGGKQESCAPGAVVKARPMEGSLEEPQETSHSGSDKEHRDVERSQEQESEAQRYHVDDGRRHRAHHEPERLSRRSEDEQRWGKGPGQDRGKKGSQDSGAPGEAMERLGRAQRCDDSPAPRKERLANKDRPALQLYDPGARFRARECGGNRRICKAEGSGTGPEKREEAE

SEQ ID NO: 213835 - protein, 208 aa, Artificial Sequence
  derived and/or modified sequence
MEAKTRELIARRTTPLLEYIKNRKLEKQRIREEKREERRRRELEKKRLREEEKRRRREEERCKKKETDKQKKIAEKEVRIKLLKKPEKGEEPTTEKPKERGEEIDTGGGKQESCAPGAVVKARPMEGSLEEPQETSHSGSDKEHRDVERSQEQESEAPRKERLANKDRPALQLYDPGARFRARECGGNRRICKAEGSGTGPEKREEAE

SEQ ID NO: 213836 - DNA, 1431 bp, Artificial Sequence
  derived and/or modified sequence
atgagaagcgagaaggagggcgccggcggcctgagagccgccgtggccgccagaggccccagcggcagagagaagctgagcgccctggaggtgcagttccacagagacagccagcagcaggaggccgagaccccccccaccagcagcagcggctgcggcggcggcgccggcaagcccagagaggagaagagaaccgccctgagcaaggtggtgatcagaagactgccccccggcctgaccaaggagcagctggaggagcagctgagacccctgcccgcccacgactacttcgagttcttcgccgccgacctgagcctgtacccccacctgtacagcagagcctacatcaacttcagaaaccccgacgacatcctgctgttcagagacagattcgacggctacatcttcctggacagcaagggcctggagtaccccgccgtggtggagttcgcccccttccagaagatcgccaagaagaagctgagaaagaaggacgccaagaccggcagcatcgaggacgaccccgagtacaagaagttcctggagacctactgcgtggaggaggagaagaccagcgccaaccccgagaccctgctgggcgagatggaggccaagaccagagagctgatcgccagaagaaccacccccctgctggagtacatcaagaacagaaagctggagaagcagagaatcagagaggagaagagagaggagagaagaagaagagagctggagaagaagagactgagagaggaggagaagagaagaagaagagaggaggagagatgcaagaagaaggagaccgacaagcagaagaagatcgccgagaaggaggtgagaatcaagctgctgaagaagcccgagaagggcgaggagcccaccaccgagaagcccaaggagagaggcgaggagatcgacaccggcggcggcaagcaggagagctgcgcccccggcgccgtggtgaaggccagacccatggagggcagcctggaggagccccaggagaccagccacagcggcagcgacaaggagcacagagacgtggagagaagccaggagcaggagagcgaggcccagagataccacgtggacgacggcagaagacacagagcccaccacgagcccgagagactgagcagaagaagcgaggacgagcagagatggggcaagggccccggccaggacagaggcaagaagggcagccaggacagcggcgcccccggcgaggccatggagagactgggcagagcccagagatgcgacgacagccccgcccccagaaaggagagactggccaacaaggacagacccgccctgcagctgtacgaccccggcgccagattcagagccagagagtgcggcggcaacagaagaatctgcaaggccgagggcagcggcaccggccccgagaagagagaggaggccgagtag

SEQ ID NO: 213837 - DNA, 1431 bp, Artificial Sequence
  derived and/or modified sequence
atgcggagcgaaaaagagggggccggcggcttaagagccgcggtggctgctcgcggtccttccgggcgcgagaaacttagtgccctggaggtccagtttcatagggattcacaacaacaggaggccgagacccccccaacctctagctcaggctgtggcgggggagcaggcaagccccgcgaggaaaagcgaaccgctttgtccaaagtcgtgattaggagacttcccccagggcttacgaaggagcagctggaggaacagctgaggcctttgcccgcgcacgactacttcgagtttttcgccgctgatctgtcgctctacccccacctttacagtcgcgcgtatatcaatttccgcaatcccgacgacatactgctcttccgtgacagattcgatgggtacatcttcctcgattccaaggggctcgagtaccccgccgttgtggaatttgctccatttcagaaaattgctaagaaaaagctccggaagaaagatgccaagacaggttctatcgaggatgaccctgagtacaagaagtttctggaaacatactgcgttgaagaagaaaaaaccagtgccaaccccgagacactgctcggcgagatggaggccaagacaagggagctcattgcaaggaggaccaccccattattagagtacattaaaaacaggaaattagagaaacaacgaattagagaagaaaagcgggaggaaaggcgccggagggaactcgagaaaaaacgtctcagagaggaagagaagcgcagaagacgggaagaagagcggtgtaaaaaaaaggagaccgataaacagaagaagatcgctgagaaggaggtgcgcatcaagttattgaaaaagcctgagaaaggtgaggagcccactacagagaagccaaaagaaagaggcgaagagatcgacacaggcggcggtaagcaagagagttgtgcccctggagcagtcgtgaaggcaaggcctatggagggctcactcgaggagccacaggagacatcccactcaggatctgacaaagagcaccgagatgtcgaaagaagccaggagcaggaatccgaagcccaaagatatcacgtggatgacgggcggcgacacagagcacaccacgagccagaaagactgagtcgacgtagtgaggatgagcagcggtgggggaaaggtcctgggcaggaccgtgggaaaaaaggaagtcaggattcaggcgcaccaggagaggctatggaacggctcggaagggcccaaaggtgtgatgactctccagccccgagaaaggagagactcgccaataaagacaggcctgcattgcaactgtatgatcctggtgcacggttccgcgctcgagagtgcggaggaaacagaaggatttgtaaggctgaagggtctggtaccggcccagagaagcgggaggaagctgagtag

SEQ ID NO: 213838 - DNA, 1431 bp, Artificial Sequence
  derived and/or modified sequence
atgaggtctgagaaggagggcgctgggggcctgcgggctgctgtggccgcccggggccccagcggccgggagaagctgagcgccctggaggtgcagttccaccgggacagccagcagcaggaggccgagaccccacccaccagcagcagcggctgcggcggcggggccggcaagccccgggaggagaagaggacagccctgagcaaggtggtgatccggcggctgcccccaggcctgaccaaggagcagctggaggagcagctgcggcccctgcctgcccatgactactttgagttctttgctgctgacctgagcctgtacccccacctgtacagccgggcctacatcaacttcagaaatccagatgacatcctgctcttccgggacagatttgatggctacatcttcctggacagcaagggcctggagtacccagctgtggtggagtttgcccccttccagaagatcgccaagaagaagctgaggaagaaggatgccaagacaggcagcattgaagatgatcctgagtacaagaagttcctggagacctactgtgtggaggaggagaagaccagcgccaaccctgagaccctgctgggggagatggaggccaagacccgggagctgattgcccggaggaccacccccctgctggagtacatcaagaacaggaagctggagaagcagaggatccgggaggagaagcgggaggagaggagaagaagagagctggagaagaagaggctgcgggaggaggagaagagaagaagaagagaggaggagcgctgcaagaagaaggagacagacaagcagaagaagattgctgagaaggaggtgcgcatcaagctgctgaagaagccagagaagggggaggagcccaccacagagaagcccaaggagcggggggaggagattgacacaggaggcggcaagcaggagagctgtgcccctggagctgtggtgaaggcccggcccatggagggcagcctggaggagccccaggagaccagccacagcggcagtgacaaggagcacagagatgtggagaggagccaggagcaggagagcgaggcccagcgctaccacgtggatgatggaagaagacaccgggcccaccacgagcctgagcggctgagccgccgctcagaagatgagcagcgctggggcaagggccctggccaggaccggggcaagaagggcagccaggacagcggggcccctggagaggccatggagcggctgggccgggcccagagatgtgatgacagccctgcccccaggaaggagcggctggccaacaaggacaggcctgccctgcagctgtatgaccccggggcccgcttccgggcccgggagtgtggcggcaacagacgcatctgcaaggccgagggcagcggcactggacctgagaagcgggaggaggccgagtag

SEQ ID NO: 213839 - DNA, 1431 bp, Artificial Sequence
  derived and/or modified sequence
atgcggagcgagaaggagggcgccggcggcctgcgggccgccgtggcagcaagaggcccatcaggacgggagaagcttagcgccctcgaagtgcagttccaccgcgactctcagcagcaagaggccgagacgccccctacaagctctagcgggtgcggaggaggggcagggaagcctagagaggaaaagcgaactgctttgagcaaggtcgttattagaaggctgcccccaggcctgacaaaggaacagttggaggagcagttacggccactccctgcccacgactacttcgagttttttgctgctgacttgtccctatacccgcatctttacagccgcgcttacattaacttcagaaacccagatgacatactcctgttccgtgatcggtttgacggttatatctttctggatagcaaaggcctcgaatacccagccgtggttgaattcgctccattccagaaaatcgctaaaaagaaactaagaaaaaaagacgccaaaaccggttcgatcgaggacgatccagagtataagaaatttctcgagacttactgcgtcgaagaggagaagacctccgcgaacccagaaacgttactgggggaaatggaggccaagaccagagagcttatcgcgcgccggacaacccctctgcttgagtacattaaaaacaggaagttggaaaagcagagaattagggaggaaaagagggaagaaaggcgccggagggagcttgaaaagaaacgcctgcgggaggaggaaaaacgtaggagacgggaagaggaaagatgtaagaagaaggagacagataagcagaagaaaattgctgagaaagaggtgcggatcaaactgctaaagaagccagaaaagggcgaagaaccaacaacagagaagcccaaagaacgcggtgaggagatcgatacaggcggcggcaagcaggagtcctgtgcccctggcgctgtggtgaaggcgagacctatggagggaagcctggaggagcctcaggagaccagccattccggttccgacaaggagcatcgagatgtcgagagaagccaggagcaagagtctgaggcacagcgttatcacgtcgacgacggccgacggcatcgagctcaccatgaaccagagcgattgagccgccgttctgaggacgaacaaagatggggcaaaggccccgggcaagaccggggtaaaaaaggttcccaggattcgggagcacccggtgaagccatggagaggctcggtcgcgcgcagcgttgcgatgacagcccagcccccaggaaggagcgtttggctaataaggaccgcccagccttgcagctgtacgatccaggagcaagatttagggccagagagtgtggcggaaaccgccgtatctgtaaggcggagggctccggcacaggtccagagaagcgtgaagaagcagagtag

SEQ ID NO: 213840 - DNA, 1431 bp, Artificial Sequence
  derived and/or modified sequence
atgcggtcagagaaagagggggcaggtgggttgagagccgcagttgccgctcgaggacctagcggcagggaaaagctgtccgccctcgaggtccagtttcaccgggactctcaacagcaggaggccgagacaccacccacttcgtcttcagggtgtggcggaggcgcaggtaagcctcgcgaagaaaaaaggaccgccctttcaaaagtcgttatcagaaggttgccacctgggttgactaaggaacaacttgaagaacagctgagaccgctcccagcgcacgactattttgaattttttgccgctgacctgtccttatacccccacttatactcccgcgcatacatcaattttcggaatccagatgatattctactgtttagggataggtttgatgggtacattttcctggatagtaagggcttggaatacccggcagtagttgaattcgccccttttcaaaagattgcaaagaaaaagctgaggaagaaagatgcaaaaacgggaagtatcgaggacgaccccgaatataagaagtttctggaaacctactgtgttgaagaagagaagacttcggccaatccggagactctgctgggtgaaatggaggcgaaaacccgtgaactgatcgcacgaaggacaactccactcctggagtatattaagaacaggaaactagagaagcagagaataagggaggaaaagagagaagaacggagacgacgagagttagagaagaagaggctccgcgaggaagagaaaagacgcaggcgagaggaggaacggtgcaaaaaaaaagagaccgacaagcaaaaaaagattgcggagaaggaagtccgcatcaaattgttaaagaagcccgagaaaggagaggagcccaccaccgagaaacctaaagaacggggtgaagaaatcgacactggtgggggaaagcaagagagctgtgcgccaggtgctgtggtgaaggctcgacccatggaaggaagtctggaggaaccgcaagagacttcccactccggaagtgacaaggagcaccgtgatgtcgaacggagtcaggaacaagagtcagaggctcaacgttaccacgtcgacgacgggaggagacaccgagcgcaccacgagccagagaggctttctcgcaggtccgaggatgagcagcgctggggcaaaggtcccggacaggacaggggcaaaaagggcagtcaggatagcggtgccccaggcgaggcgatggagagactcggacgagctcagcgctgtgacgatagtcccgcaccacggaaagaaaggctggcaaacaaggaccgaccagccctacagctgtacgatcctggcgctcgtttcagagccagagagtgcgggggtaacagacgcatttgtaaagcggaaggctccggcacgggtcccgagaagcgcgaggaggcagagtag

SEQ ID NO: 213841 - DNA, 2378 bp, Artificial Sequence
  derived and/or modified sequence
agctctcgcgaggtttcgtcgggggctggcggctgcggctcggcggagagtgcggcatgcgctcggaaaaggagggggccggaggccttcgggcggccgttgccgcgcggggcccgagcgggagggagaagctgtcggccctagaagtgcagttccaccgcgactcgcagcagcaggaggctgagacgccgccaacttcgtcctccggttgcgggggcggtgcgggcaaacctcgcgaggagaagaggacggccctgagcaaggtggtcatccgccgcctgcctccgggcctcaccaaggagcagctggaggagcagctgcgcccgctgccagcacacgactacttcgagttcttcgccgccgacctgagtctttatcctcatctctactcaagagcatacattaattttaggaatcctgatgacatccttctttttagagatcgttttgatggatatatcttccttgacagcaaaggcctagaatatcctgcagtggtagagtttgctccattccagaagatagccaaaaagaagctgagaaaaaaagatgccaagactggaagcatcgaagatgatccagaatataagaagtttttagaaacctactgtgtggaggaagagaagaccagtgccaaccctgagactctgctgggggagatggaggcgaagacaagagagctcattgctagaagaaccacacctcttttggaatatattaaaaatagaaaattagaaaagcagagaattcgagaagagaagcgagaagaacggaggaggagagagttagaaaagaaacgtttgcgggaagaggaaaaaagaagaagaagagaagaagaaagatgcaaaaaaaaagagacagataaacagaagaaaattgcagagaaagaagtaaggattaagcttcttaagaaaccagaaaagggagaggaaccaaccacagagaaaccaaaagaaagaggagaggagattgatactggaggtggcaagcaggaatcctgtgcccccggtgcagtcgtaaaagccaggcccatggaaggctcgctggaggagccccaggagacgtcacacagcggcagtgataaagagcacagggatgtggagagatctcaagaacaagaatctgaagcacaaagataccatgtggatgacggcaggaggcacagagctcaccacgagcctgaacggctttccagaaggagtgaggatgagcagagatgggggaaaggacctggccaagacagagggaagaaggggagccaggacagcggggctccgggggaggccatggagagactgggaagagcgcagaggtgtgacgacagtccagcacccagaaaagagcgactggcaaacaaggaccggccagccttgcagctgtatgatccaggagctcgcttccgagcgcgagagtgtggcggaaacaggaggatctgcaaggcagaaggttcggggactggtcctgagaagagggaagaggcagagtgagtcactgcacgcacctggcctccatggacgagcaagggcatcccagaaacgtgtaaatgaccccgagtgtgactgggaaggagaacttattccttaccaggaaactggaagctaaaaatacagagggtgacgtagaaacacgcagaaaccattctaaagaaagtagtgatcttgtattaaattgagcagaattctcacagattttaccattcctgttataaactagtatttgttgtttagccaaaacagaaaatgatttccactggacagtagaaaaatatgtgtaaaatagggaagaaagttagtattggatcagtgtgagtcctgaagcactttcagtgctgtgagaacgacatccactttgggtttcattcgtttgtaagcagaggagctgtcagtcactcgtgcttctcggtggcctctgagccatggtgtcgagtgaagagtagttcttgtttgttacaacctttgtgagtcagccatgcccgcaaagcgtgctgtgttttagtcctggtaggaatatttatcagagttcacactatataaaacccaacagcttcaactattgccctttcaacagttttgccactgaccggatagaaacggtttcagtctctggatggatgtgtttgtggtttgtaaccattacggtttaaaccatggtttaagaatttgcccaaataacagaaattttgttcgggaagggataaactagatatagcatacagagcctgtttttgagttttagatactttatttgtaaataacttaaaatagctttctgaaaccgtgcattctgtagtttcttcctttcagtgaaattgctaaatgtcaatgtatttttggcactgcgattttaaccatttattaaataaaaattttgttaaagaa

SEQ ID NO: 213842 - DNA, 1464 bp, Artificial Sequence
  derived and/or modified sequence
ggaaaaggagggggccggaggccttcgggcggccgttgccgcgcggggcccgagcgggagggagaagctgtcggccctagaagtgcagttccaccgcgactcgcagcagcaggaggctgagacgccgccaacttcgtcctccggttgcgggggcggtgcgggcaaacctcgcgaggagaagaggacggccctgagcaaggtggtcatccgccgcctgcctccgggcctcaccaaggagcagctggaggagcagctgcgcccgctgccagcacacgactacttcgagttcttcgccgccgacctgagtctttatcctcatctctactcaagagcatacattaattttaggaatcctgatgacatccttctttttagagatcgttttgatggatatatcttccttgacagcaaaggcctagaatatcctgcagtggtagagtttgctccattccagaagatagccaaaaagaagctgagaaaaaaagatgccaagactggaagcatcgaagatgatccagaatataagaagtttttagaaacctactgtgtggaggaagagaagaccagtgccaaccctgagactctgctgggggagatggaggcgaagacaagagagctcattgctagaagaaccacacctcttttggaatatattaaaaatagaaaattagaaaagcagagaattcgagaagagaagcgagaagaacggaggaggagagagttagaaaagaaacgtttgcgggaagaggaaaaaagaagaagaagagaagaagaaagatgcaaaaaaaaagagacagataaacagaagaaaattgcagagaaagaagtaaggattaagcttcttaagaaaccagaaaagggagaggaaccaaccacagagaaaccaaaagaaagaggagaggagattgatactggaggtggcaagcaggaatcctgtgcccccggtgcagtcgtaaaagccaggcccatggaaggctcgctggaggagccccaggagacgtcacacagcggcagtgataaagagcacagggatgtggagagatctcaagaacaagaatctgaagcacccagaaaagagcgactggcaaacaaggaccggccagccttgcagctgtatgatccaggagctcgcttccgagcgcgagagtgtggcggaaacaggaggatctgcaaggcagaaggttcggggactggtcctgagaagagggaagaggcagagtgagtcactgcacgcacctggcctccatggacgagcaagggcatcccagaaacgtgtaaatgaccccgagtgtgactgggaaggagaacttattccttaccaggaaactggaagctaaaaatacagagggtgacgtagaaacacgcagaaaccattctaaagaaagtagtgatcttgtattaaattgagcagaattctcacagattttaccattcctgttataaactagtatttgttgtttagcc

SEQ ID NO: 213843 - protein, 434 aa, Artificial Sequence
  derived and/or modified sequence
MAASDTERDGLAPEKTSPDRDKKKEQSEVSVSPRASKHHYSRSRSRSRERKRKSDNEGRKHRSRSRSKEGRRHESKDKSSKKHKSEEHNDKEHSSDKGRERLNSSENGEDRHKRKERKSSRGRSHSRSRSRERRHRSRSRERKKSRSRSRERKKSRSRSRERKKSRSRSRERKRRIRSRSRSRSRHRHRTRSRSRTRSRSRDRKKRIEKPRRFSRSLSRTPSPPPFRGRNTAMDAQEALARRLERAKKLQEQREKEMVEKQKQQEIAAAAATGGSVLNVAALLASGTQVTPQIAMAAQMAALQAKALAETGIAVPSYYNPAAVNPMKFAEQEKKRKMLWQGKKEGDKSQSAEIWEKLNFGNKDQNVKFRKLMGIKSEDEAGCSSVDEESYKTLKQQEEVFRNLDAQYEMARSQTHTQRGMGLGFTSSMRGMDAV

SEQ ID NO: 213844 - protein, 1042 aa, Artificial Sequence
  derived and/or modified sequence
MELQKGKGAAAAAAASGAAGGGGGGAGAGAPGGGRLLLSTSLDAKDELEERLERCMSIVTSMTAGVSEREANDALNAYVCKGLPQHEEICLGLFTLILTEPAQAQKCYRDLALVSRDGMNIVLNKINQILMEKYLKLQDTCRTQLVWLVRELVKSGVLGADGVCMTFMKQIAGGDVTAKNIWLAESVLDILTEQREWVLKSSILIAMAVYTYLRLIVDHHGTAQLQALRQKEVDFCISLLRERFMECLMIGRDLVRLLQNVARIPEFELLWKDIIHNPQALSPQFTGILQLLQSRTSRKFLACRLTPDMETKLLFMTSRVRFGQQKRYQDWFQRQYLSTPDSQSLRCDLIRYICGVVHPSNEVLSSDILPRWAIIGWLLTTCTSNVAASNAKLALFYDWLFFSPDKDSIMNIEPAILVMHHSMKPHPAITATLLDFMCRIIPNFYPPLEGHVRQGVFSSLNHIVEKRVLAHLAPLFDNPKLDKELRAMLREKFPEFCSSPSPPVEVKIEEPVSMEMDNHMSDKDESCYDNAEAAFSDDEEDLNSKGKKREFRFHPIKETVVEEPVDITPYLDQLDESLRDKVLQLQKGSDTEAQCEVMQEIVDQVLEEDFDSEQLSVLASCLQELFKAHFRGEVLPEEITEESLEESVGKPLYLIFRNLCQMQEDNSSFSLLLDLLSELYQKQPKIGYHLLYYLRASKAAAGKMNLYESFAQATQLGDLHTCLMMDMKACQEDDVRLLCHLTPSIYTEFPDETLRSGELLNMIVAVIDSAQLQELVCHVMMGNLVMFRKDSVLNILIQSLDWETFEQYCAWQLFLAHNIPLETIIPILQHLKYKEHPEALSCLLLQLRREKPSEEMVKMVLSRPCHPDDQFTTSILRHWCMKHDELLAEHIKSLLIKNNSLPRKRQSLRSSSSKLAQLTLEQILEHLDNLRLNLTNTKQNFFSQTPILQALQHVQASCDEAHKMKFSDLFSLAEEYEDSSTKPPKSRRKAALSSPRSRKNATQPPNAEEESGSSSASEEEDTKPKPTKRKRKGSSAVGSDSD

SEQ ID NO: 213845 - DNA, 4506 bp, Artificial Sequence
  derived and/or modified sequence
ccttccactatggccgcttctgtgtggtgtggggagacgctggtcctccccgtcctcccatagcgcttattgcctcaccctcaccccctaggggccggatccaaaggcgctgcactccccaagccttggggcatcagccaggaaggtttcctacctcctaattcaggggcaggactcctcttttccccccacggggaaaagaggcagaaacttaggggtttccctcctttcttagggtcagacgctcttagggtccacttcttcaggggcggaagcctctcctacccttcccatagggacacaggcctttaccccactgtacttcggagccaacgcctttccctcagcactgccaccccagagtcaggacccagaggactgtgccttcgcccccaacgcaggcgcggccttttggagaggagggaggagtggagaggacaggggcccttgctctcccctccccaacttgttcctcttgccccccagtccctggcaatccagagatcccgatatctaggactgtccatccatccactccctgaccttttcccggctcctggctgcagccatggagttgcagaagggaaaaggggcggcagcagcagcagctgcttcgggagcagcgggaggtggaggaggaggagcgggagcaggagccccaggaggggggaggctgctactttcaaccagtttggatgccaaggatgagttagaggagagattggaaaggtgtatgagcattgtgacatcgatgactgctggtgtctcggagagagaagccaatgatgccctcaatgcgtatgtgtgcaaaggcctcccccagcatgaagaaatctgcctgggcctgtttactctcatcctcactgaacctgcccaagcccagaagtgttaccgggacttagctctggtgagtcgtgatggcatgaatattgtcctgaataaaatcaaccagatacttatggagaagtacctgaagctgcaggatacctgccgtactcagttggtgtggttggtacgggaactggtgaagagtggggttctgggagccgatggtgtttgtatgacgtttatgaagcagattgcaggtggagatgttacagccaaaaatatctggttggcagaaagtgttctggatatcctgacagagcaaagggagtgggtcctgaagagcagcatcctcattgccatggctgtttacacgtacctccgcctcatcgtggaccaccatgggactgcccagctccaggccctgcgacagaaggaagtagacttctgcatctcactgcttcgggaacggttcatggaatgtctgatgattggtcgggatctcgtaagactacttcagaatgttgctaggataccagaatttgaactgctttggaaagatattatccataatcctcaggccttgagtcctcagttcacaggtatcctacagcttcttcagtcaagaacatcccgaaaattcctagcatgtcgtctaaccccggacatggagactaaactcctcttcatgacatcccgggtgcgatttggtcaacaaaagcgataccaagattggttccagcgccagtacctgtcaactccagatagtcagtctctgcgctgtgacctcattcgctacatctgtggggtagtccacccttctaatgaagtactgagttcagatatcttgccccggtgggccatcattggttggctcctgacaacgtgcacgtcaaatgtcgctgcctccaatgccaagctggctttgttttatgactggctgttctttagtccagacaaggatagcattatgaacatagaaccagccatcctggtcatgcaccactccatgaagccccacccagccatcactgccacactcctggacttcatgtgccgcatcattcccaacttctatccaccattggagggccacgtgcggcagggtgtcttttcctccctcaaccacattgtggagaaacgggtcttggcacacctagctcccctgtttgacaaccctaagttggataaggagctgcgggcaatgctgagagagaagtttcctgagttctgcagctcaccctccccacctgtggaagtcaaaattgaggagccagtttccatggagatggacaaccatatgtcggataaggatgagagttgctatgacaatgcagaggcagccttcagtgacgatgaagaggatctcaacagcaaaggaaagaagagggagtttcgcttccaccctatcaaggagacagttgtggaggagccagttgatatcaccccttaccttgaccagttggatgagtccctgagggacaaagtactccagctacagaaggggagtgatacggaggcccagtgtgaggtcatgcaggaaattgtggaccaggtcctggaggaagactttgactcggagcagctgtctgtccttgcttcctgcctacaggagctcttcaaggcccactttcgaggggaggtcctgcctgaggagattactgaggagtccctggaggagtctgtaggaaagcctctgtacctaatatttaggaacctatgtcagatgcaggaagacaacagcagcttctctctacttctagaccttctctccgagctatatcagaagcagcccaagattggctaccacctgctctactacctgagggccagcaaagccgccgcagggaagatgaacctgtacgagtcatttgcccaggctacccagctgggcgatctgcacacctgcctgatgatggacatgaaggcctgccaggaggacgatgtgcggctcctgtgccacctcacgccctccatctacacagagtttccagatgaaaccttgaggagcggagagctgctgaacatgatcgtggctgttattgactctgcacagctccaggagctggtctgccacgtgatgatgggtaacctggttatgtttcgaaaagactcagttctcaacatactcattcagagcctagactgggagacctttgagcagtattgtgcctggcagctctttctggcccacaatattcccctggagaccataatccccatcctgcagcacctcaaatacaaggagcacccagaggccctgtcctgcctactgcttcaactccgaagagaaaagcccagcgaggagatggtgaagatggtgctgagccggccctgccatcctgacgaccagttcaccaccagcatcctgcggcactggtgcatgaaacatgacgagctgctggccgagcacatcaagtccctgctcatcaagaacaacagcctgcctcgcaagagacagagcctgaggagctctagcagcaagctggcccagctgactctggagcagatcctggagcacttggacaatctgcggctcaacctgaccaacaccaagcagaacttttttagccagacgccaattctccaggcgctgcagcatgtccaagcgagctgtgacgaagcccacaagatgaaattcagtgatctcttctccctggcggaggaatatgaggactcttccaccaagccacccaagagccggcgaaaagcagctctgtccagccctcgaagtcgaaagaatgccacacagccccccaatgccgaagaagagtcgggctccagcagtgcttcagaagaggaagacacgaaaccgaagcctaccaagcggaaacgaaaagggtcctctgcagtgggctctgacagtgactgaggccctgcattccccatcccacccccggctggactgccctctccttcttggtgattcaaaggttaatagaggctgaggagattgcaggggaaacacccttgctgcatccccaagctcccccggtggaaggaggagctttctcctctggctgagtttgagaagctgccatgcagcccctagccccttccctcctcctggggcctccagcccctcacactgctgttcccagtgatatttgggatctgactgaagccagaggctctgtaaaatcagaccatagtggaagtcctcagccccctggccccttccgcaatctcctcccccagtctcccaaagagccatttcaacagagaagggaaatgacaaaggggcagctggccagataagctaggatgagagcagagactcagtgtgtgggtgtcccttcctgcttccccttcaggtcttggtttgttctgaagggacgttttatagtcactatccacatgccagtgtgaaatgggcatctatgacgtggtcagggtgtccattcctaatcatggggcagatgccacaagcattcagaaaggagtctgaaagggtggccacagccccacgtggtgtgccctggaggcttaggttggtctgaggttggcacctcaatctacaccagagcccagggagtcccagaggcaagtttcacagaattgtcaaatgatcccatttccttgagtctgtttttttttttgtttttttttgttttttttttggcagagataatcgtgtcttaaaagttgtttttaaatgacaataaaacaagccagaatgtc

SEQ ID NO: 213846 - DNA, 3597 bp, Artificial Sequence
  derived and/or modified sequence
tggtgtggggagacgctggtcctccccgtcctcccatagcgcttattgcctcaccctcaccccctaggggccggatccaaaggcgctgcactccccaagccttggggcatcagccaggaagtccctggcaatccagagatcccgatatctaggactgtccatccatccactccctgaccttttcccggctcctggctgcagccatggagttgcagaagggaaaaggggcggcagcagcagcagctgcttcgggagcagcgggaggtggaggaggaggagcgggagcaggagccccaggaggggggaggctgctactttcaaccagtttggatgccaaggatgagttagaggagagattggaaaggtgtatgagcattgtgacatcgatgactgctggtgtctcggagagagaagccaatgatgccctcaatgcgtatgtgtgcaaaggcctcccccagcatgaagaaatctgcctgggcctgtttactctcatcctcactgaacctgcccaagcccagaagtgttaccgggacttagctctggtgagtcgtgatggcatgaatattgtcctgaataaaatcaaccagatacttatggagaagtacctgaagctgcaggatacctgccgtactcagttggtgtggttggtacgggaactggtgaagagtggggttctgggagccgatggtgtttgtatgacgtttatgaagcagattgcaggtggagatgttacagccaaaaatatctggttggcagaaagtgttctggatatcctgacagagcaaagggagtgggtcctgaagagcagcatcctcattgccatggctgtttacacgtacctccgcctcatcgtggaccaccatgggactgcccagctccaggccctgcgacagaaggaagtagacttctgcatctcactgcttcgggaacggttcatggaatgtctgatgattggtcgggatctcgtaagactacttcagaatgttgctaggataccagaatttgaactgctttggaaagatattatccataatcctcaggccttgagtcctcagttcacaggtatcctacagcttcttcagtcaagaacatcccgaaaattcctagcatgtcgtctaaccccggacatggagactaaactcctcttcatgacatcccgggtgcgatttggtcaacaaaagcgataccaagattggttccagcgccagtacctgtcaactccagatagtcagtctctgcgctgtgacctcattcgctacatctgtggggtagtccacccttctaatgaagtactgagttcagatatcttgccccggtgggccatcattggttggctcctgacaacgtgcacgtcaaatgtcgctgcctccaatgccaagctggctttgttttatgactggctgttctttagtccagacaaggatagcattatgaacatagaaccagccatcctggtcatgcaccactccatgaagccccacccagccatcactgccacactcctggacttcatgtgccgcatcattcccaacttctatccaccattggagggccacgtgcggcagggtgtcttttcctccctcaaccacattgtggagaaacgggtcttggcacacctagctcccctgtttgacaaccctaagttggataaggagctgcgggcaatgctgagagagaagtttcctgagttctgcagctcaccctccccacctgtggaagtcaaaattgaggagccagtttccatggagatggacaaccatatgtcggataaggatgagagttgctatgacaatgcagaggcagccttcagtgacgatgaagaggatctcaacagcaaaggaaagaagagggagtttcgcttccaccctatcaaggagacagttgtggaggagccagttgatatcaccccttaccttgaccagttggatgagtccctgagggacaaagtactccagctacagaaggggagtgatacggaggcccagtgtgaggtcatgcaggaaattgtggaccaggtcctggaggaagactttgactcggagcagctgtctgtccttgcttcctgcctacaggagctcttcaaggcccactttcgaggggaggtcctgcctgaggagattactgaggagtccctggaggagtctgtaggaaagcctctgtacctaatatttaggaacctatgtcagatgcaggaagacaacagcagcttctctctacttctagaccttctctccgagctatatcagaagcagcccaagattggctaccacctgctctactacctgagggccagcaaagccgccgcagggaagatgaacctgtacgagtcatttgcccaggctacccagctgggcgatctgcacacctgcctgatgatggacatgaaggcctgccaggaggacgatgtgcggctcctgtgccacctcacgccctccatctacacagagtttccagatgaaaccttgaggagcggagagctgctgaacatgatcgtggctgttattgactctgcacagctccaggagctggtctgccacgtgatgatgggtaacctggttatgtttcgaaaagactcagttctcaacatactcattcagagcctagactgggagacctttgagcagtattgtgcctggcagctctttctggcccacaatattcccctggagaccataatccccatcctgcagcacctcaaatacaaggagcacccagaggccctgtcctgcctactgcttcaactccgaagagaaaagcccagcgaggagatggtgaagatggtgctgagccggccctgccatcctgacgaccagttcaccaccagcatcctgcggcactggtgcatgaaacatgacgagctgctggccgagcacatcaagtccctgctcatcaagaacaacagcctgcctcgcaagagacagagcctgaggagctctagcagcaagctggcccagctgactctggagcagatcctggagcacttggacaatctgcggctcaacctgaccaacaccaagcagaacttttttagccagacgccaattctccaggcgctgcagcatgtccaagcgagctgtgacgaagcccacaagatgaaattcagtgatctcttctccctggcggaggaatatgaggactcttccaccaagccacccaagagccggcgaaaagcagctctgtccagccctcgaagtcgaaagaatgccacacagccccccaatgccgaagaagagtcgggctccagcagtgcttcagaagaggaagacacgaaaccgaagcctaccaagcggaaacgaaaagggtcctctgcagtgggctctgacagtgactgaggccctgcattccccatcccacccccggctggactgccctctccttcttggtgattcaaaggttaatagaggctgaggagattgcaggggaaacacccttgctgcatccccaagctcccccggtggaaggaggagctttctcctctggctgagtttgagaagctgccatgcagcccctagccccttccctcctcctggggcctccagcccctcacactgctgttcccagtgatatttgggatctgactgaagccagaggctctgt

SEQ ID NO: 213847 - DNA, 3129 bp, Artificial Sequence
  derived and/or modified sequence
atggagctgcagaaaggtaagggagcggccgctgcagccgcagccagcggcgccgcaggcggggggggtggcggcgcaggggccggggctcccggcggcggtcggctactgctgagtacgtcactggatgccaaggatgagctagaggagcgcctggagaggtgcatgtctatcgtaactagcatgacggcgggcgtctctgagagagaggccaacgacgctttgaatgcgtatgtgtgcaagggcctcccgcagcatgaggagatttgcctcggtctatttacgcttattcttacagagcctgcacaggctcagaaatgttatagggacctggctctggtctccagggacggcatgaatatcgtattaaataagattaatcaaatcctgatggagaagtatctgaagctccaggacacgtgccggacacaactagtttggctcgtgagggaactcgtgaagagtggcgtgctcggagcagatggcgtatgcatgacttttatgaaacagatcgccggaggtgacgtcaccgctaagaacatatggcttgccgagtccgttctagacatcctgacagagcaacgggagtgggtgttgaagagttccattctgattgccatggcggtctatacatatttgcgactgatcgtagaccatcatggaactgcacagttgcaggcactcagacagaaggaagtggatttctgcatatctcttctgcgcgaacgattcatggaatgtttgatgatcggacgcgacctggtccgacttttacagaatgttgctcggatcccagagtttgagcttttgtggaaagacattattcacaacccgcaggcgcttagcccccagttcacaggtattcttcagctattgcagtcacgaacctcaaggaagtttctggcttgtagactgaccccggatatggaaaccaagctcttgttcatgacttctagagttaggtttggacagcagaaaaggtatcaggactggtttcagcgccaatatctctctacccccgactctcagtcactgcgatgtgatctgattcggtacatctgcggagttgtgcaccctagtaatgaggtactttcgagtgatatcttgcctcgttgggccattatcggatggctattgaccacctgtacaagtaacgtggcagcttccaacgccaagctggctctgttctatgactggttgttttttagtcccgacaaggacagtatcatgaacatcgaacccgccatcctggtgatgcaccactccatgaaaccccacccggctattacagcaaccctgctcgactttatgtgtcgcataattccaaacttttatccacctcttgagggccatgtgcgtcaaggcgtcttcagctcacttaatcatatcgtcgaaaagagagtcctggctcatttggcgcccttgtttgacaacccaaaattggataaggaattacgtgccatgctacgcgaaaaatttcccgagttctgctcctcaccttcccctccggtcgaggtgaaaattgaggagccggtcagcatggagatggacaaccacatgagcgacaaggatgagtcgtgctatgataacgcagaggccgctttcagcgatgacgaggaggacctgaacagcaagggcaaaaaacgggagttcagatttcatccgattaaggagacagtagtggaagaaccagtcgatattacgccttatctcgaccagctggacgagtccttgcgggataaagtgctgcaactccaaaagggctccgacacggaagctcagtgcgaggtcatgcaggaaattgtggaccaggtcctggaggaagactttgattccgaacaactgtctgttctggctagctgtcttcaagagctgttcaaagcgcattttaggggggaagtgctgccagaggagattacagaggaatcgctggaggagtcagtgggtaagcctctttacctgattttccgcaacctttgccaaatgcaggaagacaattcttcattcagccttctcttagacctgctttcagagttataccaaaaacagccaaaaattgggtaccatttattgtactatcttagggcatctaaggctgccgctggaaaaatgaacttgtatgaaagcttcgcacaggccacccagctcggagacctccacacctgcctgatgatggacatgaaagcatgtcaggaggacgacgttagactgttgtgtcatttaactccttccatctataccgaatttcccgatgaaacccttcgtagcggcgagctcctaaacatgatcgtggccgtaatcgactctgcccagctgcaggaactggtatgccatgtgatgatgggaaatctagtgatgttcaggaaggattccgtgctcaacatcttgatccagagcctcgactgggagaccttcgagcagtactgcgcatggcagctttttctggcccacaatattcccctggagactataatacctattcttcaacacctaaagtacaaggagcatccagaggcattgagctgcctgctgttacaactcagaagagaaaaacctagtgaagagatggtgaaaatggtgctctctcgcccttgtcatccagacgatcaattcaccactagcatactgcgacactggtgtatgaaacacgatgagttactcgccgaacatataaaaagcttgctgatcaagaacaacagcctgccccgcaaaagacaaagtcttagaagttctagctccaagctcgcacagcttaccctggagcagatccttgagcacctggacaacctccgactgaatctgaccaatacaaagcagaacttcttctctcaaaccccgatactgcaggcactgcagcacgtccaggccagctgcgatgaagcccataagatgaaatttagcgatctttttagcctggccgaggaatatgaagattcctccactaagccccccaagagccgccggaaagccgctttgtcttcgccaaggtctcgcaaaaacgccacccagccccccaacgccgaggaagagagtggcagttcctctgctagcgaggaagaagacacaaagcctaaacccacaaagaggaaacgaaaaggatccagcgccgtcggctctgactctgattag

SEQ ID NO: 213848 - DNA, 3129 bp, Artificial Sequence
  derived and/or modified sequence
atggagctgcagaaaggcaagggcgccgccgccgccgcggccgcaagtggggccgccggaggggggggtggaggcgccggagccggcgcccctggcggtgggcgactgctgctgtccacatcactagacgctaaggacgagttagaggaaagactggagagatgcatgagcatcgtgacgtcaatgaccgccggcgtgagcgagcgggaagccaatgatgcactcaacgcatatgtgtgtaaggggctaccacagcacgaggagatctgcctgggtcttttcaccctgattcttactgaacccgcccaggcccagaagtgctaccgggatttagctttggtctcccgagatggcatgaatattgtactcaataaaattaaccaaatattgatggagaagtatcttaagctgcaggacacctgtcgaacacagctggtgtggctggtgagggaactagtcaaatcaggggtcctcggtgcggacggagtgtgcatgacatttatgaagcagatcgcagggggcgacgtgaccgccaagaacatctggttggccgaaagcgttcttgatattctgaccgaacagcgcgagtgggtattaaaaagctcgattcttattgccatggcggtgtacacgtatctcaggctaatcgtggaccatcatggaacggctcagctgcaggcactgcggcagaaagaagtagatttttgcattagtctgttacgcgaaagattcatggaatgcctcatgattgggcgggacctcgtgcggctgctgcagaatgttgccagaattcccgaattcgaactcctatggaaggacatcatccataatcctcaggcactgtcccctcaatttaccggcatcctccagttactgcaatcacgcaccagccggaagtttttggcttgccggttgacccctgacatggagaccaaactgctcttcatgacatccagggtgcgctttggccagcagaaaagataccaggactggttccagagacaatatcttagtacgccggatagccaatcactccgctgtgaccttatccgctatatttgcggtgtggtgcatccatctaatgaggtactaagttccgacatcctcccccgatgggccattatcgggtggcttctgactacctgtacgtccaacgtcgcagcctccaatgctaagcttgctttgttctatgactggctctttttttcgcctgacaaggatagcatcatgaatattgaaccggctattttggtgatgcatcattccatgaaaccccaccccgcaattacagcgacactgttagatttcatgtgtcggatcatccccaatttctaccccccactcgagggccacgtgcgacaaggggtcttttcttccctgaaccatattgtcgagaagcgcgtactcgcccacttggctcctttgtttgataaccccaaactggataaagagctgcgagccatgctgagagaaaaatttcctgaattctgctcaagccccagcccgcccgtggaggtgaagatcgaggaacccgtttccatggaaatggataatcacatgtcggacaaagatgagtcatgctatgacaatgctgaagcagcctttagtgacgatgaggaagaccttaactctaaggggaaaaaacgggaattcagatttcatcccattaaagagacagtggtcgaagagccagtggacattaccccgtatctggatcagctcgacgaaagcctgcgggataaggtgcttcagctgcagaagggtagcgacactgaagcgcaatgcgaagtcatgcaggagatagtggatcaggttttggaggaggacttcgattccgagcaactatccgtgctggcttcttgcctgcaggagctcttcaaagctcatttcagaggcgaggtactgcccgaagaaatcaccgaagaatccttggaggaatctgtcgggaaaccactttatctaatctttcggaacctgtgccagatgcaagaggataacagcagttttagcttattgctggatttgctgagcgaactttaccagaaacagccaaaaatagggtatcaccttctttattatttgagagcctctaaagcagccgccggcaaaatgaatctatatgaatcctttgcccaggctactcagctgggggacctgcatacatgcttaatgatggatatgaaggcatgccaggaagatgacgtgagacttctgtgtcacctgacaccaagtatttataccgagttccccgacgaaaccttgcggtccggtgaattgctaaatatgattgtcgccgtgatcgattcagcgcagcttcaggagctggtgtgtcacgttatgatgggtaacctcgtcatgtttcggaaagactctgtgctaaacatactgatccagagcttagactgggagactttcgaacagtactgtgcatggcagctgtttctggctcacaacatccctcttgagacaatcatcccgatactacagcacttaaaatataaagagcaccccgaggcgctttcttgtttattgttgcagctgcggagggaaaagcctagtgaggaaatggtaaagatggttctgagccgcccttgccatcccgacgaccagtttaccacctctatccttcggcattggtgtatgaagcacgatgaactcctggcagagcacataaaaagcttgctaatcaagaataatagtcttccccggaagagacagagtctgaggagttcctcaagtaagctggcccagttgacacttgaacagatattagaacatctcgataacttaaggctgaatcttaccaataccaaacaaaacttcttcagccaaactcccatcttgcaggcccttcaacatgtccaagcttcctgcgacgaggcgcataagatgaagtttagcgatctttttagccttgccgaggagtatgaagactccagcactaagcctcctaagagccgccgcaaggccgcgctgagtagtccccgatctagaaaaaatgcaacacagcctcccaacgctgaggaagagtcaggcagctccagcgcgtctgaggaggaagacacgaaaccaaagcctactaagagaaagcgaaaaggttcaagtgcagttgggtctgactcagactag

SEQ ID NO: 213849 - DNA, 3129 bp, Artificial Sequence
  derived and/or modified sequence
atggagctgcagaagggcaaaggagctgctgctgctgctgctgccagcggggctgctgggggcggcggcggcggggccggggccggggcccctgggggcggccgcctgctgctgagcaccagcctggatgccaaggatgagctggaggagcggctggagcgctgcatgagcatcgtgacctccatgacagctggggtgtctgagcgggaggccaatgatgccctgaatgcctacgtgtgcaagggcctgccccagcacgaggagatctgcctgggcctcttcaccctcatcctgacagagcccgcccaggcccagaagtgctacagagacctggccctggtgtccagagatggcatgaacatcgtgctgaacaagatcaaccagatcctgatggagaagtacctgaagctgcaggacacctgcaggacccagctggtgtggctggtgcgggagctggtgaagtctggagtgctgggcgcagatggagtgtgcatgaccttcatgaagcagattgctggaggagatgtgacagccaagaacatctggctggccgagagcgtgctggacatcctgacagagcagcgggagtgggtgctgaagagcagcatcctgattgccatggctgtgtacacctacctgcggctcatcgtggaccaccacggcacagcccagctgcaggccctgcggcagaaggaggtggacttctgcatcagcctgctgcgggagcgcttcatggagtgcctgatgattggccgggacctggtgcggctgctgcagaatgtggcccgcatccctgagtttgagctgctgtggaaggacatcatccacaacccccaggccctgagcccccagttcaccggcatcctgcagctgctgcagagcaggaccagcaggaagttcctggcctgccgcctgaccccagacatggagaccaagctgctcttcatgaccagccgggtgcgcttcggccagcagaagcgctaccaggactggttccagaggcagtacctgagcaccccagacagccagagcctgcgctgtgacctgatccgctacatctgtggggtggtgcaccccagcaatgaggtgctgagcagtgacatcctgccccgctgggccatcatcggctggctgctgaccacctgcaccagcaatgtggccgccagcaatgccaagctggccctcttctatgactggctgttcttctccccagacaaggacagcatcatgaacatcgagcccgccatcctggtgatgcaccacagcatgaagccccacccagccatcacagccaccctgctggacttcatgtgccgcatcatccccaacttctacccacccctggagggccacgtgcggcagggcgtcttcagcagcctgaaccacatcgtggagaagagggtgctggcccacctggcccccctgtttgacaaccccaagctggacaaggagctgcgggccatgctgcgggagaagtttcctgagttctgcagcagccccagcccccctgtggaggtgaagattgaggagcctgtgtccatggagatggacaaccacatgtctgacaaggatgagagctgctatgacaatgctgaggccgccttcagtgatgatgaggaggacctgaacagcaagggcaagaagcgggagttccgcttccaccccatcaaggagaccgtggtggaggagcctgtggacatcaccccctacctggaccagctggatgagagcctgcgggacaaggtgctgcagctgcagaagggcagtgacacagaggcccagtgtgaggtgatgcaggagatcgtggaccaggtgctggaggaggactttgacagcgagcagctgtctgtgctggccagctgcctgcaggagctgttcaaggcccacttccggggggaggtgctgcctgaggagatcacagaggagagcctggaggagagcgtgggcaagcccctgtacctgatcttcaggaacctgtgccagatgcaggaggacaacagcagcttcagcctgctgctggacctgctgtctgagctgtaccagaagcagcccaagattggctaccacctgctgtactacctgcgggccagcaaggctgctgctgggaagatgaacctgtatgagagctttgcccaggccacccagctgggggacctgcacacctgcctgatgatggacatgaaggcctgccaggaggatgatgtgcggctgctgtgccacctgacccccagcatctacacagagttcccagatgagaccctgcggagcggggagctgctgaacatgattgtggccgtgattgattctgcccagctgcaggagctggtgtgccacgtgatgatgggcaacctggtgatgttcaggaaggacagcgtgctgaacatcctgatccagagcctggactgggagacctttgagcagtactgtgcctggcagctgttcctggcccacaacatccccctggagaccatcatccccatcctgcagcacctgaagtacaaggagcaccctgaggccctgagctgcctgctgctgcagctgcggcgggagaagcccagcgaggagatggtgaagatggtgctgagccggccctgccacccagatgaccagttcaccaccagcatcctgcggcactggtgcatgaagcatgatgagctgctggccgagcacatcaagagcctgctgatcaagaacaacagcctgcccaggaagaggcagagcctgcggagcagcagcagcaagctggcccagctgaccctggagcagatcctggagcacctggacaacctgcggctgaacctgaccaacaccaagcagaacttcttcagccagacccccatcctgcaggccctgcagcacgtgcaggccagctgtgatgaggcccacaagatgaagttcagtgacctcttcagcctggccgaggagtatgaggacagcagcaccaagccacccaagagcaggaggaaggccgccctgagcagccccaggagcaggaagaatgccacccagcccccaaatgctgaggaggagagcggcagcagcagcgccagcgaggaggaggacaccaagcccaagcccaccaagaggaagaggaagggcagcagcgctgtgggcagtgacagcgactag

SEQ ID NO: 213850 - DNA, 3129 bp, Artificial Sequence
  derived and/or modified sequence
atggagctgcagaagggcaagggcgccgccgccgccgccgccgcctccggagcagctggggggggaggaggtggggccggggccggcgccccaggtggggggcgcctcctgctctcaacaagtctggatgccaaagatgagttagaagaacgccttgagagatgtatgtcaattgtgacatcaatgaccgctggggtgtctgaacgtgaagccaatgacgctctgaatgcatacgtgtgcaagggcctgcctcagcacgaggagatctgcctagggttatttacgctcatcctcactgaaccagcccaggctcagaagtgctatagagatctggccctagtgtcccgcgatggcatgaacatcgtcttgaacaagatcaaccaaatattgatggagaaataccttaagctgcaggacacatgccgcactcagttagtttggctcgttagggaactggttaaatcaggagtactaggggctgatggtgtctgtatgacattcatgaaacagatcgccggtggtgacgtgactgccaaaaatatttggctagcagaaagcgttctcgacatccttacagaacagcgcgagtgggttttaaaaagctcgatcctgatcgccatggctgtttatacatatctccgcttaattgtggatcaccatgggacagctcagctccaggccctgcggcaaaaagaagtcgatttctgcatcagcctgctgcgggagagattcatggagtgcttgatgatcggcagagatttagttcgcctcctccagaatgtggctagaatccctgagttcgagcttctgtggaaggatatcatacacaacccccaggcgctgtctccgcaatttacgggaattctgcagctcttacagagccggacatcaagaaaattcctggcatgtcgtctgactccagacatggagactaagctgttattcatgacatctagggtgaggtttgggcagcagaaaaggtatcaagattggtttcaacgccagtatctatctactccagatagccaatctctgcgctgcgacctgatacgctatatatgcggtgttgtccacccctcaaatgaagtactatcgtcagatatcctaccacggtgggcaatcatcggctggctgctcaccacatgcacttcaaacgtagccgcctctaacgctaagctggccctgttttatgactggcttttcttttcgcccgacaaagattccattatgaatatagagcctgctatcctcgtgatgcatcacagcatgaaacctcatcccgccattaccgcgacgctgttggatttcatgtgtaggataatccccaacttctacccgcccttagaaggccacgttcgacaaggggtgtttagctcccttaaccatatcgtggagaaacgggtacttgcacatctcgcgccattattcgacaaccctaaactcgataaggaactgcgggctatgctgcgggaaaaatttccagagttctgctcatcaccctcaccgcctgtggaagtcaaaatcgaggaacccgtatcaatggagatggacaaccacatgtctgacaaagacgagtcgtgctacgataatgcggaggctgcctttagtgatgacgaagaggatctgaattcaaagggcaagaagagagagtttagattccatccaattaaagaaaccgtagttgaagagcccgtggacatcaccccctacttggatcagctggatgagtcattgcgcgacaaagtgctccagctgcagaaaggaagcgacacagaggcacagtgcgaagtgatgcaggagattgtcgatcaggtgcttgaggaggacttcgactcagagcagctatcagtactcgcaagctgcctccaggaactatttaaagctcattttaggggggaagttctgcccgaggagattacggaggaaagcctggaggagtctgtaggcaagcccctgtatctgatttttagaaatctctgtcaaatgcaggaggataactcctcttttagtctgctcctcgacctcttgagcgaactttaccaaaagcagccaaaaataggctaccaccttttgtactatttgcgggcatctaaagctgctgccggcaagatgaacttgtatgaaagttttgcacaggccacccaattgggagatctgcacacatgtttgatgatggacatgaaggcttgccaagaagacgacgtgcggctgctgtgtcacctgacaccaagtatttacacagagttccccgacgagaccctgagatcgggggaactcttaaatatgattgtcgccgtgatcgattcagcccagcttcaggaactggtgtgtcacgttatgatggggaatctcgttatgttcagaaaagacagtgtgcttaacattttaatacagtccctggattgggagacttttgagcagtactgcgcgtggcaattattcttggcccacaatatcccactggaaaccatcatccccattctacaacacctaaagtacaaggaacacccagaggctctttcttgcttactgcttcagctgaggcgtgagaagccaagcgaggagatggtcaagatggtcctgagcagaccctgccatcctgacgaccaatttacaacttcaatcctgaggcattggtgcatgaagcacgacgagctgctcgcagaacacattaagagcctactcataaaaaataattctctccctaggaagcgacaatctctacgatcctctagctctaaactggctcagctgacactggaacagatcctggagcacctcgacaatttgaggctgaacttgactaatacaaaacagaactttttcagtcagaccccaatccttcaggccctgcagcatgtgcaagccagttgcgacgaagcacacaaaatgaaattcagcgatttgtttagtctggcagaagaatacgaagacagttccacaaagccccctaagtcaaggaggaaagctgctttgtccagcccccggagtcgcaagaacgccactcagcctcctaacgccgaagaagaaagtgggtccagctcagcctccgaagaagaggacacgaagcccaagccgaccaagcgcaaaaggaaggggagttccgcggtaggctccgattcagattag

SEQ ID NO: 213851 - DNA, 3129 bp, Artificial Sequence
  derived and/or modified sequence
atggagctgcagaagggcaagggcgccgccgccgccgccgccgcctcaggagccgctggcgggggtggcggtggggcaggagccggagcaccaggcggaggcagactcctcctgtctacctccctggacgcaaaagatgagctggaagaacgattggagcggtgcatgtccatcgttacctcaatgacagctggtgtttccgaacgcgaggccaacgacgccttaaatgcttacgtgtgcaagggactgccgcagcatgaagaaatctgtttgggtttgtttactctgatcctaacagaacctgctcaggcccagaagtgctaccgcgacctggccctggtttcacgcgacggcatgaacatcgttctgaataaaatcaaccagattctgatggagaaatacttgaagctgcaggatacatgcagaacacagctggtttggttggtgagggagctggtaaaatctggcgtcctcggcgccgatggggtgtgtatgacattcatgaaacaaattgccggcggagacgtgaccgcaaaaaatatttggctcgccgagtcggtcttggacattctcactgagcagcgggagtgggttctgaagtcctcgattctgatagccatggccgtatatacatacctgagactcattgtagatcaccatgggactgcccaactgcaggctctcaggcagaaagaagtagacttctgcatcagcctcttgcgagagcggttcatggagtgtcttatgattggtcgcgatctggtccgactgctgcagaacgtggcccgaattcccgagtttgaacttctttggaaggatatcattcacaaccctcaagcactttcccctcagttcactggcatcctgcagctcctgcagagtagaacaagtcgaaagttcctcgcatgtagattgactccagatatggagaccaagctgctttttatgacaagtagggtgagatttggccagcagaaaaggtaccaggactggttccagcgccagtatttgtccaccccggactcgcagtcactaaggtgcgatttgattcgctacatttgcggagtggtacatcctagcaatgaggtactgtccagcgacattttacctcggtgggcgataattggatggctgcttaccacttgcacaagcaacgtggcagccagcaacgccaagctcgcactgttctacgattggctgtttttctccccggataaggactccataatgaacatcgaaccagcgatcctggttatgcaccacagcatgaagccacaccccgcaattactgcaacactgctggatttcatgtgcaggattattcccaatttttatcctcccctggagggccacgtgagacagggagtgttttcaagtctcaatcatattgtggagaagagagtcctggcccacctggcccctttatttgataatcctaaactggacaaggaactgagggccatgcttagagagaagtttccagaattctgtagctccccttccccaccagttgaggtgaaaatagaagaacccgtaagtatggagatggataatcatatgagtgacaaggatgagagctgttacgacaacgccgaggcggccttcagtgatgatgaggaagatctgaactcgaagggcaagaaacgcgaattccggtttcaccccattaaggaaacagtggtggaggagcctgttgacatcactccatacctggaccagttggatgaatccttgcgggacaaagtgctacagctgcagaaaggcagtgatacggaagcacagtgcgaagtaatgcaggagatcgttgatcaagtgctcgaggaggacttcgactctgagcagttgtccgtcttggctagctgtctccaagaactgtttaaggcgcactttagaggagaagtcctccctgaggagattaccgaagagtctctggaggagtccgtgggtaaaccactgtacctaattttccggaacctgtgccaaatgcaggaggataatagctctttttcactgctattggatctgctgtcggagttgtaccagaagcagccgaaaatcggttaccatctactgtattacctccgagccagcaaggcagccgctgggaagatgaacttatatgagtcttttgcccaggccacccaactgggagacctacacacctgtttgatgatggacatgaaggcctgtcaggaagatgatgtccgcctcttgtgtcacctgactccttccatttataccgaatttccggatgaaaccctccggtctggagagctccttaacatgatcgtcgcagtgatcgactctgctcagctgcaggagcttgtgtgccatgtcatgatggggaacctggtgatgtttcgaaaggattccgtgctgaatatactcatacagtccctggattgggagacattcgagcaatattgtgcctggcaactcttcctcgcccataatattccgctggaaacgatcattcctatattgcagcacctgaagtacaaagagcaccccgaggcattgagctgtctgctcttgcaactgcgccgggagaagccctctgaggaaatggttaaaatggtgcttagccggccctgtcaccccgacgaccagtttaccacttctatcctgcgccactggtgcatgaaacacgatgagctgcttgccgaacacattaaatccctgctcatcaaaaacaactctcttcccagaaaaaggcagtccttgaggtcatcctccagtaagttggcccaactcaccttagagcaaatcctggaacacttggacaaccttcgcctgaatctcacgaacaccaagcaaaacttttttagccagactccaatactgcaggccttacagcacgtgcaagctagctgtgacgaggcccacaaaatgaaattctctgacctgttcagcctggccgaagagtacgaggacagttccacaaagcccccaaaaagcagaaggaaagcagcgttgtcttccccccgctctaggaagaatgccacacaaccaccgaatgctgaagaggaatccgggtcaagtagcgcatctgaagaggaggataccaaaccaaaaccgaccaaacgaaaacgcaagggaagctctgccgtgggtagcgacagtgattag

SEQ ID NO: 213852 - DNA, 3129 bp, Artificial Sequence
  derived and/or modified sequence
atggagctccagaaggggaaaggggcagcagctgccgctgcagccagtggagctgccggtggcggtgggggaggcgctggggcaggggctccagggggtggcagactgctgctgagcaccagcttggatgctaaggacgaacttgaggagcgactggaacgatgtatgtccatcgtaacatctatgaccgcaggggtgagtgaacgagaagctaacgacgcgctgaatgcctatgtgtgcaagggcctgcctcaacatgaagagatatgtctcggtctattcaccctgattctcacggaacccgcacaggctcagaaatgctatagagatcttgccctggtctcacgcgacggcatgaacattgttctgaacaaaatcaatcagatactgatggagaagtacctcaagctccaggatacctgcaggactcagctcgtttggctcgtccgcgaactcgttaaatcaggggtgctgggtgcagacggtgtctgcatgacgtttatgaagcagatcgctgggggagatgtcacagccaagaacatttggctggcagagagcgtgctagacattttgactgagcagcgggagtgggtgcttaagtcttccatattaatcgcaatggccgtgtatacctatctgcggttgattgtggaccaccacggcactgcccagttgcaggcgcttagacaaaaggaggtggacttctgcattagcctgctgcgtgagaggttcatggagtgtttgatgatcggccgtgacctggtgagactgctccagaacgtggctcgaatcccagagtttgagctgctgtggaaagacattattcacaacccgcaagctctctcccctcagtttaccggaatactgcagctcctgcagtctaggacaagccggaagtttctagcttgtcgcctaacccctgacatggaaacgaaattgctctttatgacttcaagggtgaggtttggtcagcagaaacgctatcaagattggtttcagcggcagtacctttcgacacctgactcacagagcctgaggtgtgacctgatcagatacatctgcggtgtggttcatccctccaatgaggtcctgtcctccgacattcttccacgatgggctatcataggttggctccttaccacgtgtactagtaacgtagccgctagtaacgcaaagctggcccttttctatgattggctgttttttagcccagataaggattcaatcatgaacatcgagccagccatcctcgtgatgcatcattccatgaaaccgcatccagcaattactgcgacgctcctggattttatgtgtcgaatcatccctaatttctacccaccattagagggacatgtgcgccaaggggtgtttagcagcctgaaccatattgtggagaagcgagttctagcgcaccttgccccactttttgataaccccaaattggacaaagaacttcgggcaatgttgcgggagaaatttcctgaattttgctcatcaccgtctccacccgtggaagtgaagatagaggagccggtgtccatggagatggacaatcatatgagtgataaggatgaaagttgttacgacaacgccgaagcggcattctctgacgatgaggaagatctcaactcaaaaggcaagaagcgagaattcaggtttcaccccattaaggaaactgtggtcgaggagcccgttgacattactccctatctggaccagctagatgagtctctgcgcgacaaggtcctgcagctccaaaaaggcagcgatacagaggcacagtgtgaggtcatgcaggagatcgtggaccaggttctagaagaagattttgattcagagcagctgtccgtgctggcatcctgcctgcaagagctcttcaaggcccatttcagaggagaagtattgccagaagagatcaccgaagagagcttggaggagtccgtaggcaagcccttgtacctcatatttagaaacctatgtcagatgcaggaagataatagtagcttctcgctcctccttgaccttctgagcgaactgtaccaaaagcagcccaaaattggataccaccttctgtactacctgagagccagtaaggccgctgccggaaaaatgaatctatacgagagcttcgcccaagctacacaactgggcgaccttcacacttgcctcatgatggacatgaaagcctgtcaagaagatgatgttcgcctgctctgtcacttgactccaagcatctacaccgaattccccgacgagacattacgtagcggtgagcttcttaatatgattgtggccgttattgattcagctcagttgcaggagcttgtgtgtcatgtgatgatggggaatctagtgatgttcagaaaagattccgtgctgaacatcctgattcagagcttagactgggaaacatttgagcagtattgcgcctggcagctgttcttggcccataatattccactcgagaccattattcccattttgcagcatctcaagtataaggaacatcccgaagctttgagctgtcttctcctgcagctgcggagggagaaaccgagcgaggagatggtgaaaatggtgctgtcccggccttgtcaccccgacgatcagtttacaacgagcatcctgaggcactggtgtatgaaacatgacgaactgctcgcggagcacattaaaagcctactgatcaagaacaatagtctacccaggaagcgccagagcctgcgctcatcatcatccaaactcgctcagttgaccctagagcagattctagagcatttagacaatttaagactgaacttgactaacacaaagcagaatttttttagtcagacccccatcctgcaagccttacaacatgttcaagcctcctgtgacgaggctcacaaaatgaaattctcggaccttttcagtttagccgaggaatatgaagattcttccacgaagcctcccaagtcccgacgcaaagctgcattgagcagtcccaggtccaggaaaaatgccacacagcctcctaacgcagaagaagaatccggctcatcttcagccagcgaggaggaggataccaaacccaagccaaccaagaggaagagaaagggaagcagtgccgtgggctccgacagcgactag

SEQ ID NO: 213853 - DNA, 3129 bp, Artificial Sequence
  derived and/or modified sequence
atggagttgcaaaaaggaaaaggcgctgccgctgccgcagcagcttccggagctgccggtggcggaggtggaggagccggagccggagcaccgggtggcggacgactgctgctgtccactagcctagatgctaaagacgagctggaggagaggcttgagagatgtatgagcattgtcaccagtatgaccgcaggcgtcagcgagagagaggccaacgatgcactgaacgcctatgtttgtaagggactgccacaacacgaagagatctgtctgggcctcttcacgttgattctcacggagccagcacaggcgcaaaaatgctatcgtgacctcgccttggtatctagggacgggatgaacattgtcctcaacaaaattaaccagatcttaatggagaagtacttgaaacttcaagacacttgcaggacccaactggtttggttggtgcgtgagctcgtaaaatctggggtcctgggagcagacggagtgtgtatgacctttatgaagcaaatcgccggaggcgatgttactgcgaagaacatttggctcgctgaaagcgtcctcgatatcctaaccgaacaacgtgaatgggtgctgaaatcctctattttgatagccatggctgtctacacatatctgcggttgattgtagatcaccacggcactgcgcagctgcaggcacttcgccagaaagaagtggacttttgcatctcgctactgcgtgagcgcttcatggaatgcctgatgatcggtcgcgacttggtcaggctgctgcaaaacgtggctcgaatccctgaattcgagctgctctggaaggacatcatccataatcctcaggcattatccccccagttcaccggtattctgcaactgctacagagccggacctcgcggaaattccttgcctgcagactaacacctgacatggagactaagctcctgtttatgacttcccgcgtccgatttggccaacagaagcgctaccaggactggtttcagaggcaatacctgagcacccctgactcccagtctctgcgctgcgaccttattcggtatatctgcggagtagtacaccccagtaacgaagtgctgagcagcgatattcttccaagatgggcgattatcggctggctgctaacaacctgtacttctaacgtggctgcgagtaacgccaagcttgcccttttctacgattggctcttcttctcaccggataaggacagcatcatgaacattgaacccgctatattagtcatgcaccactcgatgaaaccacatcccgctatcacagctactctgctggattttatgtgccggatcatcccaaatttttaccccccactggagggccacgtcagacagggcgtattcagtagtcttaaccacatcgtcgaaaaacgagtactggcacacttggcaccactgtttgataaccccaagctagacaaggaactgcgggctatgctcagggagaaatttcccgagttttgttcttcaccaagcccgcctgtcgaagtaaagatcgaagagccagtatctatggagatggataatcacatgagtgacaaagatgagagttgctacgacaacgctgaagctgccttctccgatgacgaagaagatctgaattctaaaggcaaaaaacgcgaattccggtttcatcccataaaagagactgtagtcgaagaaccggtcgacatcaccccctacctcgaccagttggacgaatctctccgggacaaggtgctccagcttcagaagggttctgacacagaggctcagtgtgaagtgatgcaggaaatcgttgaccaggttttggaggaggatttcgactctgagcagttatccgttcttgcatcttgtctgcaggaactctttaaagcccatttccgcggtgaagtgttgccggaagagattacagaggaatctctggaggagtcggtagggaaacccctgtatttaatttttcgcaatctgtgtcaaatgcaggaggataacagctcgtttagcttgcttttggacctgttatcagaactctaccagaagcagcccaaaatcggctatcatcttctctattatttgagagccagtaaggccgctgctgggaagatgaacttgtacgagagtttcgcacaggcaacacagctgggggatctccacacatgtttaatgatggacatgaaagcttgtcaggaggatgacgttcgcctcctctgtcacttgactccctctatctatactgaattcccagacgaaacgctgcgctctggcgaacttctcaacatgatcgttgcggtgattgacagcgcacaactgcaggaactggtgtgccatgtcatgatggggaacttggtcatgtttagaaaggactctgtacttaatattctcattcagtctctcgattgggagaccttcgagcagtactgcgcatggcagctgttcttagctcacaacatcccactcgaaactatcattcctatactgcaacatttaaaatacaaggaacatccagaagccttatcctgcctcctgctccagctcagaagggagaagcccagtgaggaaatggttaaaatggttttgtcacgtccatgtcatcccgacgatcaatttactacctcaatccttcggcattggtgcatgaaacatgacgagcttctggcagagcacatcaaaagtctgcttattaagaataactcacttccccgtaagaggcagagccttagatcctcctccagcaagctggctcagctgacactggagcagatcctagagcacctggacaacctgaggctgaaccttaccaacaccaagcagaacttcttctcccaaactcctattttgcaagctctccaacacgtgcaggctagctgtgacgaggctcacaagatgaagttttctgatttattttcgctcgctgaggaatacgaggactcaagcacgaagccccctaaatcccgcagaaaggcggctctgtcaagcccaagatctagaaagaatgccacacagccccctaacgcagaggaagagtcaggctctagtagcgctagcgaagaggaagacactaagcctaagccaaccaaacgaaaacgcaaggggagctccgcagttggatcagactccgactag

SEQ ID NO: 213854 - DNA, 3129 bp, Artificial Sequence
  derived and/or modified sequence
atggagctgcagaagggcaagggcgccgccgccgccgccgccgccagcggcgccgccggcggcggcggcggcggcgccggcgccggcgcccccggcggcggcagactgctgctgagcaccagcctggacgccaaggacgagctggaggagagactggagagatgcatgagcatcgtgaccagcatgaccgccggcgtgagcgagagagaggccaacgacgccctgaacgcctacgtgtgcaagggcctgccccagcacgaggagatctgcctgggcctgttcaccctgatcctgaccgagcccgcccaggcccagaagtgctacagagacctggccctggtgagcagagacggcatgaacatcgtgctgaacaagatcaaccagatcctgatggagaagtacctgaagctgcaggacacctgcagaacccagctggtgtggctggtgagagagctggtgaagagcggcgtgctgggcgccgacggcgtgtgcatgaccttcatgaagcagatcgccggcggcgacgtgaccgccaagaacatctggctggccgagagcgtgctggacatcctgaccgagcagagagagtgggtgctgaagagcagcatcctgatcgccatggccgtgtacacctacctgagactgatcgtggaccaccacggcaccgcccagctgcaggccctgagacagaaggaggtggacttctgcatcagcctgctgagagagagattcatggagtgcctgatgatcggcagagacctggtgagactgctgcagaacgtggccagaatccccgagttcgagctgctgtggaaggacatcatccacaacccccaggccctgagcccccagttcaccggcatcctgcagctgctgcagagcagaaccagcagaaagttcctggcctgcagactgacccccgacatggagaccaagctgctgttcatgaccagcagagtgagattcggccagcagaagagataccaggactggttccagagacagtacctgagcacccccgacagccagagcctgagatgcgacctgatcagatacatctgcggcgtggtgcaccccagcaacgaggtgctgagcagcgacatcctgcccagatgggccatcatcggctggctgctgaccacctgcaccagcaacgtggccgccagcaacgccaagctggccctgttctacgactggctgttcttcagccccgacaaggacagcatcatgaacatcgagcccgccatcctggtgatgcaccacagcatgaagccccaccccgccatcaccgccaccctgctggacttcatgtgcagaatcatccccaacttctacccccccctggagggccacgtgagacagggcgtgttcagcagcctgaaccacatcgtggagaagagagtgctggcccacctggcccccctgttcgacaaccccaagctggacaaggagctgagagccatgctgagagagaagttccccgagttctgcagcagccccagcccccccgtggaggtgaagatcgaggagcccgtgagcatggagatggacaaccacatgagcgacaaggacgagagctgctacgacaacgccgaggccgccttcagcgacgacgaggaggacctgaacagcaagggcaagaagagagagttcagattccaccccatcaaggagaccgtggtggaggagcccgtggacatcaccccctacctggaccagctggacgagagcctgagagacaaggtgctgcagctgcagaagggcagcgacaccgaggcccagtgcgaggtgatgcaggagatcgtggaccaggtgctggaggaggacttcgacagcgagcagctgagcgtgctggccagctgcctgcaggagctgttcaaggcccacttcagaggcgaggtgctgcccgaggagatcaccgaggagagcctggaggagagcgtgggcaagcccctgtacctgatcttcagaaacctgtgccagatgcaggaggacaacagcagcttcagcctgctgctggacctgctgagcgagctgtaccagaagcagcccaagatcggctaccacctgctgtactacctgagagccagcaaggccgccgccggcaagatgaacctgtacgagagcttcgcccaggccacccagctgggcgacctgcacacctgcctgatgatggacatgaaggcctgccaggaggacgacgtgagactgctgtgccacctgacccccagcatctacaccgagttccccgacgagaccctgagaagcggcgagctgctgaacatgatcgtggccgtgatcgacagcgcccagctgcaggagctggtgtgccacgtgatgatgggcaacctggtgatgttcagaaaggacagcgtgctgaacatcctgatccagagcctggactgggagaccttcgagcagtactgcgcctggcagctgttcctggcccacaacatccccctggagaccatcatccccatcctgcagcacctgaagtacaaggagcaccccgaggccctgagctgcctgctgctgcagctgagaagagagaagcccagcgaggagatggtgaagatggtgctgagcagaccctgccaccccgacgaccagttcaccaccagcatcctgagacactggtgcatgaagcacgacgagctgctggccgagcacatcaagagcctgctgatcaagaacaacagcctgcccagaaagagacagagcctgagaagcagcagcagcaagctggcccagctgaccctggagcagatcctggagcacctggacaacctgagactgaacctgaccaacaccaagcagaacttcttcagccagacccccatcctgcaggccctgcagcacgtgcaggccagctgcgacgaggcccacaagatgaagttcagcgacctgttcagcctggccgaggagtacgaggacagcagcaccaagccccccaagagcagaagaaaggccgccctgagcagccccagaagcagaaagaacgccacccagccccccaacgccgaggaggagagcggcagcagcagcgccagcgaggaggaggacaccaagcccaagcccaccaagagaaagagaaagggcagcagcgccgtgggcagcgacagcgactag

SEQ ID NO: 213855 - DNA, 3129 bp, Artificial Sequence
  derived and/or modified sequence
atggagctccagaaaggcaagggcgctgctgctgccgcggctgccagtggtgcagcaggcggaggcggtgggggggctggggcaggcgcacctgggggcggaaggctcctgctttccacaagcttggatgccaaggacgaattggaagaaaggctggaaagatgcatgagtatcgtgaccagcatgaccgccggagtcagcgaaagagaagcgaatgacgctttaaacgcatatgtctgcaaaggcttgcctcagcatgaggagatctgcctgggcttgttcactctgattctgacggaacccgcccaggctcagaagtgctaccgggatttggctctagtgtccagagacggaatgaacatcgtgctgaacaagattaatcagatattaatggagaagtatttgaaactgcaagatacctgtcgtacacagctggtgtggttggtcagagagctcgtgaagtcaggagtgttaggggccgatggggtgtgcatgacattcatgaaacaaattgcaggcggtgacgtcactgccaagaatatatggctggccgagtccgtgctcgacatcctcacggagcagcgtgagtgggtgctgaagtccagtatactgatcgcaatggcggtttatacctaccttagactgatcgtggatcaccacggcaccgcccagctccaggccctgcggcagaaggaggtggatttttgtatctctctgctgcgcgaaagattcatggagtgtttgatgatcggacgtgatttggtgcggctactacagaacgtggcccggataccagaattcgagctgctctggaaggacatcatccataaccctcaagccctgagtccacagttcaccggcatactccagctgttgcaatcgagaacaagtcggaagtttctggcctgccggctgaccccagatatggaaaccaagttgcttttcatgacatctagggtaagattcgggcagcaaaaacgttaccaggactggtttcagcggcagtacctgtctacccccgacagtcagagtctcaggtgcgacctgattcgatatatctgtggggtggtgcacccttctaacgaagttctttcctctgatattttaccacggtgggccatcatcggttggctgctgaccacgtgcacttcaaacgtcgctgcttccaacgcaaaactggccttgttttacgactggctcttctttagccccgacaaggactctatcatgaatatagagcccgccatcctggtcatgcaccacagtatgaagccgcaccctgcaatcaccgccactctgctggatttcatgtgtaggatcatcccaaatttttatcccccactggaggggcatgtccgccagggcgtgttttcctcattaaaccacatcgtcgaaaagagggtgttggcacacctggctccactctttgataatccaaaattggataaggagctacgcgctatgctgagagagaagttccccgaattttgctcctctccaagtcctcccgtcgaagtaaagatcgaggaaccagtatccatggagatggacaatcacatgagcgacaaggatgagtcttgctacgataacgcggaggcagctttcagcgacgacgaagaggacctcaactccaaagggaagaagagagaattccgtttccatccaataaaggagaccgtcgttgaggaacctgtcgacataacaccgtacctggaccagctggatgaaagcctccgggataaagtgcttcaattgcagaaaggcagtgatacagaggcacagtgtgaggtgatgcaggaaatcgtggatcaagttctggaagaggattttgacagtgagcagctgagtgtcctggcgtcctgcttgcaagaactgtttaaggcccacttcaggggggaggtgctacccgaagagatcacggaagaatccctcgaagaatccgtcggcaaacccctgtaccttatttttaggaatctatgtcagatgcaggaagataactcgtcctttagcctcctgctcgaccttctgagcgagttgtatcagaagcagcccaagattggctatcacctgctatactacctccgcgcaagcaaggccgccgctggaaaaatgaacctctacgaaagttttgctcaagctacacagctgggtgatcttcatacctgcctgatgatggatatgaaggcctgccaggaggacgacgtacgtttattgtgccatctgaccccatccatatacactgagttccctgatgaaaccctccgctctggggaactcctgaatatgattgtcgccgtcatagacagcgcccagcttcaggaactggtgtgtcatgtcatgatgggcaacttagtgatgtttcgaaaggacagcgtgctcaatattctgattcaatcactggattgggagaccttcgaacagtattgcgcatggcagttgttcttggctcataatatcccgctggagacaatcattccaatcctccagcacctgaagtataaggagcatcccgaagctttgtcatgtctgcttctccagctgcggcgggaaaagcccagtgaagagatggtgaaaatggtcttgagccgcccctgtcatcctgacgaccaatttacaacttccatcctaaggcattggtgtatgaagcacgatgaactgctggccgagcacattaagagccttctgatcaaaaataatagtctccccagaaaaaggcagagtctgcgctcgtctagcagtaagctggcccagctcacactcgagcagatcttggagcatctggataacctgagacttaatctgactaacaccaagcaaaattttttcagccagacacccattcttcaggccttgcaacacgtgcaggccagctgcgacgaggcccataaaatgaagtttagtgacctcttttctctcgccgaagagtatgaggattcatccacaaaaccaccaaaatcgagacgaaaggctgctctctcatcaccaagatctcgtaagaatgccacccagccgcccaacgccgaggaggaaagcggaagcagctcggcctctgaagaagaagacactaaaccaaagcccaccaagagaaagagaaagggtagctccgccgtggggtctgattcagactag

SEQ ID NO: 213856 - DNA, 3129 bp, Artificial Sequence
  derived and/or modified sequence
atggagctgcagaagggcaagggcgccgccgccgccgccgccgccagcggggcagctggaggtggcggcgggggcgcgggagctggagcccccggcgggggtcgtctgctgctcagtacatccttagatgctaaggatgagctcgaagagagactggagcggtgcatgtccattgtaacaagcatgactgccggtgtgagcgagcgagaggctaatgatgccttaaacgcatatgtctgtaaaggcctgccacagcacgaagagatctgtttaggtttatttactctgatcctcacagagccagcgcaggctcagaagtgctacagagatctggctctggtcagccgtgacggaatgaatattgtgctaaacaagataaatcagatcctcatggaaaagtatcttaagttgcaggacacgtgtcggacacaactggtgtggctcgtacgcgagctcgtcaaatcaggcgtcctgggggccgatggggtgtgcatgacatttatgaaacagatcgccggcggcgacgttactgcaaaaaatatctggctggctgaatctgtactcgacatacttaccgaacagcgagagtgggtattaaagtcctccatcctgatagccatggcggtgtatacctacctccgcctgatcgtggatcatcacggcacagctcagctgcaggcccttcggcaaaaagaggtcgacttctgcatctcattgcttagggagcgctttatggaatgcctgatgattggccgggacctggtgagattactgcagaatgtggcaagaatccccgaatttgaactgctgtggaaagacatcattcataaccctcaggcactgagtccccagtttacaggcatcctgcagctactccagtccagaacttcaaggaaatttttagcctgcagactgactcccgatatggagactaagctgctctttatgacatcaagggtgagattcggacagcagaaacgataccaggactggttccagagacaatatctgtccaccccagactcacaaagcctcagatgtgacctgatcagatatatctgtggtgtggtccacccaagcaatgaggtactgagctccgatatcctgccaagatgggcaatcatcggatggttgctcacaacatgcaccagcaacgtggccgccagtaatgccaagctcgccctgttttacgattggttgttcttctctcctgataaagacagtattatgaatatcgagcctgctatcctggtcatgcaccacagcatgaagccgcaccccgccattacggcaaccctcctggacttcatgtgtcgcatcatacccaatttctaccctcctctggagggacatgtacggcagggagtgttttcttcccttaatcatattgtggagaaaagggtgctggcccacctggcacccttattcgacaacccgaaactcgataaagagctgagagccatgttgcgggagaaatttcccgaattctgcagcagtccttcccctccagtcgaggtaaagatcgaagagcctgtttcaatggagatggacaatcatatgagcgacaaggatgagtcatgctatgacaatgctgaagcagccttttcggacgacgaggaagatctcaacagtaagggcaagaaacgagaatttcggttccaccctatcaaggaaaccgtggtggaggagcctgttgacattactccgtatcttgaccagttagacgagagtttgagagataaggttctccagctccagaagggctccgatactgaagcacaatgcgaagtgatgcaggaaatagtggaccaggtgctcgaagaagacttcgattcggaacaactgtctgttctggcctcttgcctccaggagttattcaaagctcatttcaggggagaggtccttcccgaagagattacagaggagtctctcgaggaatccgttggaaagccactgtatttgatttttcgcaacttgtgccagatgcaggaggacaactccagcttttctctcttactcgacctgttgagtgaactctaccagaagcagcctaagattgggtaccaccttctatactacttgagggcaagcaaagctgccgccggtaaaatgaacctctacgaaagtttcgcccaagcaacgcagctaggcgatctgcatacttgtcttatgatggacatgaaggcatgccaagaggacgacgtaaggctgctgtgtcaccttacgccctcaatctacacagaatttcccgatgaaacattgagatcaggcgaattactgaacatgatcgtggcagttatcgactccgcccaacttcaggagcttgtttgccacgttatgatgggcaatctggtaatgttcaggaaagatagtgtgttgaacatcctgatccaaagcctggactgggagacctttgaacagtattgcgcctggcagcttttcctcgctcataacatacctctagaaacaatcatacctatactgcagcatctgaagtacaaagaacatcctgaagctctcagctgcttgctgctgcagcttcgccgggaaaagccatctgaggagatggtgaagatggtcttgagcaggccctgccacccagacgaccagttcacgacgtcaatcttgaggcactggtgcatgaagcatgatgagctgctcgctgaacatataaagtcactgctcattaagaataattctttaccgcgaaagcgccaaagcctgaggtcttcatccagcaagctcgctcaattgacgctcgagcagatcctagagcatttagataacttaaggctcaacctgaccaacaccaagcagaatttcttttcccagacaccaatcttgcaggctcttcagcacgtccaggccagctgcgacgaggctcataagatgaaattcagcgatcttttttctctggctgaggagtatgaagatagttctacaaagccccctaagagcaggaggaaggccgcgttgagcagccctaggtcccgcaaaaatgcaacacagccaccaaatgctgaagaggagtcggggtcgtcgtcagcaagtgaagaggaggacacgaagcccaaaccaactaaaaggaagcgaaaaggcagtagcgccgtcgggtccgacagtgattag

SEQ ID NO: 213857 - DNA, 3129 bp, Artificial Sequence
  derived and/or modified sequence
atggaactacagaaagggaaaggggcagctgccgctgcagccgctagtggagccgctggaggcggaggagggggagctggagccggtgcccctggtggcggacggcttttgctgagcacctctctggatgccaaagatgagctcgaggagcggctcgaacgttgcatgtcgattgtgacctctatgaccgcgggtgtgagcgaaagggaagccaacgatgccctaaacgcctacgtatgtaaggggctgccgcaacacgaagaaatctgtctgggtttgtttactctcatattaaccgagcccgctcaagcccaaaagtgctatcgcgacctggcgttagtgtctcgggacggcatgaacattgttttgaacaaaatcaatcagatcctgatggagaagtatctgaagctgcaagacacttgcaggacacagctcgtctggctggtccgtgagcttgtgaaaagcggggtactgggagcagatggggtttgtatgacatttatgaaacagatcgccggaggcgacgttaccgccaagaacatctggcttgctgagagtgtcttagacattctcaccgagcaacgggaatgggtgttgaaatccagcatactcattgcgatggccgtgtacacttacctgcggctgattgtagatcaccacggtaccgcgcaactgcaagcactgaggcagaaagaggtggatttttgtatctcacttctgcgcgaacggttcatggagtgcctgatgattggacgagatctcgttagacttctgcagaatgtggccagaataccggaatttgagctcctgtggaaagatattattcacaatccacaggcgctttctccccagtttacaggaattctgcagctgctgcagagccgtacaagtcggaagtttctcgcgtgccgtctgactccagatatggagaccaagctgttattcatgacctctcgtgttcgcttcgggcagcagaagcggtatcaggactggtttcagagacaatatctcagtacacccgattcacagtctctgcggtgtgatctcatccgttatatatgcggtgtggtgcatccttcgaacgaggtgctgtcgtctgacatcctgccgagatgggctataatcgggtggctgctcaccacttgcacgtccaatgttgccgctagcaacgcaaaactcgcccttttctacgactggctattttttagccccgacaaagattccataatgaatatcgagcccgctatcctagtaatgcatcacagcatgaagccacacccagccatcaccgccactttactcgatttcatgtgtaggataatccccaacttctaccccccattggaaggtcacgttcgccagggggtgttttcaagtctgaaccacattgtggaaaagcgggttctggctcacctcgcacctctcttcgacaaccctaagctcgataaggagctccgcgcaatgcttcgggagaagttcccagagttttgcagcagcccgtctccacctgtcgaagttaaaatagaggaacctgtgtctatggagatggataaccacatgtcagataaggatgaaagttgctatgataacgctgaggccgcattcagcgatgacgaggaggatctgaactccaagggcaaaaaacgggaattcaggtttcatcccataaaagagacagtggtggaggaacctgtagatattacaccttacctcgaccaactcgatgagtccctgcgagataaggtgttgcagctccaaaaagggagcgatacagaggctcaatgtgaggtcatgcaggagatagtagaccaggttctggaagaggattttgactccgagcagctgagcgttcttgcatcttgtctgcaggaactgtttaaggctcatttcagaggtgaggtcctgcccgaggagataacagaggagagccttgaagaatccgtcggtaaaccgctttacctcatcttcaggaacctgtgccagatgcaggaagacaattccagcttttctctgctgttagatctgctctcagagctctatcaaaagcagcctaaaataggctaccacttgctgtattatctcagagctagtaaggccgcagcagggaaaatgaatctttacgagtcttttgctcaggcaactcagctgggagacctccacacttgcctgatgatggatatgaaggcatgccaagaggacgacgtgcggctgctgtgccaccttaccccaagcatctacactgaattccccgatgagacattgcgctccggagagctgctgaacatgatcgtcgccgttatcgattccgcgcagttgcaggagttggtgtgccacgtgatgatgggcaacctagttatgtttcgcaaggacagtgtgctgaacatcctcatccagtccttagactgggaaaccttcgaacaatactgtgcttggcagctctttctcgcgcacaatattccactggagacaatcattccgatcttgcagcatcttaagtacaaggaacaccccgaggccctctcctgtctcctgctgcagctacggcgtgagaagcccagcgaagagatggtgaagatggttctttcgcgtccctgtcatccagacgaccaatttactacgagcatcctccgccattggtgtatgaaacatgacgagctgctggctgaacacatcaaatccttgctgatcaagaacaatagcctgccaagaaagagacagtctcttcgaagctctagctccaaactggctcagctcaccctcgagcagatcctggaacacctggacaatcttaggctcaacctgaccaataccaagcaaaacttcttcagtcagacgcctattctgcaagctctacagcacgtgcaggcttcttgcgatgaagcacacaagatgaagttttcggatctgttttcactggcggaggaatatgaagatagtagcaccaaacctcccaagagcagaagaaaggcggctctgtcctcacctcggtcgaggaaaaatgcaacccagccccctaacgctgaagaggaatcaggctcgagctccgcctctgaagaggaagacaccaagcctaaacctacgaaacgcaagcgcaagggtagtagcgctgttggctccgattctgactag

SEQ ID NO: 213858 - protein, 1144 aa, Artificial Sequence
  derived and/or modified sequence
MMRQAPTARKTTTRRPKPTRPASTGVAGASSSLGPSGSASAGELSSSEPSTPAQTPLAAPIIPTPVLTSPGAVPPLPSPSKEEEGLRAQVRDLEEKLETLRLKRAEDKAKLKELEKHKIQLEQVQEWKSKMQEQQADLQRRLKEARKEAKEALEAKERYMEEMADTADAIEMATLDKEMAEERAESLQQEVEALKERVDELTTDLEILKAEIEEKGSDGAASSYQLKQLEEQNARLKDALVRMRDLSSSEKQEHVKLQKLMEKKNQELEVVRQQRERLQEELSQAESTIDELKEQVDAALGAEEMVEMLTDRNLNLEEKVRELRETVGDLEAMNEMNDELQENARETELELREQLDMAGARVREAQKRVEAAQETVADYQQTIKKYRQLTAHLQDVNRELTNQQEASVERQQQPPPETFDFKIKFAETKAHAKAIEMELRQMEVAQANRHMSLLTAFMPDSFLRPGGDHDCVLVLLLMPRLICKAELIRKQAQEKFELSENCSERPGLRGAAGEQLSFAAGLVYSLSLLQATLHRYEHALSQCSVDVYKKVGSLYPEMSAHERSLDFLIELLHKDQLDETVNVEPLTKAIKYYQHLYSIHLAEQPEDCTMQLADHIKFTQSALDCMSVEVGRLRAFLQGGQEATDIALLLRDLETSCSDIRQFCKKIRRRMPGTDAPGIPAALAFGPQVSDTLLDCRKHLTWVVAVLQEVAAAAAQLIAPLAENEGLLVAALEELAFKASEQIYGTPSSSPYECLRQSCNILISTMNKLATAMQEGEYDAERPPSKPPPVELRAAALRAEITDAEGLGLKLEDRETVIKELKKSLKIKGEELSEANVRLSLLEKKLDSAAKDADERIEKVQTRLEETQALLRKKEKEFEETMDALQADIDQLEAEKAELKQRLNSQSKRTIEGLRGPPPSGIATLVSGIAGEEQQRGAIPGQAPGSVPGPGLVKDSPLLLQQISAMRLHISQLQHENSILKGAQMKASLASLPPLHVAKLSHEGPGSELPAGALYRKTSQLLETLNQLSTHTHVVDITRTSPAAKSPSAQLMEQVAQLKSLSDTVEKLKDEVLKETVSQRPGATVPTDFATFPSSAFLRAKEEQQDDTVYMGKVTFSCAAGFGQRHRLVLTQEQLHQLHSRLIS

SEQ ID NO: 213859 - protein, 155 aa, Artificial Sequence
  derived and/or modified sequence
MAAETRNVAGAEAPPPQKRYYRQRAHSNPMADHTLRYPVKPEEMDWSELYPEFFAPLTQNQSHDDPKDKKEKRAQAQVEFADIGCGYGGLLADKDVLPLPRPTFQADKAQVANHQSHPASRICLRAKSWGAGVYHNRCAGATRLDVHSFRRAPTV

SEQ ID NO: 213860 - DNA, 468 bp, Artificial Sequence
  derived and/or modified sequence
atggcagccgaaacgagaaatgttgctggagctgaggcgccccccccccaaaaacggtactacagacagcgggcacatagcaatcctatggcagaccacacccttaggtatccagttaaacccgaggaaatggattggtcagagctctaccccgagttttttgctcctttgactcaaaatcaaagccacgatgaccccaaggacaaaaaggagaagagggcccaggcccaggtggagttcgcagacatcggctgcgggtatggcggactgctcgccgataaggatgtcttacccttacctcgacctacatttcaggccgacaaagcgcaggtggcaaatcaccagtcccaccctgcctctcgaatatgcctgagagccaaatcctggggcgctggggtgtaccacaatcggtgtgcgggggccacacgcctggacgtgcactctttcagacgagcacctactgtgtag

SEQ ID NO: 213861 - DNA, 468 bp, Artificial Sequence
  derived and/or modified sequence
atggctgctgagaccagaaatgtggccggggctgaggcccccccaccccagaagcgctactaccggcagagggcccacagcaaccccatggctgaccacaccctgcgctaccctgtgaagccagaggagatggactggagcgagctgtacccagagttctttgcccccctgacccagaaccagagccatgatgaccccaaggacaagaaggagaagagggcccaggcccaggtggagtttgctgacatcggctgcggctatggaggcctgctggccgacaaggatgtgctgcccctgccccggcccaccttccaggccgacaaggcccaggtggccaaccaccagagccacccagccagccgcatctgcctgcgggccaagtcctggggcgccggcgtgtaccacaacagatgtgccggggccacccggctggatgtgcacagcttccggcgggcccccaccgtgtag

SEQ ID NO: 213862 - DNA, 1096 bp, Artificial Sequence
  derived and/or modified sequence
cacgtggatttggtagagaaaccccggactgggatcatggcagccgagactcggaacgtggccggagcagaggccccaccgccccagaagcgctactaccggcaacgtgctcactccaaccccatggcggaccacacgctgcgctaccctgtgaagccagaggagatggactggtctgagctatacccagagttcttcgctccactcactcaaaatcagagccacgatgacccaaaggataagaaagaaaagagagctcaggcccaagtggagtttgcagacataggctgtggctatggtggcctgttagctgacaaagatgttcttcctcttccccgacccacatttcaagcggacaaagcacaagtggcgaatcatcagtcccaccctgctagcagaatatgcctacgtgctaagagttggggggctggtgtataccataaccgatgtgctggagctacacgactggatgtgcactcatttcgaagagcacccactgtttgagcgtgtgcctctggaggacctgagtgaagaccccgttgtgggacatctaggcacctcaactgaggaggggaagaaagttctacgtaatggagggaagaatttcccagccatcttccgaagaatacaagatcccgtcctccaggcagtgacctcccaaaccagcctgcctggtcactgactgcttactctaccttagctggacctcgtctcccagggattagagaaaagagcaggagtcctgggtcttcccagttgagactgctggagctgagacacagtactctcttaaagaaggtggggagctgcccagggcagaacccactggtgttcatgactacccctggctcctctcaccttgtccctccactgccaacagaaaacaaagcagctgactgagatggtcaaaggactttggaccataggggatctttggaaggctgtggggtcttgctcttccttagcactcctttctccttgtgagatctctcctcagctggaatgaggaatgtagtccatctaaactgcttgctaggctcaattaccacttctgtttgctttgtggatcctgggataacatgtatatgtgtacaca

SEQ ID NO: 213863 - DNA, 468 bp, Artificial Sequence
  derived and/or modified sequence
atggccgccgagacccggaacgtggccggcgccgaggccccccccccccagaagagatactaccggcagcgggcacactccaatcctatggcagatcatacactgagataccctgtcaagcccgaagagatggattggtccgagctgtatcccgagtttttcgcaccattaactcagaatcagagccacgatgatccaaaggacaaaaaggagaagcgagcacaggcccaggtggaattcgcagacatcggctgtggatatggcgggctgcttgccgacaaggatgttctgcctctcccacgccccacatttcaggcagacaaggcccaggtagcaaatcatcagtcacacccagcctcacggatttgtctacgtgctaaatcctggggggccggcgtttatcacaaccgttgtgcaggagccaccagactggatgtacatagtttccgtagggcccccacagtctag

SEQ ID NO: 213864 - DNA, 468 bp, Artificial Sequence
  derived and/or modified sequence
atggctgcggagacccggaacgtcgccggagccgaggctcccccaccccagaaacgatactaccgccagagagcacattccaatcctatggccgaccacactctgcggtaccctgtgaaaccagaggaaatggactggtctgagctttaccccgagttctttgcccctttaacccagaatcagtcacatgacgatccgaaagacaagaaggagaaacgtgcccaggctcaggttgagtttgccgacataggctgcggttatggcggactactcgcagacaaggacgtgcttccactcccaaggcccaccttccaggcagataaagctcaggttgcaaaccaccagtctcacccagcctctaggatctgcttaagggcaaaaagctggggcgcaggcgtgtaccataatagatgtgccggagcaaccaggcttgatgtccactcattccgaagagcccctacagtctag

SEQ ID NO: 213865 - DNA, 468 bp, Artificial Sequence
  derived and/or modified sequence
atggccgccgagaccagaaacgtggccggcgccgaggccccccccccccagaagagatactacagacagagagcccacagcaaccccatggccgaccacaccctgagataccccgtgaagcccgaggagatggactggagcgagctgtaccccgagttcttcgcccccctgacccagaaccagagccacgacgaccccaaggacaagaaggagaagagagcccaggcccaggtggagttcgccgacatcggctgcggctacggcggcctgctggccgacaaggacgtgctgcccctgcccagacccaccttccaggccgacaaggcccaggtggccaaccaccagagccaccccgccagcagaatctgcctgagagccaagagctggggcgccggcgtgtaccacaacagatgcgccggcgccaccagactggacgtgcacagcttcagaagagcccccaccgtgtag

SEQ ID NO: 213866 - protein, 1437 aa, Artificial Sequence
  derived and/or modified sequence
MDFSFSFMQGIMGNTIQQPPQLIDSANIRQEDAFDNNSDIAEDGGQTPYEATLQQGFQYPATTEDLPPLTNGYPSSISVYETQTKYQSYNQYPNGSANGFGAVRNFSPTDYYHSEIPNTRPHEILEKPSPPQPPPPPSVPQTVIPKKTGSPEIKLKITKTIQNGRELFESSLCGDLLNEVQASEHTKSKHESRKEKRKKSNKHDSSRSEERKSHKIPKLEPEEQNRPNERVDTVSEKPREEPVLKEEAPVQPILSSVPTTEVSTGVKFQVGDLVWSKVGTYPWWPCMVSSDPQLEVHTKINTRGAREYHVQFFSNQPERAWVHEKRVREYKGHKQYEELLAEATKQASNHSEKQKIRKPRPQRERAQWDIGIAHAEKALKMTREERIEQYTFIYIDKQPEEALSQAKKSVASKTEVKKTRRPRSVLNTQPEQTNAGEVASSLSSTEIRRHSQRRHTSAEEEEPPPVKIAWKTAAARKSLPASITMHKGSLDLQKCNMSPVVKIEQVFALQNATGDGKFIDQFVYSTKGIGNKTEISVRGQDRLIISTPNQRNEKPTQSVSSPEATSGSTGSVEKKQQRRSIRTRSESEKSTEVVPKKKIKKEQVETVPQATVKTGLQKGASEISDSCKPLKKRSRASTDVEMTSSAYRDTSDSDSRGLSDLQVGFGKQVDSPSATADADVSDVQSMDSSLSRRGTGMSKKDTVCQICESSGDSLIPCEGECCKHFHLECLGLASLPDSKFICMECKTGQHPCFSCKVSGKDVKRCSVGACGKFYHEACVRKFPTAIFESKGFRCPQHCCSACSMEKDIHKASKGRMMRCLRCPVAYHSGDACIAAGSMLVSSYILICSNHSKRSSNSSAVNVGFCFVCARGLIVQDHSDPMFSSYAYKSHYLLNESNRAELMKLPMIPSSSASKKKCEKGGRLLCCESCPASFHPECLSIEMPEGCWNCNDCKAGKKLHYKQIVWVKLGNYRWWPAEICNPRSVPLNIQGLKHDLGDFPVFFFGSHDYYWVHQGRVFPYVEGDKSFAEGQTSINKTFKKALEEAAKRFQELKAQRESKEALEIEKNSRKPPPYKHIKANKVIGKVQIQVADLSEIPRCNCKPADENPCGLESECLNRMLQYECHPQVCPAGDRCQNQCFTKRLYPDAEIIKTERRGWGLRTKRSIKKGEFVNEYVGELIDEEECRLRIKRAHENSVTNFYMLTVTKDRIIDAGPKGNYSRFMNHSCNPNCETQKWTVNGDVRVGLFALCDIPAGMELTFNYNLDCLGNGRTECHCGADNCSGFLGVRPKSACASTNEEKAKNAKLKQKRRKIKTEPKQMHEDYCFQCGDGGELVMCDKKDCPKAYHLLCLNLTQPPYGKWECPWHQCDECSSAAVSFCEFCPHSFCKDHEKGALVPSALEGRLCCSEHDPMAPVSPEYWSKIKCKWESQDHGEEVKE

SEQ ID NO: 213867 - protein, 1374 aa, Artificial Sequence
  derived and/or modified sequence
MDFSFSFMQGIMGNTIQQPPQLIDSANIRQEDAFDNNSDIAEDGGQTPYEATLQQGFQYPATTEDLPPLPPPPPSVPQTVIPKKTGSPEIKLKITKTIQNGRELFESSLCGDLLNEVQASEHTKSKHESRKEKRKKSNKHDSSRSEERKSHKIPKLEPEEQNRPNERVDTVSEKPREEPVLKEEAPVQPILSSVPTTEVSTGVKFQVGDLVWSKVGTYPWWPCMVSSDPQLEVHTKINTRGAREYHVQFFSNQPERAWVHEKRVREYKGHKQYEELLAEATKQASNHSEKQKIRKPRPQRERAQWDIGIAHAEKALKMTREERIEQYTFIYIDKQPEEALSQAKKSVASKTEVKKTRRPRSVLNTQPEQTNAGEVASSLSSTEIRRHSQRRHTSAEEEEPPPVKIAWKTAAARKSLPASITMHKGSLDLQKCNMSPVVKIEQVFALQNATGDGKFIDQFVYSTKGIGNKTEISVRGQDRLIISTPNQRNEKPTQSVSSPEATSGSTGSVEKKQQRRSIRTRSESEKSTEVVPKKKIKKEQVETVPQATVKTGLQKGASEISDSCKPLKKRSRASTDVEMTSSAYRDTSDSDSRGLSDLQVGFGKQVDSPSATADADVSDVQSMDSSLSRRGTGMSKKDTVCQICESSGDSLIPCEGECCKHFHLECLGLASLPDSKFICMECKTGQHPCFSCKVSGKDVKRCSVGACGKFYHEACVRKFPTAIFESKGFRCPQHCCSACSMEKDIHKASKGRMMRCLRCPVAYHSGDACIAAGSMLVSSYILICSNHSKRSSNSSAVNVGFCFVCARGLIVQDHSDPMFSSYAYKSHYLLNESNRAELMKLPMIPSSSASKKKCEKGGRLLCCESCPASFHPECLSIEMPEGCWNCNDCKAGKKLHYKQIVWVKLGNYRWWPAEICNPRSVPLNIQGLKHDLGDFPVFFFGSHDYYWVHQGRVFPYVEGDKSFAEGQTSINKTFKKALEEAAKRFQELKAQRESKEALEIEKNSRKPPPYKHIKANKVIGKVQIQVADLSEIPRCNCKPADENPCGLESECLNRMLQYECHPQVCPAGDRCQNQCFTKRLYPDAEIIKTERRGWGLRTKRSIKKGEFVNEYVGELIDEEECRLRIKRAHENSVTNFYMLTVTKDRIIDAGPKGNYSRFMNHSCNPNCETQKWTVNGDVRVGLFALCDIPAGMELTFNYNLDCLGNGRTECHCGADNCSGFLGVRPKSACASTNEEKAKNAKLKQKRRKIKTEPKQMHEDYCFQCGDGGELVMCDKKDCPKAYHLLCLNLTQPPYGKWECPWHQCDECSSAAVSFCEFCPHSFCKDHEKGALVPSALEGRLCCSEHDPMAPVSPEYWSKIKCKWESQDHGEEVKE

SEQ ID NO: 213868 - protein, 25 aa, Artificial Sequence
  derived and/or modified sequence
MDFSFSFMQGIMGNTIQQPPQLIDS

SEQ ID NO: 213869 - DNA, 4314 bp, Artificial Sequence
  derived and/or modified sequence
atggacttcagcttcagcttcatgcagggcatcatgggcaacaccatccagcagcccccccagctgatcgacagcgccaacatcagacaggaggacgccttcgacaacaacagcgacatcgccgaggacggcggccagaccccctacgaggccaccctgcagcagggcttccagtaccccgccaccaccgaggacctgccccccctgaccaacggctaccccagcagcatcagcgtgtacgagacccagaccaagtaccagagctacaaccagtaccccaacggcagcgccaacggcttcggcgccgtgagaaacttcagccccaccgactactaccacagcgagatccccaacaccagaccccacgagatcctggagaagcccagccccccccagcccccccccccccccagcgtgccccagaccgtgatccccaagaagaccggcagccccgagatcaagctgaagatcaccaagaccatccagaacggcagagagctgttcgagagcagcctgtgcggcgacctgctgaacgaggtgcaggccagcgagcacaccaagagcaagcacgagagcagaaaggagaagagaaagaagagcaacaagcacgacagcagcagaagcgaggagagaaagagccacaagatccccaagctggagcccgaggagcagaacagacccaacgagagagtggacaccgtgagcgagaagcccagagaggagcccgtgctgaaggaggaggcccccgtgcagcccatcctgagcagcgtgcccaccaccgaggtgagcaccggcgtgaagttccaggtgggcgacctggtgtggagcaaggtgggcacctacccctggtggccctgcatggtgagcagcgacccccagctggaggtgcacaccaagatcaacaccagaggcgccagagagtaccacgtgcagttcttcagcaaccagcccgagagagcctgggtgcacgagaagagagtgagagagtacaagggccacaagcagtacgaggagctgctggccgaggccaccaagcaggccagcaaccacagcgagaagcagaagatcagaaagcccagaccccagagagagagagcccagtgggacatcggcatcgcccacgccgagaaggccctgaagatgaccagagaggagagaatcgagcagtacaccttcatctacatcgacaagcagcccgaggaggccctgagccaggccaagaagagcgtggccagcaagaccgaggtgaagaagaccagaagacccagaagcgtgctgaacacccagcccgagcagaccaacgccggcgaggtggccagcagcctgagcagcaccgagatcagaagacacagccagagaagacacaccagcgccgaggaggaggagcccccccccgtgaagatcgcctggaagaccgccgccgccagaaagagcctgcccgccagcatcaccatgcacaagggcagcctggacctgcagaagtgcaacatgagccccgtggtgaagatcgagcaggtgttcgccctgcagaacgccaccggcgacggcaagttcatcgaccagttcgtgtacagcaccaagggcatcggcaacaagaccgagatcagcgtgagaggccaggacagactgatcatcagcacccccaaccagagaaacgagaagcccacccagagcgtgagcagccccgaggccaccagcggcagcaccggcagcgtggagaagaagcagcagagaagaagcatcagaaccagaagcgagagcgagaagagcaccgaggtggtgcccaagaagaagatcaagaaggagcaggtggagaccgtgccccaggccaccgtgaagaccggcctgcagaagggcgccagcgagatcagcgacagctgcaagcccctgaagaagagaagcagagccagcaccgacgtggagatgaccagcagcgcctacagagacaccagcgacagcgacagcagaggcctgagcgacctgcaggtgggcttcggcaagcaggtggacagccccagcgccaccgccgacgccgacgtgagcgacgtgcagagcatggacagcagcctgagcagaagaggcaccggcatgagcaagaaggacaccgtgtgccagatctgcgagagcagcggcgacagcctgatcccctgcgagggcgagtgctgcaagcacttccacctggagtgcctgggcctggccagcctgcccgacagcaagttcatctgcatggagtgcaagaccggccagcacccctgcttcagctgcaaggtgagcggcaaggacgtgaagagatgcagcgtgggcgcctgcggcaagttctaccacgaggcctgcgtgagaaagttccccaccgccatcttcgagagcaagggcttcagatgcccccagcactgctgcagcgcctgcagcatggagaaggacatccacaaggccagcaagggcagaatgatgagatgcctgagatgccccgtggcctaccacagcggcgacgcctgcatcgccgccggcagcatgctggtgagcagctacatcctgatctgcagcaaccacagcaagagaagcagcaacagcagcgccgtgaacgtgggcttctgcttcgtgtgcgccagaggcctgatcgtgcaggaccacagcgaccccatgttcagcagctacgcctacaagagccactacctgctgaacgagagcaacagagccgagctgatgaagctgcccatgatccccagcagcagcgccagcaagaagaagtgcgagaagggcggcagactgctgtgctgcgagagctgccccgccagcttccaccccgagtgcctgagcatcgagatgcccgagggctgctggaactgcaacgactgcaaggccggcaagaagctgcactacaagcagatcgtgtgggtgaagctgggcaactacagatggtggcccgccgagatctgcaaccccagaagcgtgcccctgaacatccagggcctgaagcacgacctgggcgacttccccgtgttcttcttcggcagccacgactactactgggtgcaccagggcagagtgttcccctacgtggagggcgacaagagcttcgccgagggccagaccagcatcaacaagaccttcaagaaggccctggaggaggccgccaagagattccaggagctgaaggcccagagagagagcaaggaggccctggagatcgagaagaacagcagaaagccccccccctacaagcacatcaaggccaacaaggtgatcggcaaggtgcagatccaggtggccgacctgagcgagatccccagatgcaactgcaagcccgccgacgagaacccctgcggcctggagagcgagtgcctgaacagaatgctgcagtacgagtgccacccccaggtgtgccccgccggcgacagatgccagaaccagtgcttcaccaagagactgtaccccgacgccgagatcatcaagaccgagagaagaggctggggcctgagaaccaagagaagcatcaagaagggcgagttcgtgaacgagtacgtgggcgagctgatcgacgaggaggagtgcagactgagaatcaagagagcccacgagaacagcgtgaccaacttctacatgctgaccgtgaccaaggacagaatcatcgacgccggccccaagggcaactacagcagattcatgaaccacagctgcaaccccaactgcgagacccagaagtggaccgtgaacggcgacgtgagagtgggcctgttcgccctgtgcgacatccccgccggcatggagctgaccttcaactacaacctggactgcctgggcaacggcagaaccgagtgccactgcggcgccgacaactgcagcggcttcctgggcgtgagacccaagagcgcctgcgccagcaccaacgaggagaaggccaagaacgccaagctgaagcagaagagaagaaagatcaagaccgagcccaagcagatgcacgaggactactgcttccagtgcggcgacggcggcgagctggtgatgtgcgacaagaaggactgccccaaggcctaccacctgctgtgcctgaacctgacccagcccccctacggcaagtgggagtgcccctggcaccagtgcgacgagtgcagcagcgccgccgtgagcttctgcgagttctgcccccacagcttctgcaaggaccacgagaagggcgccctggtgcccagcgccctggagggcagactgtgctgcagcgagcacgaccccatggcccccgtgagccccgagtactggagcaagatcaagtgcaagtgggagagccaggaccacggcgaggaggtgaaggagtag

SEQ ID NO: 213870 - DNA, 4125 bp, Artificial Sequence
  derived and/or modified sequence
atggacttcagcttcagcttcatgcagggcatcatgggcaacaccatccagcagcccccccagctgatcgacagcgccaacatcagacaggaggacgccttcgacaacaacagcgacatcgccgaggacggcggccagaccccctacgaggccaccctgcagcagggcttccagtaccccgccaccaccgaggacctgccccccctgcccccccccccccccagcgtgccccagaccgtgatccccaagaagaccggcagccccgagatcaagctgaagatcaccaagaccatccagaacggcagagagctgttcgagagcagcctgtgcggcgacctgctgaacgaggtgcaggccagcgagcacaccaagagcaagcacgagagcagaaaggagaagagaaagaagagcaacaagcacgacagcagcagaagcgaggagagaaagagccacaagatccccaagctggagcccgaggagcagaacagacccaacgagagagtggacaccgtgagcgagaagcccagagaggagcccgtgctgaaggaggaggcccccgtgcagcccatcctgagcagcgtgcccaccaccgaggtgagcaccggcgtgaagttccaggtgggcgacctggtgtggagcaaggtgggcacctacccctggtggccctgcatggtgagcagcgacccccagctggaggtgcacaccaagatcaacaccagaggcgccagagagtaccacgtgcagttcttcagcaaccagcccgagagagcctgggtgcacgagaagagagtgagagagtacaagggccacaagcagtacgaggagctgctggccgaggccaccaagcaggccagcaaccacagcgagaagcagaagatcagaaagcccagaccccagagagagagagcccagtgggacatcggcatcgcccacgccgagaaggccctgaagatgaccagagaggagagaatcgagcagtacaccttcatctacatcgacaagcagcccgaggaggccctgagccaggccaagaagagcgtggccagcaagaccgaggtgaagaagaccagaagacccagaagcgtgctgaacacccagcccgagcagaccaacgccggcgaggtggccagcagcctgagcagcaccgagatcagaagacacagccagagaagacacaccagcgccgaggaggaggagcccccccccgtgaagatcgcctggaagaccgccgccgccagaaagagcctgcccgccagcatcaccatgcacaagggcagcctggacctgcagaagtgcaacatgagccccgtggtgaagatcgagcaggtgttcgccctgcagaacgccaccggcgacggcaagttcatcgaccagttcgtgtacagcaccaagggcatcggcaacaagaccgagatcagcgtgagaggccaggacagactgatcatcagcacccccaaccagagaaacgagaagcccacccagagcgtgagcagccccgaggccaccagcggcagcaccggcagcgtggagaagaagcagcagagaagaagcatcagaaccagaagcgagagcgagaagagcaccgaggtggtgcccaagaagaagatcaagaaggagcaggtggagaccgtgccccaggccaccgtgaagaccggcctgcagaagggcgccagcgagatcagcgacagctgcaagcccctgaagaagagaagcagagccagcaccgacgtggagatgaccagcagcgcctacagagacaccagcgacagcgacagcagaggcctgagcgacctgcaggtgggcttcggcaagcaggtggacagccccagcgccaccgccgacgccgacgtgagcgacgtgcagagcatggacagcagcctgagcagaagaggcaccggcatgagcaagaaggacaccgtgtgccagatctgcgagagcagcggcgacagcctgatcccctgcgagggcgagtgctgcaagcacttccacctggagtgcctgggcctggccagcctgcccgacagcaagttcatctgcatggagtgcaagaccggccagcacccctgcttcagctgcaaggtgagcggcaaggacgtgaagagatgcagcgtgggcgcctgcggcaagttctaccacgaggcctgcgtgagaaagttccccaccgccatcttcgagagcaagggcttcagatgcccccagcactgctgcagcgcctgcagcatggagaaggacatccacaaggccagcaagggcagaatgatgagatgcctgagatgccccgtggcctaccacagcggcgacgcctgcatcgccgccggcagcatgctggtgagcagctacatcctgatctgcagcaaccacagcaagagaagcagcaacagcagcgccgtgaacgtgggcttctgcttcgtgtgcgccagaggcctgatcgtgcaggaccacagcgaccccatgttcagcagctacgcctacaagagccactacctgctgaacgagagcaacagagccgagctgatgaagctgcccatgatccccagcagcagcgccagcaagaagaagtgcgagaagggcggcagactgctgtgctgcgagagctgccccgccagcttccaccccgagtgcctgagcatcgagatgcccgagggctgctggaactgcaacgactgcaaggccggcaagaagctgcactacaagcagatcgtgtgggtgaagctgggcaactacagatggtggcccgccgagatctgcaaccccagaagcgtgcccctgaacatccagggcctgaagcacgacctgggcgacttccccgtgttcttcttcggcagccacgactactactgggtgcaccagggcagagtgttcccctacgtggagggcgacaagagcttcgccgagggccagaccagcatcaacaagaccttcaagaaggccctggaggaggccgccaagagattccaggagctgaaggcccagagagagagcaaggaggccctggagatcgagaagaacagcagaaagccccccccctacaagcacatcaaggccaacaaggtgatcggcaaggtgcagatccaggtggccgacctgagcgagatccccagatgcaactgcaagcccgccgacgagaacccctgcggcctggagagcgagtgcctgaacagaatgctgcagtacgagtgccacccccaggtgtgccccgccggcgacagatgccagaaccagtgcttcaccaagagactgtaccccgacgccgagatcatcaagaccgagagaagaggctggggcctgagaaccaagagaagcatcaagaagggcgagttcgtgaacgagtacgtgggcgagctgatcgacgaggaggagtgcagactgagaatcaagagagcccacgagaacagcgtgaccaacttctacatgctgaccgtgaccaaggacagaatcatcgacgccggccccaagggcaactacagcagattcatgaaccacagctgcaaccccaactgcgagacccagaagtggaccgtgaacggcgacgtgagagtgggcctgttcgccctgtgcgacatccccgccggcatggagctgaccttcaactacaacctggactgcctgggcaacggcagaaccgagtgccactgcggcgccgacaactgcagcggcttcctgggcgtgagacccaagagcgcctgcgccagcaccaacgaggagaaggccaagaacgccaagctgaagcagaagagaagaaagatcaagaccgagcccaagcagatgcacgaggactactgcttccagtgcggcgacggcggcgagctggtgatgtgcgacaagaaggactgccccaaggcctaccacctgctgtgcctgaacctgacccagcccccctacggcaagtgggagtgcccctggcaccagtgcgacgagtgcagcagcgccgccgtgagcttctgcgagttctgcccccacagcttctgcaaggaccacgagaagggcgccctggtgcccagcgccctggagggcagactgtgctgcagcgagcacgaccccatggcccccgtgagccccgagtactggagcaagatcaagtgcaagtgggagagccaggaccacggcgaggaggtgaaggagtag

SEQ ID NO: 213871 - DNA, 4314 bp, Artificial Sequence
  derived and/or modified sequence
atggacttcagcttctccttcatgcaaggtattatgggcaacactatccagcagccacctcagctcattgattctgctaacattcgccaagaggatgcctttgataacaattcggacatcgcagaggatggcggtcagacaccctacgaggctacacttcagcagggatttcagtaccccgccaccaccgaagacttacctcctttgaccaatggttacccttcctccatttccgtttacgaaacgcaaactaagtatcagagttacaatcagtaccctaatggcagtgccaacgggtttggtgccgtgcgtaacttttcccctaccgactattaccacagcgaaatacccaatacacgccctcacgagatcctggaaaaaccttcacccccccaacctccaccccccccgtcagtcccccagaccgtcatccctaaaaaaaccggcagccctgaaataaaattaaaaattacaaaaaccatccagaatggcagggagttgttcgagtcatctctgtgtggtgaccttctgaacgaagtgcaggcctcagagcacaccaaatctaagcacgagagcagaaaggaaaaacggaaaaagtcgaacaagcatgatagcagtagatccgaggagcgcaagagccataaaattccaaagcttgagcccgaggaacaaaataggccaaatgagagggtggacacagtttcagaaaagcctagagaggaacccgtcttaaaagaggaggcaccagttcagcccatcctgagctccgttcccacgactgaagtctccacaggggtcaaatttcaggtgggagatcttgtgtggagtaaagtgggcacctacccttggtggccttgcatggtctcctccgacccgcagctggaggtccatacaaaaataaatactaggggcgctcgagaatatcatgtccagtttttttcaaatcagccagaaagagcttgggtgcacgagaaaagagtaagggaatacaaaggccataagcagtacgaggagttactcgccgaagccaccaagcaggccagcaaccacagcgagaaacagaaaatacggaagccgcggccccagcgcgaacgcgcccagtgggatataggaatcgcccatgccgaaaaggcccttaaaatgacgagagaggagagaatcgaacagtacacattcatctacatcgacaaacagccagaagaagcattgagccaggccaagaagtccgtggccagtaagacggaggtaaagaagactaggcgtccccgttcagtgctcaacacccagccggagcagactaacgctggtgaagtcgcctcctcccttagcagcacagagattagacgccatagccaacggcgtcatacaagtgcagaagaggaggagccacctcctgtgaaaattgcctggaagacagcagccgccaggaaatctctgcccgccagtatcaccatgcataaaggaagcctggatctccagaagtgtaacatgagtccagttgttaaaatagagcaggtcttcgctctccaaaacgccaccggggatggtaaatttattgatcaattcgtgtattctaccaaaggcatagggaataaaacagagatttccgtccggggacaggaccgcctcattatcagcaccccaaatcagagaaacgaaaagccaacccaaagtgtgtcttccccagaagccacatcaggcagtactgggagcgtcgagaagaaacagcagcggcggtcaatcagaacgcgctcagagagtgagaagagcaccgaagtggtgcccaagaaaaaaataaagaaagagcaagtagagaccgtgccccaagcaaccgtaaagacaggactgcaaaaaggcgccagcgaaatcagtgattcttgcaagcctctaaagaagagatccagggcctcaacggatgttgaaatgacatcttctgcttatcgggacacaagcgatagtgactctagaggcttgagtgacttgcaggtggggtttggtaaacaggttgacagcccaagcgcaacagccgacgccgacgtttctgatgtgcagagcatggattcgtctttgagtcgcaggggcactggcatgagtaaaaaagacactgtgtgtcagatctgtgaatcttccggcgattcgctgatcccttgcgagggcgagtgttgtaaacattttcacttggaatgtctgggcctggctagtctacctgattcaaaatttatttgcatggagtgtaaaaccggacagcacccgtgtttctcatgtaaggtgtccgggaaggatgtcaaaaggtgtagcgtaggagcctgcggcaagttttatcatgaagcctgtgtgaggaagttcccgacagccatcttcgagagcaaggggtttcgctgtccgcagcattgttgctcggcctgctcgatggagaaggatattcacaaggcatccaagggaaggatgatgcggtgcctgaggtgtcctgttgcctatcattctggcgacgcgtgcatcgccgctggttccatgctcgtgtctagttatatcttaatctgctctaaccattcaaagcgcagttcaaattcctctgcggttaatgtggggttctgctttgtttgcgcccggggactcatcgtgcaagaccactcagacccaatgttttcaagctacgcttataagtcacactacctcctaaacgagagcaatagggctgagttgatgaagctgcccatgatcccatccagttctgcctctaagaagaagtgtgaaaaaggaggtaggcttctgtgttgtgaatcttgccccgcatccttccaccccgaatgcctgtcaatcgagatgcccgaagggtgctggaactgcaacgattgcaaagctggaaaaaaattacactataaacaaattgtgtgggtcaaactgggcaactaccggtggtggcctgctgaaatctgtaaccccaggagtgtgcctttaaacatccagggcttgaagcatgatctaggcgactttccggtgtttttctttggctcccacgactattattgggtgcaccagggacgcgtcttcccgtatgtggaaggcgataaaagttttgctgaaggacagacatcaattaataagacatttaaaaaggctctcgaggaggctgctaaacggttccaagaattgaaagcacagagggaatctaaagaagcacttgaaatagagaagaactcccgaaagccgcctccttacaaacatatcaaagctaacaaggtgatcggtaaggtgcagatccaagtcgcagacctgtccgagatacctagatgtaattgcaagcccgccgatgagaacccctgtggcctagagagcgaatgcctgaaccgaatgctgcagtacgagtgccaccctcaagtctgccctgccggggatcggtgtcaaaatcagtgcttcactaaaagactgtatcccgacgccgaaatcatcaaaaccgaacgaagaggttgggggcttcgcacaaaaaggagtattaaaaagggcgagttcgtgaatgaatacgttggtgagctgattgatgaggaagagtgtcgactgcggattaaacgggcccacgaaaactccgtgacaaatttctatatgttaacagtaacaaaggacaggattatagatgcgggcccaaaagggaattactcgaggtttatgaaccacagttgcaacccaaactgcgaaacccagaagtggactgttaacggagacgtgcgcgtaggtttattcgccctttgcgatatccccgccggcatggagttgacattcaactacaacctcgattgtctgggaaatgggcgtacagagtgtcattgtggggcagacaactgttcgggtttcctcggagtgcggcctaagagtgcctgcgccagcaccaatgaagaaaaagctaaaaatgctaaactgaagcagaagcgcagaaaaataaaaactgagccgaagcagatgcacgaagattactgtttccagtgtggcgacggaggcgaactggtgatgtgtgataaaaaagattgtcctaaggcttaccatctcctgtgtttaaatttgacccagccaccctacggaaagtgggaatgcccctggcatcagtgtgacgaatgctcctccgcggccgtgagcttttgtgaattttgtccccacagcttctgcaaggatcatgaaaagggagcattggttccctcagctcttgaggggcgtctctgctgttcagaacacgaccctatggcaccagtgagtcctgagtattggtctaagatcaagtgtaaatgggagtcgcaggaccacggtgaagaggtgaaagaatag

SEQ ID NO: 213872 - DNA, 4125 bp, Artificial Sequence
  derived and/or modified sequence
atggatttctcatttagcttcatgcaggggattatggggaatactatccagcagcccccacaactcattgactcagcaaacattcgacaggaggacgctttcgataacaactccgatatcgccgaagatgggggccagaccccatacgaggcaaccctccagcaaggatttcaataccccgccactacagaggacctcccccctcttcctcctccaccgccttccgtgcctcagacagtgatccccaagaaaaccgggtcgccggagataaagctcaagatcacaaaaaccatccagaatggaagggagttgttcgagagctcactttgcggggatctcttgaacgaggtccaagcatcggagcatacaaagtccaaacatgagtctaggaaggaaaagagaaagaagtctaataaacatgacagctctaggtccgaagaacgtaagtcacacaaaatcccaaagctggagcctgaagagcagaataggcccaatgagagagtggataccgtgtccgagaagcctagagaggagccagttctcaaagaagaagcacccgttcagcctatccttagcagcgttccaaccaccgaagtgtcaactggtgttaaattccaggtgggcgacctcgtctggtcaaaagtgggcacgtatccctggtggccctgcatggtgtccagtgatccacagctggaggtacacacgaagattaacactagaggagcgcgagagtaccacgtgcagttcttctctaaccagccagaacgcgcgtgggttcatgaaaaaagagtgagagagtacaagggccataaacagtacgaggagctgctcgccgaagcaaccaaacaagcttctaaccactctgagaagcagaaaattcgtaaacctcggcctcagcgcgaacgtgcccaatgggatattggcatcgcccatgctgagaaagccttaaagatgacccgggaagaacgtattgagcaatatacatttatttatattgataagcagccagaagaagccctgtcccaggccaagaaaagcgtcgccagtaaaaccgaggtgaaaaaaacacgcagaccacgctcagttctgaacactcagcccgagcagaccaatgcgggggaggtggcatcatccctcagtagcaccgagatccgtcgacacagccagcgtcggcatacctccgctgaagaagaggaaccgcctccggttaagatagcatggaaaactgctgcagcgcgaaagtctctgccggcctcaattactatgcacaagggatcgctggacctgcaaaaatgcaacatgtcaccagttgtgaaaatcgaacaagtgttcgctttgcagaatgcaactggtgacggcaaatttattgaccagttcgtgtattcgaccaaggggatcggaaataagacggaaatcagcgtgcggggccaggaccggcttattatcagcacccctaatcagagaaatgaaaagcccacgcagtcagtgagtagcccagaggcgacaagtggctcaactggatctgtagaaaaaaagcaacagaggaggtccattaggacaaggagcgagtcagaaaagtctaccgaagttgtgcctaaaaaaaaaatcaaaaaggagcaggtggaaacagtcccccaggccaccgttaagacagggctccagaagggcgccagcgagatctctgatagctgcaagcccctgaaaaagcgctccagggccagcaccgatgtcgagatgacttcttcagcgtatcgggatacatctgatagcgacagcaggggactgtcggatcttcaagtgggcttcggtaagcaagtcgacagcccgtcagcgactgctgacgccgacgtttcggacgtccagtctatggacagcagcctatcaaggcgggggaccggaatgtccaagaaagatacagtctgccagatctgcgagtcttccggcgatagcctcatcccttgtgagggcgagtgctgtaagcattttcacttggagtgcctcggcctggcatctctgcctgatagtaagtttatttgcatggagtgcaaaacagggcagcatccatgtttcagctgtaaggtgtcaggcaaagacgtaaagagatgcagcgtaggcgcatgcggaaaattctatcacgaagcctgcgtacggaaattcccgaccgctattttcgaatctaagggctttagatgccctcagcactgttgctccgcatgcagcatggaaaaagatatccataaagcatctaagggaaggatgatgcggtgtctgcgttgccccgtcgcctaccacagcggcgatgcctgtatagctgcaggcagcatgctcgtatcaagttacatcctgatttgctctaaccatagcaagcggtcgagtaatagttcagccgtcaatgtggggttttgctttgtatgcgctagaggcctcattgtgcaggaccacagcgatccgatgttcagtagttatgcatataaaagtcattaccttctcaacgagtccaacagggcagaactgatgaagcttcccatgatccccagcagttcggcctccaaaaagaaatgtgaaaagggcggccgcctgttatgctgtgagtcctgcccagcaagtttccatccggagtgcctttcaattgaaatgcccgaagggtgttggaactgcaacgattgcaaagcaggcaaaaaattgcattataaacaaatcgtgtgggtgaaactcgggaattaccgttggtggccagctgagatctgtaaccctaggtccgtaccccttaacattcagggcctgaagcacgatctgggtgacttcccagtttttttttttggtagtcatgactattattgggttcaccaagggagggtgtttccatatgtagagggtgataaatctttcgcagagggacaaacctctatcaataaaacgtttaaaaaggcacttgaggaagctgctaaacggtttcaagagctgaaagctcagagggagtccaaagaggccctggaaattgagaagaacagcaggaagccaccgccctataagcacataaaggcaaacaaggtgatcggaaaagtgcagatccaggtcgccgatctatctgagattcccagatgtaactgtaaacctgccgatgagaatccatgcggcctggaatccgaatgcctgaatcggatgctccagtatgagtgccacccccaggtctgtcctgcgggcgatagatgtcaaaatcagtgtttcactaagagactatatcccgacgctgaaataatcaaaactgaaagacgggggtggggcctgcgaaccaaacggtctatcaagaagggagagttcgtgaatgagtacgtgggggaactcatagacgaggaggagtgcagactgagaatcaagagagcccacgagaactccgttaccaatttttacatgcttacagtaaccaaagaccgtatcatcgatgcagggccaaagggaaattacagccgatttatgaatcacagttgcaacccaaactgcgagacacagaagtggaccgtcaacggggatgtcagggtgggacttttcgctctttgcgatattccagcaggcatggagctgacctttaactataacctggactgcctggggaacggcagaacggaatgccattgcggcgcggacaattgctctggattcctgggtgtgcggccaaaaagcgcatgtgcctccacaaatgaggagaaagcaaaaaatgccaagctcaaacagaaacggcgaaagattaagacagagccaaaacaaatgcatgaggactactgcttccagtgtggcgacggaggggagcttgttatgtgcgataaaaaggactgcccaaaggcctatcatttgctctgcctaaacctgacccagcctccatacgggaaatgggaatgtccctggcatcagtgcgacgagtgctcttcagctgcagtctccttctgtgagttttgtccccattccttctgtaaagatcacgaaaagggcgcccttgtcccttccgcgctggaaggtcggttgtgctgttcagaacacgaccccatggctccggtgagtccagagtactggtctaagattaaatgcaaatgggaaagccaggatcacggcgaggaagtgaaggagtag

SEQ ID NO: 213873 - DNA, 4314 bp, Artificial Sequence
  derived and/or modified sequence
atggacttctccttctccttcatgcagggcatcatgggcaacaccatccagcagcccccccagctgattgattctgccaacatccggcaggaggatgcctttgacaacaacagcgacattgctgaagatggcggccagaccccctatgaggccaccctgcagcagggcttccagtacccagccaccacagaggacctgccccccctgaccaacggctaccccagcagcatctctgtgtatgagacccagaccaagtaccagagctacaaccagtaccccaacggcagcgccaacggctttggagctgtgaggaacttcagccccacagactactaccacagcgagatccccaacacccggccccatgagatcctggagaagcccagccccccccagcccccacctccacccagcgtgccccagaccgtcatccccaagaagacaggcagccctgagatcaagctgaagatcaccaagaccatccagaatggccgggagctgtttgagagcagcctgtgtggggacctgctgaatgaggtgcaggccagcgagcacaccaagagcaagcatgagagcaggaaggagaagaggaagaagagcaacaagcatgacagcagccgctctgaggagaggaagagccacaagatccccaagctggagcctgaggagcagaaccggcccaatgaaagagtggacacagtgtctgagaagccccgggaggagcctgtgctgaaggaggaggcccctgtgcagcccatcctgagctctgtgcccaccacagaggtgtccactggagtgaagttccaggtgggggacctggtgtggagcaaggtgggcacctacccctggtggccctgcatggtgtccagtgacccccagctggaggtgcacaccaagatcaacaccaggggggcccgggagtaccacgtgcagttcttcagcaaccagcctgagcgggcctgggtgcatgagaagagggtgcgggagtacaagggccacaagcagtatgaggagctgctggccgaggccaccaagcaggccagcaaccacagcgagaagcagaagatcaggaagccccggccccagcgggagcgggcccagtgggacatcggcatcgcccatgctgagaaggccctgaagatgacccgggaggagagaattgagcagtacaccttcatctacatcgacaagcagcctgaggaggccctgagccaggccaagaagtctgtggccagcaagacagaggtgaagaagacccggcggcccaggtctgtgctgaacacccagcctgagcagaccaatgctggggaggtggccagcagcctgagcagcacagagatccgccgccacagccagaggaggcacaccagcgctgaggaggaggagcccccacctgtgaagatcgcctggaagacagctgctgccaggaagagcctgcctgccagcatcaccatgcacaagggcagcctggacctgcagaagtgcaacatgagccctgtggtgaagattgagcaggtgtttgccctgcagaatgccactggagatggcaagttcatcgaccagtttgtgtacagcaccaagggcatcggcaacaagacagagatctctgtgcggggccaggacaggctcatcatcagcacccccaaccagagaaatgagaagcccacccagagcgtgagcagccctgaggccaccagcggcagcactggatctgtggagaagaagcagcagaggaggagcatccgcaccaggtctgagagcgagaagagcacagaggtggtgcccaagaagaagatcaagaaggagcaggtggagaccgtgccccaggccaccgtgaagacaggcctgcagaagggggccagcgagatcagtgacagctgcaagcccctgaagaagaggagccgggccagcacagatgtggagatgaccagcagcgcctacagagacaccagtgacagcgacagccggggcctgagtgacctgcaggtgggctttgggaagcaggtggacagccccagcgccacagcagatgctgatgtgtctgatgtgcagagcatggacagcagcctgagccggcggggcaccggcatgagcaagaaggacacagtgtgccagatctgtgagagcagcggggacagcctcatcccctgtgagggggagtgctgcaagcacttccacctggagtgcctgggcctggccagcctgcctgacagcaagttcatctgcatggagtgcaagacaggccagcacccctgcttcagctgcaaggtgtctgggaaggatgtgaagcgctgcagcgtgggcgcctgtgggaagttctaccacgaggcctgtgtgaggaagttccccacagccatctttgagagcaagggcttccgctgcccccagcactgctgcagcgcctgcagcatggagaaggacatccacaaggccagcaaaggaaggatgatgcgctgcctgcgctgccctgtggcctaccacagcggagatgcctgcatcgctgctggctccatgctggtgagcagctacatcctgatctgcagcaaccacagcaagaggagcagcaacagcagcgctgtgaatgtgggcttctgctttgtgtgtgcccggggcctgattgtgcaggaccacagcgaccccatgttcagcagctatgcctacaagagccactacctgctgaatgaaagcaacagagctgagctgatgaagctgcccatgatccccagcagcagcgccagcaagaagaagtgtgagaagggcggccgcctgctgtgctgtgagagctgcccagccagcttccaccctgagtgcctgagcattgagatgcctgagggctgctggaactgcaatgactgcaaggccggcaagaagctgcactacaagcagatcgtgtgggtgaagctgggcaactaccgctggtggccagctgagatctgcaaccccaggtctgtgcccctgaacatccagggcctgaagcatgacctgggggacttccctgtgttcttcttcggcagccatgactactactgggtgcaccagggccgggtcttcccctacgtggagggggacaagagctttgctgagggccagaccagcatcaacaagaccttcaagaaggccctggaggaggccgccaagcgcttccaggagctgaaggcccagcgggagagcaaggaggccctggagattgagaagaacagcaggaagcccccaccctacaagcacatcaaggccaacaaggtgattggcaaggtgcagatccaggtggccgacctgtctgagatcccccgctgcaactgcaagccagcagatgagaacccctgtggcctggagagtgaatgtctgaacaggatgctgcagtatgagtgccacccccaggtgtgcccagctggggaccgctgccagaaccagtgcttcaccaagaggctgtacccagatgctgagatcatcaagacagagcggcggggctggggcctgcggaccaagaggagcatcaagaagggggagtttgtgaatgaatatgtgggggagctgattgatgaggaggagtgccgcctgcgcatcaagagggcccatgaaaattctgtgaccaacttctacatgctgactgtgaccaaggaccgcatcattgatgctggccccaagggcaactacagccgcttcatgaaccacagctgcaaccccaactgtgagacccagaagtggacagtgaatggagatgtgcgggtgggcctgtttgccctgtgtgacatcccagctggcatggagctgaccttcaactacaacctggactgcctgggcaatggccgcacagagtgccactgtggggctgacaactgcagcggcttcctgggcgtgcggcccaagagcgcctgtgccagcaccaatgaggagaaggccaagaatgccaagctgaagcagaagaggaggaagatcaagacagagcccaagcagatgcatgaggactactgcttccagtgtggagatggaggagagctggtgatgtgtgacaagaaggactgccccaaggcctaccacctgctgtgcctgaacctgacccagcccccctacggcaagtgggagtgcccctggcaccagtgtgatgaatgtagcagcgctgctgtgtccttctgtgagttctgcccccacagcttctgcaaggaccacgagaagggggccctggtgcccagcgccctggagggccgcctgtgctgcagcgagcatgaccccatggcccctgtgtccccagagtactggagcaagatcaagtgcaagtgggagagccaggaccatggagaggaggtgaaggagtag
